United States Patent Application Publication US 2018/0305689 A1 - sequence listing, part 86

SEQ ID NO: 1242637 - DNA, 4001 bp, Homo sapiens
ggtcagccttatattcctactctaatctcacccctatccccgtcccacacccactattcttaaaacctccatggtcctccgggggcagctgtagacacattaagcccagggctatggggccactggaaccttctccagtgggtctgaaaacatcagcattccaggagttgatgagcccctacctgggcaccactccctcttgggcctgagaaggccggggggaacctgcaaggaatatgtggaattctatatggtgcctctgatactgcggtaatgtcagggagaggtttgttcaactggtcagggccctgaaaccccgatcactttctcatctctgcatcttgaaggctagcagagaggaggaaccctgagctctctaggaggtgggtaggtggtggcagtacagactcctagatgtctaaacggagttgcagagagaaggctttctcggtagaccctggaagggacttttacggtagaactttcattttacaagcagggatagaggcctagatggggacagagacgtgtccaaggtaaaacaatggacggaggcagggcagggagaggccaggtcctagactcggcctcagcacccctcccacacacacatcgacacagaagctggtccagatttataatttaatggctgtgcagatcccagtccctcatttctgtcgctcacgtgcccactggtctggggtcagggttttctgttcaaaggcatggatgtgcgggagctcttctgctaggcacgcgttcaccagcctggggcgagagatggggttaggaaaaggccagcggtgatcgcacaccccgaggctagggtgacccaagagactggtgtccccaaggttgtagtccccaggccgtgggaacacgtacttggagagagggtctacatcgaaatactcgaagcaggggtcacgaaggcgggatcctcaaggtccctgagccacgccagggggagtgcgggagtcaggttgcaggggtagggggagtggctggggttgtggtacaggagctaggcaaggtgctcccagggccttacctgtgtctctgaagcagcggtttcccctcgaacttggccgacaccaccaggactcggaagctacaggagcaacggttgagggtcgtgtcctccacctcctaccgagcggaagaatatgaatggtgccgaacccgccccccgagctcttttccccttgtccggcggctcaactcaccacatgctccgcctccaggtcccgctgcagcttctcgcggaggtattcggcgctgagttccatggcggcagtccagctggaacggcagcccagcagggacacaaccccagctcgggcgccggccacgctaccttgctgccttacaggagccacttccgctggaaaactcacttccgcccttactaaggcgtacgtcaacgcagtacttccgccctcaagcagccgggctttccagcggtccaggcttttcgcgcttgccatgtgtcagccaatcagagcctgaggaaggtgggactcgggcggagccgatgctgaatggtacgcgctcgccgactggacagcagtctggcttccgcggtcggacttctacacccgcctccagacaggagaggggcacgtaccggcgctacggcttcctgcaggctgcctccggatagtccccgagagcttgttccgaagcaagcaccctgcagccctagcgatccagccctcccctggaccctaggtcacggcaatcaaccccctgctgtggttcccgaaccccaaggcccgatgggtcccgcgggggtcgcggcgaggccagggcgctttttcggcgtctacctgctctactgcctgaacccccggtaccggggccgcgtctacgtggggttcactgtcaacactgctcgtcgggtccagcagcacaatgggggccgcaaaaaaggcggggcctggcggaccagcgggcgagggccctggtgagagggggaggccttctgtgccgggaggaaggcgtcccagaggaggcggaccccgcggggcacaggcctgttgagaaggaccggccaggactgtgacagaggcggggcgtctgtggtggggacggggcctgtcgcaggggaggagcgtgacggggaggcggtgcccggggcatctccgcggcggaactcagggaaggagctagctggggcgggggtgatgatccaggctgggttccagcatagggctcttggtgggcacgctggggtcgggtggaatgcaggagagagaggaggtgggacaggtgggtacctgggctggaggcagggcctgaggtgggcaggtgcagagggctgcacttctcggctgaagccgggaatgaggaccccgctctcgggtgggattggaggggacccgcggctgaggcgctgggctgcgacagggacatcacggttctcctcctcagggagatggtgctcgtcgtgcacggcttcccgtcctccgtggccgcccttcgggtaaggaaggagaccgggcagcggcggccgggtgagggcttgggttccgcccctcgctccgagccgccctgatgcccctgtacgccgcccgcagtttgagtgggcttggcagcacccgcacgcctcgcgccgcctggcgcacgtggggcctcgcctgcgaggagagacagccttcgctttccacctgcgcgtgctggcgcacatgctgcgcgcaccgccctgggctcgcctcccgctcacgctgcgctgggtgcgcccagacctccgccaggacctctgcctcccgccgccgccgcacgtgcctctggccttcgggcctccaccgccccaggccccggccccaaggcgccgcgcaggtccctttgatgacgcggagcctgagccagaccagggggatccaggggcctgctgctccctgtgcgcccagaccatccaggtgaggtccccccgaggaatggatggctctagagtccagacgacttcggatccagctctttcttgagggaaacccactgacacgctttggccaccctatccccatctctaagatgctgatgctataggacttacggccattcctgagcaaagcaggccctgctcagggccttcaccatttccccttcaaagaaaaggttcttccctaggccatcagtactccgctgcactccagtgtggtcgacagagcatgaccctcttttttttttttttttttttgagatggagtctagctctgtcgcccaggctagagtgcagtggcgcgatctctgctcactgcaagctccgcctcctgggttcacgccattctcctgcctcagcctcccgagtagctgggactacaggcgcccgccaccacgcctggttaattttttgtatttttagtagagacggggtttcaccgtgttagccaggatggtctcgatgtcctagcctcgtgatccgcccgcctcagcctcccaaagtgctgggattacaggcatgagccaccgcgcccggccctttttttttttttagacagagtcttgctctgttgcggaggctggagtgcagtgatctcagctcactggaagctccgcctcctgggttcaagcgattctcctatctcaacctcccaagtgtgccaccacacctgccgaatgtttgtgtttttagtagggatggggttcgccatgttgggcaggctggtctcaaactcctgacctcaagtgatctgcccgcctcggcctcccagagtgctgggattataggcgtgagccaccatgcctggacatgaccctgtctctaaaacaatgtaatgaactgcagctcattcttgtgtgcacttttctgcaccccctttcccttaacacttactattgtctggcatgctacgtgttttcttgatctcattagcctctcccaccccaactgccacactgcactatcagagggcagcacttatcactgctgtagaacaaagtcctgcactgagccgatggcccagaaattttctttttatttatttatttatttttttttt

SEQ ID NO: 1242638 - DNA, 4001 bp, Homo sapiens
ggtcagccttatattcctactctaatctcacccctatccccgtcccacacccactattcttaaaacctccatggtcctccgggggcagctgtagacacattaagcccagggctatggggccactggaaccttctccagtgggtctgaaaacatcagcattccaggagttgatgagcccctacctgggcaccactccctcttgggcctgagaaggccggggggaacctgcaaggaatatgtggaattctatatggtgcctctgatactgcggtaatgtcagggagaggtttgttcaactggtcagggccctgaaaccccgatcactttctcatctctgcatcttgaaggctagcagagaggaggaaccctgagctctctaggaggtgggtaggtggtggcagtacagactcctagatgtctaaacggagttgcagagagaaggctttctcggtagaccctggaagggacttttacggtagaactttcattttacaagcagggatagaggcctagatggggacagagacgtgtccaaggtaaaacaatggacggaggcagggcagggagaggccaggtcctagactcggcctcagcacccctcccacacacacatcgacacagaagctggtccagatttataatttaatggctgtgcagatcccagtccctcatttctgtcgctcacgtgcccactggtctggggtcagggttttctgttcaaaggcatggatgtgcgggagctcttctgctaggcacgcgttcaccagcctggggcgagagatggggttaggaaaaggccagcggtgatcgcacaccccgaggctagggtgacccaagagactggtgtccccaaggttgtagtccccaggccgtgggaacacgtacttggagagagggtctacatcgaaatactcgaagcaggggtcacgaaggcgggatcctcaaggtccctgagccacgccagggggagtgcgggagtcaggttgcaggggtagggggagtggctggggttgtggtacaggagctaggcaaggtgctcccagggccttacctgtgtctctgaagcagcggtttcccctcgaacttggccgacaccaccaggactcggaagctacaggagcaacggttgagggtcgtgtcctccacctcctaccgagcggaagaatatgaatggtgccgaacccgccccccgagctcttttccccttgtccggcggctcaactcaccacatgctccgcctccaggtcccgctgcagcttctcgcggaggtattcggcgctgagttccatggcggcagtccagctggaacggcagcccagcagggacacaaccccagctcgggcgccggccacgctaccttgctgccttacaggagccacttccgctggaaaactcacttccgcccttactaaggcgtacgtcaacgcagtacttccgccctcaagcagccgggctttccagcggtccaggcttttcgcgcttgccatgtgtcagccaatcagagcctgaggaaggtgggactcgggcggagccgatgctgaatggtacgcgctcgccgactggacagcagtctggcttccgcggtcggacttctacacccgcctccagacaggagaggggcacgtaccggcgctacggcttcctgcaggctgcctccggatagtccccgagagcttgttccgaagcaagcaccctgcagccctagcgatccagccctcccctggaccctaggtcacggcaatcaaccccctgctgtggttcccgaaccccaaggcccgatgggtcccgcgggggtcgcggcgaggccagggcgctttttcggcgtctacctgctctactgcctgaacccccggtaccggggccgcgtctacgtggggttcactgtcaacactgctcgtcgggtccagcagcacaatgggggccgcaaaaaaggcggggcctggcggaccagcgggcgagggccctggtgagagggggaggccttctgtgccgggaggaaggcgtcccagaggaggcggaccccgcggggcacaggcctgttgagaaggaccggccaggactgtgacagaggcggggcgtctgtggtggggacggggcctgtcgcaggggaggagcgtgacggggaggcggtgcccggggcatctccgcggcggaactcagggaaggagctagctggggcgggggtgatgatccaggctgggttccagcatagggctcttggtgggcacgctggggtcgggtggaatgcaggagagagaggaggtgggacaggtgggtacctgggctggaggcagggcctgaggtgggcaggtgcagagggctgcacttctcggctgaagccgggaatgaggaccccgctctcgggtgggattggaggggacccgcggctgaggcgctgggctgcgacagggacatcaccgttctcctcctcagggagatggtgctcgtcgtgcacggcttcccgtcctccgtggccgcccttcgggtaaggaaggagaccgggcagcggcggccgggtgagggcttgggttccgcccctcgctccgagccgccctgatgcccctgtacgccgcccgcagtttgagtgggcttggcagcacccgcacgcctcgcgccgcctggcgcacgtggggcctcgcctgcgaggagagacagccttcgctttccacctgcgcgtgctggcgcacatgctgcgcgcaccgccctgggctcgcctcccgctcacgctgcgctgggtgcgcccagacctccgccaggacctctgcctcccgccgccgccgcacgtgcctctggccttcgggcctccaccgccccaggccccggccccaaggcgccgcgcaggtccctttgatgacgcggagcctgagccagaccagggggatccaggggcctgctgctccctgtgcgcccagaccatccaggtgaggtccccccgaggaatggatggctctagagtccagacgacttcggatccagctctttcttgagggaaacccactgacacgctttggccaccctatccccatctctaagatgctgatgctataggacttacggccattcctgagcaaagcaggccctgctcagggccttcaccatttccccttcaaagaaaaggttcttccctaggccatcagtactccgctgcactccagtgtggtcgacagagcatgaccctcttttttttttttttttttttgagatggagtctagctctgtcgcccaggctagagtgcagtggcgcgatctctgctcactgcaagctccgcctcctgggttcacgccattctcctgcctcagcctcccgagtagctgggactacaggcgcccgccaccacgcctggttaattttttgtatttttagtagagacggggtttcaccgtgttagccaggatggtctcgatgtcctagcctcgtgatccgcccgcctcagcctcccaaagtgctgggattacaggcatgagccaccgcgcccggccctttttttttttttagacagagtcttgctctgttgcggaggctggagtgcagtgatctcagctcactggaagctccgcctcctgggttcaagcgattctcctatctcaacctcccaagtgtgccaccacacctgccgaatgtttgtgtttttagtagggatggggttcgccatgttgggcaggctggtctcaaactcctgacctcaagtgatctgcccgcctcggcctcccagagtgctgggattataggcgtgagccaccatgcctggacatgaccctgtctctaaaacaatgtaatgaactgcagctcattcttgtgtgcacttttctgcaccccctttcccttaacacttactattgtctggcatgctacgtgttttcttgatctcattagcctctcccaccccaactgccacactgcactatcagagggcagcacttatcactgctgtagaacaaagtcctgcactgagccgatggcccagaaattttctttttatttatttatttatttttttttt

SEQ ID NO: 1242639 - DNA, 4001 bp, Homo sapiens; identical to SEQ ID NO: 1242637

SEQ ID NO: 1242640 - DNA, 4001 bp, Homo sapiens; identical to SEQ ID NO: 1242638

SEQ ID NO: 1242641 - DNA, 4001 bp, Homo sapiens
tatgggttttataatttaaggaagaaaacaaaacattactcctacctagccaaaggtaataaaaactgggacaaaagggaaggaatagacttaagaaatccccaaaataagatctctaagacttggtgacttagcaatgtgttcaatcacatggaagagaaagctcctcttgtatatataaacataagaaaaattacataactaacctatgaaaatttaccttcacaataattgatgtaataagtcgttcagtggcaggttaaatttggaaagttaataacagtaataacaatgttattattattagagacagagtctcgtattattgcccaggctggagtgcagtggtatgatcatacctcactgtacctcaaactcctgggctcaagggatcctcccacctcagcctcctgaatagctgggacacaggtgcacaccaccaggctctggaaatttttgtagtttattttgcagaggcagggccttgctatgttgcccaggctggtctcgaacttccagcctcaagcaatcctcccacctcggcattccaaagtgttgggattacaagtgtgggctactgggcccagccattaattattattttgcccagctttcaaaccaagatggtagctactcattcttttctgttaaatgcaaatggttaagaatatcaatctccattacaggtttctgaccaaattttctcaacacactacaacactgttttaaaagatttaaagttgctcattacagatttggcattataatatttatttcagaacaaactttaaaccccagtagatcccactcgcttctgaaatgactatttttgacaatccttgaacactgaggctttcttgagcatgactttttaccctgcctagatggaaaaaccattctttgaagcagctcctcaaaatttggacttagctgcttcctcacctgatgtgcgagtacaattgcctaagagtataatccaaaaacgacttgctgaaactcatagatgattcatgtctctattctgtcctgctcctcctcaaacgagccagatcttagaggcgtttgttttccccagatacaaagaaaataaaatgaggttggcacctggaagaggcagtgccgtccgcaaagccaaagcaatgtaaccacttgtaccttaactcttctccgttttctccccttttcttcccctggaatctgcttctctcctttctttctctttttccgctttctgtccttgtgtttgtcatgatcgtttttgtcttcgaagaggctggagtcgtgccccgagctgcccgtggagagttcggtgacttcgttccctcctactttgaggaccagcttcaagggcttctctacatactcttaaaaaaagaaaagaaaagaaaggaaagcgcgtcgattaaaatcggggctctccagggagtgctaaggatgcagagcgccaaggcgcagcaagcccgaggcggctttgggcgctccgcgaagcacctgttgaatgacggaccccggcccgggggtgcggcggcgccgcccgccccgaacgctcccaggcctcccgggcccgcctcacgtctccccaccagagacccaccggaccagggggacccgggttcgaatgccgcggccgcacggggggcagcgcggcctccggcaggacgcgcccccttcgccggcctgggcctgccgtgggaaggaagggccccgggccgccccggagccactgggaaagagcggaagcccggcagagccgccgagggcccgccgcccgcaccccggccccctcctcaccctcgtagaggtgtttgtccgacttgtgcttcttgtgcttcttgcccatgtccgaccgggccccggtgcccgccccccgcgccaggcccaggccgtgcggcgccgcttccggtccgggccaggcgagcggagggcgggagcggggcccgcgagaccccgcgccgcgaggcaggggggcggcgcgcgccgggcggcgcgatgcccctctcgagaagacggcgcgcgagacccggccggagcccgagagcggcggcggggggggcgcgcggccggcgcagaggcgggaaagaaggcccgccgcgcgcacagggtgccggcggctgcgggtggcggcccctggcgaccggaggtggtgctgcagctcgcgggccgggggcggggccgagggcggggccggggcgggatccaccgctcagactctcgtctttcttccttcctccctttcccctcaatttgtctgtcttgtctctgtctctgtgtgtctctccctccgtctccacttccctcccttctttttactccctccctctctttctttctctttcccttcttcccttccttcctccttccttcctttctttcttccctccttactgcctcccttcaagccttccttctctcttttcttcctccctcatcacccttccttctcctcttcccgtctccttccctctttttttcttttctttttttccccttcctccttcccccactcttcctttctttccactttcccttgcttctgtttcttcccttttacgatattgactgaaccccatactgggtgccagacccagcaaactcagcacattggtgactgaagattctaatcttaaaaaaaacttatgtgctgataggtgaaggttaccagacgttttgactgtctttacttctagctgtatggtgctttgtctgttttcagataagctcgtaattatagtctcctcttaagaaaggatctgttatcagtcatttatactttagtaacaatttagacccatgaatcacctctcccaggaagatttgtagctttaccttgaacttcagtggtgaaattataggcttatattttaggaccctattgttggcaactaatagaaaccaatttgaattatttcaagtaaataaaaagggatttattggtttacatgtctagaaagggcaagaataaagcttgccagagggaagacaggaaccaaggatgtaatgctgttgactggcatgccagctcgctctctctcttgtctctctgtatatcggtctccatctccccccttctttcctatatggctggaaacatggccaccatctgcttctgaggcctcttctttatagtgtcctgaccaactgggaaaaagatctcttcctgtcagcttcacctggaaaacagtcccagggaaggactctgattggcttggcttgtgtcacatgttttatgggacaggggatgggagattgattcggcctggatgccaaatctaccccctcacccccttggccaagagaagtggagtctgtgattggcagctcctgccagacttctatggttagccagggaagatgaggttcttctaatgaagagagttgctttttcatgaaagctaaaagtgtgtgtctattatttccctgtaacaagcctctctggtgtccgtgaggcagagatcagggtgtgggaagaggggttgtgttggggaagagaccttctgctgctctgaaatcaagccagctaggccccctaggccccctaagcatagggcaaagcttggtttcagcttttcatccactgtctgtaacttattttgctttaagaaccactatgccaactcccactgtgggtctggcctctattgtggcattgccttgctccaggctcaacctgtgggtttacctgtctgctcctcattaccctgggtacctccttggtacttacagtgcctagcacagtgactactactgtccaaatgcccctcagaggaaaaaggtctggtgaactcatccatactatcaagttagtaatttccctaccctctcaagagtgattctacataggtcacaaagtggtcacatcaatggaaagtgaataagagtacgtagcagaaaacacctcccagaaaaatgttcctggaagtggaagcccaaattcatctagttttaaattctcagcactaataccatgcctggcacatagaaggcaccagaaaatgctagtt

SEQ ID NO: 1242642 - DNA, 4001 bp, Homo sapiens
agctcgacccaagccaggctgcacactcctggactgggctagcctgcactgcctgggaaagtcggccgagggcccaaagctgctgaggggtctgaggctggtgcccacccccaagctagtgtgttctctgcccctccctgcccgcgtttcagggcctcggtccatagagaacaccaccaccatggccaggtggaagggtttattagtccctgccagcagctgtcctccctggtgcaggtggcctggccagcccactggattggggacgggccaggctgggccaggtcgggggctcagtctgggaggtaataaaagcagaccgacacgcagatgttgctcgggaagcagatgtcgatgcagagataaatcagccgctgtctccggggccctgtggcgagggtgccgtgaatctccaagggctccgcccccagctcctcaaaccatcccgagggcctggccttcccccacagcggtcctgactcaccctctgctcgccgggcccagtagatgggggtcctcatgcacaggcgctgcaccaaagcccccgcctgggcggggtccacttcgaggctcccctgcactgccagcagctcctgggtgtggtgggtgtcctggctggggacccaagcctcttggacctgttgagaaggctctggtgggcggtgggacagggctgctccctgctcctggcttggcagggccgggtaccctccaacccccagtgatgtccccaccctcagctcttgtcagcagcctgggcttagggcggagagagcttcctgttccctgaaaccacagctccagcctgtcccgtactgggctgcacacaggaccctttgtctagcccctggcccgggcctgcgcccagcaggacggctcaccttggaggtatccaccagcagccgcagggtctcccgatcactgtcctccatcaggcggaggaagcagacctggtgctcctcagggcggtaacagatgcagccctggggaggcaggggggtgaggcggggccccccagaccgacacctgccagggtgacccctccctgcccactcacgctctgcccgtcgaacagcaccgcccagctgtggttgctctgaggtggggtcactgtgatggtcgccgcgttccgggccacgtccaccaggatggtttggttgggccggggcatgtgggggctcgggagggtcattcgcagcgtctgcagccttggctggcagtgggagttggagttcagccgggcagctgtgcaaccccagcacagcctccagctctgggctgcaggactcctgacacccctgagtgggcccttccaccccttggtcctctggctgtctgctcctaggtggtgtcactgcctgctccgcacccttgctctgctggaggctgggatatgccagcttcccttctccctttccactgtccatgtccctggtgctgaggaggggctcaccttgggagggccctgagcagagccaagaagccctccagccacaacccccacagcggccagcaccagcagcagcagcagcaggagcaggctcacggctctccagcccccgcaggagggcttggtcttcacctgggcgtgcatcagggtcagaagggtcatgagggttagacatcagggagcaagtgggctggggaagggaggggctgggtggcctggggcaccccctgggtccttgctgcaggagtaacgggaggcactcacccctgtaggcccaggtttggggcgctcagcacagcagcttgctggttccatcctgcagcccctgctcacaatgtgccgattgtctgcgtcccttgtctgcagccttggccaggggaaactcagaacagaacccctcccctcctgaccctgcgcctccccctcagctctggatctgatatccaggtcagagccaggacagcccctcctcccacctgggggatgcctgtcaccaggcccggctccagacacctggcctgtgcagactggagctcagggtctgggaggcgtagggctcggccgcgtggaaatccagtccggctgaccgactggagggcagcccaggcccggccagggtgactcgctaagtgtggttggggtggatttcgttttcctaaagtggcctgagtctgtcaggttatccttgactcccagagttgggcacagggcctgacacgccacaagctgtcaatacgtgcctgttcagtgaatgacaggtgtgggactgtgcacccccagccacttcccagcccccgcacacccaagaccgggggttcctgaagcctggaccacagacaggcagcctgctggagcctgtgcccctgggacagtcaggccagcctcgggggcccgcctagcccaacttttttttttttgagacggagtctcgctgtgtcccccaggctggagtgcagtggcgtgatctcagctcactgcaacctctgcctcccgggttcacacaattctcatgcctcagcctccctagtagctgggattacagatacatgccaccaagtcccgctaatttttgtatttttagtagagatgggttttcaccattttggccaggctggtcttgaactcctgatctcaagtaatccacctgcctcagccttccaaagcgttgggattacgggtgtgagccactgcgcccgggccagcattacttctgagctctgctccctgccctgggcgctctgacacggcagcccaccagcttcactccagggccctttgcttccctggcttccctttgtgcctggctttccctcattcttcaaaacatcttcctctgaaccaggctgggagtgggcagttggcattccagctctggagttggaaccccagttacccatctactttgagtcctcccacccgtggtgagacggcatcacccgggccaatgcaaggtgagagcaaggacacctgagccagtgtgggtttgagagtttaatctgtgctctggcgcccacagtgctgcagcccctcatgggccagagacaggatgcacggggactcccagcccctacccggcaagagaggcatcactgaggctgcatctgccatgcgctcctggtgtgactgcaccctgtcaggccagacccggcttgagccaacttagccaagccagcgtcagtgtcaccagcctcatgggtggagccaccctcatgctgctctgcagcaccctctgaacccgatatcccaggcctgggaggtgctgaaggctcaggacgcctcttattgctctgaagtctttgtgaccaagtggagtgctgtgactgtggggccaagagagaagctgccaggtacagggaaaggcgctggtagggagccagccagaaggtgcagcatcccgggatggccctgctgagtctgctgtcaggcctgtgaaaggtcagcagagccaaggagcaggcaggagaggctggagccccgcccagaaccttggcgagctggtggccctgccaagtcctgctggccactgaagagggaatccagggcaaggcaggtgacctcctgggccaccagtctctaacccctaccccagcctagggaaggggaggacaggaagagactggatgctttgtaaaggacttcctgttcttggggacataactctcgtcccctcccagagccctggatgactgacaggcattccttggccaacacatgcttgagccgcgctgctggctgcagggcacctggatgacaggcattccttggccaacacatgcttcagccgcgctgccggctgcagggcacagaggctccttcagtggaattttgcctacgacacagagcacagctattaatacacttaaaattcaaatccattgcctgacacagttgttcaaagttaaaaactggtagcagcactgctctgagctccctgcactgcagcccggagttcagtgaaggcgtccacgccatggtagctgctccgtccaaatcacctgggtataaatgcacacttgagacagcagagctttagctgggctgcgtttacaga

SEQ ID NO: 1242643 - DNA, 4001 bp, Homo sapiens
accccgtctcccacccaacctcacaaggtgctcctaggaggaggtggggcagacaccagcaagccggcagcaggacatgctttattctgagcaggctgggcccttcggccagcggctgagagcacagactgggtggggctgtcgtccacaaggtccggcctagggaggcagggttcgtgcctcacagagcctccggcagggatgcaggtgtgcgggggtgaaggaggggcttagtttttccggaagatcaggcatttgttgttggctggcatgtccacctggagaaacactttgctggaggacggccctcaacccctagagaggttgcctgggcccccgctcccccacctaccatcctctccaggagcaggccactggcctttcccaggtcctccaggagggctgtgtcccgaagcccccattctgggttcctgcagagggtggggagatggagtcatggcctggggggtgccacccaagccacctgccacctgagccagaccccccgcctctagctctgacctgcatctgagcatcaggtcaaagtccacgttgctctggggggagatcttcccattgatggcatagggctgtgggcatggggacacagcccactggaccaaggtcggggtatttcccagagagcctgggacagacttgcaggctggggtttggagaatgaaagggcaccccctccctgtccccaagagggagtcagccaaggccagcctggtgggcaagggggtagggaggctggcagatgacccagggaggggtacagactggaagtggaggggaggccgtgctggtggctgggcggggggcagggagcccaggagggaggactctcagcagggcaggagacagcagctaggactgggagcgggaggcccgccgtggacaggcccactcaccccgtaggtgatgagcagggccctgggtttgagcaggtgtcctgctgctctgaagagcccctggtgagtaggaacaggacggcagtgaggtgctgcccccaacagaagccaggccctgaggctggagaccctcaccccgactgtgatgggggaggctggagaccctcaccccgactgtgatgggggaggctggagaccctcaccccgactgtgatgggggaggctggagaccctcaccccgactgtgatgggggcaaatctggcatcccagctgcccccatgcagggtgagtggtgccacggcagacacccatgctgggctccccacagacctccgtgcagcgcagggggctgacatgggccatgttgatgcagagcaacaggtccagcgactgtggcaggatcccgccccagtgctcccagccccacgtcacgtccaggtgtagcggggccttcacgttggtcaggccctgggcttgcgtggtggccgcgatgctgcaggaggcgaacgcttgggtgggggccgagtcctgtgcacccgcctttccgacgcccccacagaatttcttaggggaggctggggggcacgttgaggagcggagaccaaagcggctgggaagggggaccccgaggtccacccacttccgcagccgcgggggccgcacagctagggcctgccccgggggcacccccaggctcccaccccgcaccctcagagcccgagccgcatccttttcctccggggctgcgggccgtgggctcttgaggccccggaccgccgcaccgatagaagtggccgccccgggggccgcacctgtccaggcagcgctggtccacgtccgacggctgccactcggccagggggaaggcccgcgcgaagtgcgctgcgtgctggccggagcccgaggccacctcgaggacgcggacgccacgctgggccggatccaggtactgccgcagcacgtgcaagatgggatccttgttccgctccgcggccgccgccaccagcatcgcggcagcaacaactccccgccgcggacgcggcgcgggtcgcgtcgggggcggtggccgggcttccgcggggcacgtcgggagctgtagtccagataccgcggggcacgtcggaagctgataaactacaactcccaggagcacgcgcgcctcctgttaaaggaccagcagtcgccagaggcacggtggggagcggctcagcggtgtgtggcggtcccaggcaggggactgaacggcgagcttggcttgctggtttacaggcgcctcagctcaggcaccctgtcgcccatggccgtccagggttttcagggcacctgtgtcactctccgaaatttgtgtcagcgctgcgccagactgggcgccttcccttggtttcgggttttctctacttttaaatttctggcgttagcgagagttcgatgttcaaatgggaaaaaaaactaagtgcgccgcccgggaatcgaacccgggtcgcaagaatgggaatcttgcatgataccactacaccagcggcgctgtctaagacagttgctgcccgcggagacaagagactgtgacgcgggaagtcctccgggcgtgcgccgccgctggcgccgggctcagcgcaagggagctggcgactgcataggaggacccagctggcgggaccgcgagggtaagagtctcgcggtgccccccagtgccggaggggaaggagcgggcgtgaaggacgcgagctggaggacagtctcgattcgggcctgagccgtggaagccgttggccttcgtgagccgatgggggcgaggccctgtcggggcggggctggggagagggcggggctgggctggggccccctgttggtccgagtttagggcggggttgccggaggggcggggccatatcggggcgggtccgagaggggaggcggggctggggggcgggacatgagtgtggactggcgggttggggcggggccagagcggggttgcggcaggggcggcaggggcggcaggggcggcaggggcggcagagggcggggcgggcggtcccagcctgcagaactgggcggtctgcgggaggggcacgaataatgccccagggtttctctgtgacactggggtaacagcaccagctcagggcccacggatagcgtgaggggtcggtcggtgacccccgaaatcaagtcacaggccgcgatttatgtgcgcccgagggttggggtcccagcctcagagccgggctcttctccagaaagtgccaagcgcctggctctgcattcaggactggcttagcgcctttgctgagccgtttttcaccaatgggaaccccatatcgctctggctagggcaaggacgttggaaggggtaaaccagggagggccagtcacgtggctcagggtaggagagtggcttacaggctgccagtctgggactgggaacgcgggccatggggggctcagggagtcaggggtcagggacaaccctgccaggagatgttggtgtccgccgtggtggtgactggccagaccctgcagcaggctctgcggcccaagcccacgctttcctcgcctgactggccgcctccatctctctttctgtgggctgagcactttccctgcgcctccttcaatgcgcaccctgcccccaacccccacctcgaggagagccccaggaggagggacctatgatgaccagtggttctcctggggcccatgcacctctcctcacccagatttcacctgggcttccctaggcacaggaaagaggagcccgagatcagtctctctgcgcctccctgcttccccccttgaatggagctgcgttcaggagctgcctacagtgcccagcgcatggcaggtttagtgttgcctgacttcagatatggcctattgttggggctggatgtttgggcctcgtggcttgaccaccaatggctgaagcaaacgctagctctgctgagctctgggccagcccagcttgtccttgccgcctgcagtgggccccaaaggtggggggccgccttcgggagcctgtgtgagctcgggttatgcccttccccacatggggcttccctccccagcaccgccctcactctaac

SEQ ID NO: 1242644 - DNA, 4001 bp, Homo sapiens
gagagaaaagaaaaggggttggcgtgtgcaggcaccatggggagccaggccagcccttgaagagggcaagagaggggagtggttctgggcatgggcttttgggtttcagagtccagctctcacgcttgagccatgcatcagtgactctgggcacctcagtttcttcatctgcaacattggggaacaagcatacccatctcacaggtgattcatgtaagtgacaagcatacagaaagttctctgtaacatatgtttgctcttatatacatttaataactatgcattgagaacctgcttcgtggcagaccctgctctaagcaatggggaaggagcaatgagcaaaacagacaaaaatctctgcccttgtggacctgagcttctagcaagaggcttacactgttgtggagaacagttgctctaataatctgcaggggtcattggcttaagacagacgtcgcttcaagccctggctctatcactaattgtgcgacctgggcaaattacttgatctccctaagtctcagtttcctcttctgtaaaatgggactaataactcctgcctcatgaagttgctgctgtagggatgaaatgggatgatatacttgtccctcagtatccgtgtgggattggttccaggcctccctttggacaccaaaatccttggatgttggccgggcgcggtggctcatgcctgtaatcccagcactttgggaggccgaggtggatggatcacgaggtcaggagatcgagaccatcctggataacacggtgaaacgccgtctctactacaaatacaaatacaaaaaaaaaaaaaaaaaatagccgggcgtggtggcaggcgcctgtagtcccagctactcaggaggctgaggcagaagaatggcgtgaacccgggaggcggagtttgcagtgagccgagatcgcgccactgcactccagcctgggcaacagagcgagactccgtctcaaaaaaaaaaaaatccttggatgttcaagacccggatataacagggtgaaatatttgcatagaagccccacacatcctcctgtagactttaagtcatctctagattacttataatccctaataggatgcctacacatcacttcatttacacagattcagcataatactcaaagttttgcttcttggtaatttgtggatttttttcctgaatattttccatccataattggttgaatctaaggatgcggaacccacagatacagaggaccaactgtatacaacatgtgcttggtgtagtgcctagacatcacaaagagtggtcagtagcattattcctgccatcacagtgcctttccctgaaagaagccagactaacactggggagaaaataaaattggagccaccatcaaatttgaagaacacagactcatggtcatggggaccatctcttggcccctctaggtgagaccacagccccgcagctccaacagacccatgcctgccctgagaagagaatctagagggggccccctccagccttttgtcaagaagccagttgctgctattgacccaaaagagagtcttgaatcccaagggaatagatctgcgccccatgaccagggagccaatatctgaatgcatttcaaaggctcctggtggcactctagacttcgttgtcatcaatcattcatgtaggaaagaagctcattccaacccccaagcatcctattacgggatgcaccaagtgcctcgccttcttgctataacgtgaatgtaatgggaagccgcccgttgcttttaatgagtcaccgtttcccaaagagatgaagtcactgcttttaacccagaagctcctggctgctcgatttctcccagcctgcctcgtggagaggatgccactgggcccccaagagcgatcatacctttctttgcactccgccgtcccatacatcccgtctctgtgaggtcgccccacatggaagaatttgcggctgaggaaactgacaggcttcacatcctggctatgattgttattctccagtggcacctcaagcacatttttttaacttctgcgagtttctgtttccccagccacatctgacgtgtcaaaggacacaaaagtaattcaggaggacgcaccaacagcacgtgaagacgcaggcattggcgtcaagcagacatgagtagatggtccggcatctttctaacggccgacctcggcaaatgccctaacctctttgagactcagtttccttatctgtaaatcgggggtcataaaagagagaatgtatagatcagtgcggtccaattgaaatagaacactagccacatatgtaattttgaacattccaggaaccacattctaaaaaataaaaaaggctgggtgtggaggcacatgcctgtaatcccagcactttgagaggccaagggtggtgggcatatcacttaaggtcaggagctcaagaccagcctggccaacatggtgaaaccccatctctactaaaaatataaaaattagccgtggcagagcacggtggctcactcacgcctgtaatcctagcattttgggagtccgaggcggtggatcacctgaggtcaggagttcaagaccagcctggccaacatggcgaaagcccgtcttcctaaaaatacaaaaattagccaggtgtggtggtgtgtgcctgtaatcccagctattcaggacgctgaggcaggagaattgcttgaactggggaggcggaggttgcagtgagccgagatcgtgccactgcactccagcctgggcaacagagggagactctgtctcaacaagaacaacaagaacaacaaacaaaaaaaattaactgggcatggtggcaggtgactataatcgtagctactcagaaggttgaggcaggagaatcgcttgaacctgggaggcggaggttgcagtgagccaagatcgagtcactgcactccagcctgggtgacagaacggactccatctcaaaaaaaaaaaaaaaaaaaaaaaagtaaaaagagctgggtgcggaggcacatgcctgtagtctcagctactctggaggctgaggcagggggatcacttgagcccaggagtttaagtccaacctaggcaacatagcaacgagaccctgtctcttaaaaataaaaaaaaagataaaaagaaatgggcgagattaatttcactaacatattttatttaatccaatagatctaaaggattatcagttcaaaatgtaatcaatatattaaagatacgaatgagatgttttatatcctttttggagggagtatggaagtcttaagtccagtatgtatattttaccctttaaatagatctcaattcaggccaggcacggtggctcacgcctgtaatcccagcactttgggaggccgaggcaggtggatcacttgaggtcaggagatcgacaccagcctggacaacatggtgaaaccccatctctactaaaaatacagaaaatagccacgtctggtggcacgtgcctgtcatcccagctacttgggaggctgaggcacaaggatcacgtgaacctgggggatggaggttgcagtgagccgagactgcgccactgcactacagtttgggtgacagagtgagactccgtctcaaaactaaataaaggaagaacagatctcaatttggaatggccacatttcaagtgctcccaagtcccaagtcattgttcaccatcctgggaccctccattcatctccttctttcttttctccctgataccttccccttcctcaaagattctgtctccctgaggtgtttctccatttcaggactcttctgcttccctcttaactgctctcatgaaaggacttctgatggaccctctcgtcccacctccagcccctggcagcctatgggtggccctgcctttggtcagggcctcagcacgttcaacctgggtggagccacaggtcacacgagaccctccccttcagcagggactgtgaggaaacccttagaaggagtgtgtgcggtgcaggccccacaggtcggctg

SEQ ID NO: 1242645 - DNA, 4001 bp, Homo sapiens
tgcccaacatggtgaaaccccatctctactaaaaatacaaaagttagccaggcatggtggcgagcacctgtaatctcagctactctggaggctgaggcaggagaatcgcttgaacccaggaagtggaggtcgcagtgagccgagattgtgtcattgcactccagtctgggcaacaagagcgaaactccgtctcaaaaaaaaaaaaaaaaaagctaaactaaaagagtataattagtcacacagctgggcttttttaaaaaaggagtgtaattggattgtttgtaacacaaaaaaaaggataaatgcttgaggttttggataccccgtttaccctgatgtgattattacacattgtatgcctgtatcaaaatatctcatgtattccataaatatggacacccactatgtgcacttaaaaattaaagaaagaaacagagaccctcagccctgacgccctgatattatgccaaagcaccaagtcattgggtcttgaaaggatgaactagaaagaaagaccaaggttaaaaagggagaaaaaaaaagaaaaggaaagaggttggcagtgctatgacatccatcctagcccatgaaccactaagacattggattgtgatttcaacttcaacccgtcagaatcagaacacagttgagcccttctaggaagattttctaaatccataattacaggtatagagaaagaaagcgcgcacacacaattttccaccaggtgaggacagaataagatcacattcacaatactttagccctacatcgctcagagatccgtgctggggcagagcgcggagcagtgacccagagccgaggcaggaagctgccgggtccctgagaaggacctctccttcccagcctggtgggcaagccatgtgagagcagcggctttggggagcccccgggtttgcagggacctccagtgaccctggagcccctgacgctgcctctacactttgagggcaggagtttcaactattgtatcctattaatgaaaaacaaaatccttcgtttacttagaaatgttgacatccaaacaccgcagagagaaccagtaaataaatacagccggtctatttcgaaactgccttctagagttgtgcccaagcagactttaactgagtcaagagagaaaagagaacggtgtgtgccttttgacccttttgccgccccaagcctcccaccccgacccaaggaaggcgagggaggaaaagctgggaatttcaggtgcgctccgaaacctcacgcagggggtaggaaagcaagcggaaaaccagcagacactcccccctctccagggacgtgggcgctttccaggacggtcccgcgtctccagcgccctggcgcatcccaggcggagagaggatcctcctccctgggctgtgggagagacccgacttcacaggaccagctgcgagctgacggatccgggactcctaagtcgagcccaggctcctgccttagctgcctggccatctcccaaccctcccagtgaggctcagcccggagggtcccccccttttgttcgcggggagagcgcgtcgctgcgcagagctgcgtatccccctgagctgccagccccgctgcgggggcgcttccctgggtccactgctggcgttcctcgcgctcccgcgaccacccgcgcaggcgcatggatccccagctgtccccggccccccgccccccgccccagtactcacttctccccagtctctccgttttccaagccgtctcctccaccgccccatagcgcctcagaggcttctcggcttccagatgggtggacaaagattgctttaattccatcgctgatccccgtggccaggtcgacgggtctccctttactccattcccgttgcgggctgcagggagggaggtggctccagccagcagcgttttaacgggccgggcgcccgtgacgctgctccctctcctccgccgccgccagcgcccgggagcgcctacgggtacccagaaggggcagggatgcacggcacatgcgcagtggaggcttggaggggaggcttgggggctgggtagggagacagaggggcaggtgataactctaagaaaaacaacaaacaaaacaactaaaataaaagcaacacaaaggaagtgagaacaaggcccctgcctattctagagcccctagtgatgcttggcatggggctggcactgtgggcggcttgcgagctgtaagccggcagcgggttttgagtgggattggtgagcccgtctctacctgcgggcgatgcatccgtctttctggggagcatgcagaggcgtgagtgtggacctagatctatgggttctgggcttggctgactgcttttctgtgagaatatctgtcgtgtgcgtctgtttaatttgaagtgcgacagtggatgcctatgtcagttccatatgtgtttgcatgcactttggggagagagagagagagatgaaaatattttgcacacaggtatagcagagctgtttggagcatggggctttactttccagaaaccccagaggtttatctttaaaaacaaacaaacaaacaaacaaaaaacaccatggcagtgcctgggcacgatggctcatgcctgtaatcccagcactttgggaggccgaggtgggtggatcacttgaggccaggagtttgagactagcctggccaacatggtgaaaccccatctttactgaaaatacaaaaattagccagctgtgatggcgcaggcctgtaattccagctactcgggaggctgaggcaggagaatcgcttgaacctgggaggcagaggtttcagtcatccgagatcatgccattgcactccagcctgggcaacaagaggaaaactccgtctcaaaaaaagaaaagaaacgaaaaaaagaaaatgatatcccagtaggaaacagggaaagaatatgaatagtcatgtcatgtgggcagaggaggaaggcctaatgtgagaagctgctcaacccccttagtaataaggaaaatgaaaatgtaaataagaatatatcatccgataggcaaaaactaaaaaatctaacaatcatgtgttgtaaaagatgtggattttttttttgagacagagtccaaaaatgctggggttacagatgtgagacaccatgcctggcataatttgaacttttatctaatgctagtgggagtataaattggtacaactgtttttttctctctgtcacccaggctggagtgcagtggcatagtctcggctcactgaaacctccacctcctgggttcaagctcctgagtagctgcgactacaggcgtgccaccatgcccagctaattttttgtatttttaatggagatgtggtttcaccatgttggccaggctggtctcgaactcctgagctcaagtgatctgcccgccttggtctcccaaagtgctgagactacaggaatgagccactgtgcctggctgcatgaatgtaatgtttattgttctcaggtatatatgtataactctacaaattatatataatagcgctatttaacattttcttataatttatacaaatgatatcatactttataattctgcaagttgcttttttctgttgttgttccacaatatgcttttcttccttttaaaaagatagagacaggttttcactgtgttgctcaggctggtcttgaattcctgggctcaagtgatccacctgcctcagcctgccaaagtgctaggattacaggcgtgagccaccgtgcccggcccacattatgcttttgagaaatacgaattctgattcatgtaactctggttcatagtctactgtatagtattctacatgaatgaaccataattggtctattttttcattgatgaggtataaagattattcccaattgtccacaattacaaacatggcagcagcaaatgtttttatactcatttccctgtacgactgaataggagtttttctagggggaaaaattacaatggcatggggtatgcacatctgccagttggactagagt

SEQ ID NO: 1242646 - DNA, 4001 bp, Homo sapiens
taacacctattgcctagatcagggataaagaatacattctggccaagcacggtagctcacaccaataatcccagcactttgggaggccgaggccggtggatcacttgatgtcaggagttcaagaccaggctggccaatatgatgaaaccccatctttaccgaaaatacaaaaattagccaggcatggtggctcacgcctgtagtcccagccacttggaaggcagaggcaggagaatcgcttgaacccgagaggcagaggttgcagtaagccgagattgcaccactacactccaacctgggtaacagggtgagactgtctcaaaacaaaacaaagaaaattctgaattgtcaactccaaactagtggctacctagagtgttgtattgagaaggatcttatgacctgactatagcaggaaaaatttctggggttgattaattatgtctgccagaaaatagagtgtgccacatgtttgccagtctgtctatatagtcagattacaaatatcttaccgtagcttcctatacctggttgacagattcctaatccattaagggcaggggaatgttgaaggaccaggagaaaccaaggcccagggtattaagtcaaacgcaagctgtttatgtcaaaagcagatagatggtaatctctcaaaactccttatcaccttgcctcaacttctcattggctctccactgtgccacacaccctcatcttcctacaagctataggtttaaaggaatcttaaattccaaccagggaaagatgagtttctggcagcctcatttggaatttgaatgaacgttcctgtgggtcggctccttaacaacctatgctgaatgaaggaataatcattagaaatattgttagccatggcagaagttaagtttcttaatacaggaccaatcttcacttacatgaaccagttaaataggtcctgaagactgacctgggcatcctgatcatttgtgacacagtttctacaggaaaatgagttgggagtcgcatttagaaacacactggaaggagctgaacctttgtctgaaagttaagcacccgcgccacccaacttgcacaatttgttcatatttccaagagtataaattttatcctccttgttaattatatgtgccttctgcttattatatgcctacaggtcacaggaacctcaagtatttcacagaatgatgccaaggagcgcagtttctacaccatccctcccgatcagaccacatctattccaatctcagtctcaaactcttcccctttttcaactcacattaatgaattcactaagtacctagcactgagaataaaaagctaaagcagcatccgtcttctctactctcacacagcttacagtccacagcaaagcgcaagtcatcaaacacacgcgctccacctgccacccctaaagcccaggcgcatcacgctcggctccacctcttcatctagccccgccccttcctgcaggccacacccctttctctatcaggctcctccctttatgccataagccttttttcctcatctagctcttccccttcctccgccagttcctaccgtgccacaaagacgcctgcccttctttcaaactatcccattcagaaaagcgttctggattgcccgttcgaattcctccccgtcctccgtctacccacccttaaagggttccgctcccaacggatcctcctcaggccccgcccctccccagaccccgcccgctctggggaagccccggcacatagtgcctctgcctttcgctccctctcgcttcctttcgaacgaggcagggactctcgctctgtcgcctttggagtggtcccgggccttgccccaggggtggagaaatggccgctcacacctacctgtggggccaagcggatggaaggccccgagacagctagtcccggcctactggcaagagctactcaggtcgctgccggatgggccgttgccttgggttacgaccacgctgggggcgggaccgcggcggaagtgacgtagcccaacaaagcctagcactggcgaggcggttcgtggcatctcctatccgctccgggcgctgccgccggaagggccagcgacggagggtctcagatggcggggcttgaggcccacccgggctctcgggtcggcgagtcccgttggggagcccttgtgcctgctaggatatttagcagatgccaggcggccagaaacgtcctcacttttctccctcggccctctggggaaccgccgtgagcgtttcccacggacacaaacttaacaggcccagaacgtccagggaggacgcgttgtgagcctcaaagagcccacttacgtgaccgacagcaccaggccgacgggcactcgctgaactgctggcccggagcagcacagctcttaagtgggcagtggcatcttttatacaaataaaggaaggtggccccacgtccctaaaacaacagcttgctgaagagagatcgcaaagcatcccccactccagctcgggtctgactccaaagcccttctgctttagaaagtgtgactatttctgctgtagaaaaccggtatctaggccaggcgcggtggctcacgcctgtaatcccagcacttgggaggccgaggtgggtgtatcacctgagatcaggagttcgaaactagcctggtcaacatggcgaaaccgtgtctctactaaaaatacaaaaattcgccgggtgtggtggcgggcgcctgtaatctcagctatttgggaaactgaggcaggagactggctcgaacccgggtggcggaggttgcagtgagctgtgatggcaccactgcactccagcctggagagcaaaactcaagtctcaaaaaaaattttggtatctaagttctctagcactgtgattgctccaatgagacggattcagctataattctattccaacttttttcatacgtgtaagcttaggtaccttgttcacataaataggaagatgcaaataaaaggggttttattgtatctcaagctagtaagtattaaccaaaaacatttaaatgttttatcagttgacaatttgttttggtcttccttcagatctattgaaaacagctgggcaccgtggctcacacctggaatcccagctgaggcaggaggctcccttgagcccaggagttgaaggttgcagtaagctatgattgtgtcactgcactccagcctgggaaacagtgcaagaccttgcatattagaaaaaagtttctgggaagtataccaaaagtcttaactaagatttgctaaatgaatattaattaaataacctaacggcaagtacatggggaagttggaggatctagaacctgacttccttcacactaactattcctgcatttagcaggtaaaagcccgatagcatgattgagtggaaacatgaagggacaagggtttggctagttatgtttataaaaagtcaacataggaattgagtcaagataccagaaactctacttatagtaagatcccactttgcaaaaacggagaatggaagcgtacagaactgtaccttctcctcaattttgctgtgactgtaaacttcctctaacacataaaatgtattttaaagaaaaaaagccaggagtggtggcttgcgtctgtaataccagttactcacaggagaggctaaggcaggagaatcacttgagaccagcttgggaagtgtcacaagaccccatatctattttttaaaattaaagggagatgggtgggtgcggtggctcacacctgtaatcccagcactttgggaggctgaggcgggtcaatcacttgaggtcagaagttcaagaccagcccagccaacatggcgaaaccccatttcaaaaccctaatacaaaaattagccgggtgtggtgatggacgcctgtaatcccagctactcaggaggctgaggtgggagaatcacctgaacccgtgaggtggaggttgcagtgagccaagatcgcaccattgcactccagcctgggcggcaggaaaggcctgt

SEQ ID NO: 1242647 - DNA, 4001 bp, Homo sapiens
gtgagtacagaggggggattatattccatcagtgaggcccttgtaatctgtttctccccccatcggcagggccacccttcttcctgtacagagaaaatccttataaacagtagtcacataaagcagtgaggctaagagatacattgtgtttttaaaaccagatgcgttaatgagtgcatgacgggtagtgtggaatgtgataagtcaatgccgcaggcgctggtgtgaattggcacaatgctctggggctagatgttgatatggtaataaaatgataaagttaacagctactattcattgaatgattataggcacaagactaagcattttatatgcactaccctgtttgagagtcataatatccttataggtcagatactactatgtccatttcatggatggagaaactgacgtccagaaaggcccagtgattggtccatattaacaaggccattaagtgatggggatgaaacggactccaaagctgctcctaatccccaggcttccatgattctgccaggatacaatttggtctcttctttcaggtggagttttaggtggtgcttaagtagaaccatattgccatttcccttctagggaggggcctcaaatatgtcacttgacccaacagattttttttttttaactgagtctgagaataagccaaccttgtttcccccctttcttctctaggattggtttaagctcattctcacatctcatgggagtctggttggacggatcccttgacggaggttagaaatagctctcatagcctatttttaaggaaagcatgacgttagaaaatgaggcagaaatggaccccgagaagagaagagaactcaccaggctagagaatagggtcaacttctaacgaagccttcaccaagaaatgctcagagacgagaagtgggaagattgacaaagataacattggcagagacatagtagggtgggtgaaattgcttttttcttcttccttcacccggacagcatatttctgtcacattcattgtgttttgcccacagaaagctcagccaggaaaggtaaatgctgttgtcttgcagcaaacccacttttctaactagagaaatacggcccgaaaaatgcacacagaaatgcctgcttatctctttcttgaaaccccaggcacactgcagaggtgtctagtaacactgcaatttcctttgaactgtttggttttgtttggtgtccttgtctggctggttagtcttttttgactgcgttaactcacctggtataacattttctttcattgagaaacaagaaagctggaactcacctctctaattccggcaaagctggacaccatccaatagcgctaggctagacttctgggggttgtaacttatatcttccgagctgaagaagaaaagaaaggacaaaaacacggttggggagatgtttggcaaaccttcgcaggccaagtggctaatgaatgattctcccattgcttttcacttatttttcttaaataagatttctttctagggtgagggtttattcaagtcacccccttgtcggccagtatcaaggcaaatgacacagttccctgtattcacttatgtttcctaggctatagaaaagcacattcttgaactgggaaaggcatttttaaaaatgaaactcagggcagccaacctcaagacagcatctgatattaattaaaaatcataaaacactctaagtcgaactaaagaaatattggtagcgggatcaggacaaggatgagggaaattgaaagtgaaatcttgtactcatggaattctcctggccaccgcatttctccccgtctatcccagggaaaggattcaaatggtgttaactactgaacacttgcctcgttttccattcctctttccctgggtagctgcggtgagttggctgccgagatgtagccctgaacctatccatcaagtctaaggaagagagagttagaaaggcaaacattatctggaatcaatatctttacaaatccaaaggaaaccccagctcccgaagggttaagccagggaaggaaaagccatcaggctgtttagtgagctaatgtttttattgatgggggaagcctttaagtccctaacaggaaaagtggggaaagtggcagattgtttggctggggagaaaggagacgggaaggaacattatacaccacgctgtgtcctactccacgtattcagacccctgaaacccaacgaatgcagaagacattccctaaccttgaataatattcaacccaaggtgttttcctctctcctacccgcccctccccgcaaagtggaatccacatcttcccctaacaacttggctataatgcacatctcttggctaatgcctgcactgaagagcatatcttaattgaacaactgtgttataaagcacatctcaagctgacattcctgggataatccatatttcaacctaactaccctggcataacacttcaatctaattcccccactgtaaagtacattgcaatctaacaccctcatataatgtacatttcagtccattattttgtattttgtaagccatattttgacacgtcttttccattaaggagcagaactgtctggtgacaacggctatccctgtgctgaaagcccccatggtttgtacatcgtcctgtggtgacaggctgctgatggacacgcttctgaactttcacctttgccatcttaggttcaactcgggcttgtttctgtacttcaagctcaagcctcctgttgggggagcaggggtgaccagagagccctgctcggtcctggccagctttctctcaagctgaccagcaggtcgggccacctcacatgatcaaagtcaggggtcagggtgtagccaatgtcagggtccaatgccaggggccaatgtcagggtcagaggtcagggtgtagctgctggctaatagagtgtcagctaacactgttgtcaaattgctgggctaaaagacaatggcagcctcctgcggaggaccttaccctggggggagggggcgattggctttattggaaacctgccagtctcagaggtgatggaagtggctgatcacagctaaagactgtttgattgttgatggagagccagttctgtggttggtccctaactgaaaggcctgcagagccgcttattgatgactgagttttccacttatgatggatttctcttctgtttcacatgcagctggatttccattcagtcatggaggtggattgcggtgacgcatggccacagacttttctggaactgagagctatgagaggtgataccgtcactgacttctgggaaggcaccaacctcgtattgtctgttgaatggggctgattggttcttgaaatgaaaccaatccagaatgaattgaaaaatagatataagaggtcctgcaagtccaagacagttcagcgaacataaaaagaaggcaatcaatgtgttctggaagagatttagtattctaactatcaatagcccagcctcaaattttccacctatctcaggcaggggaaagaaattagatttctttatctactggtggcatataaccaggctagtagtgccattaaatatttgatgaaaacgaggttacaaaactggaagaattccaaaatttcccaagatagtatgaatttaagagagacaaaaacaggaggaggaaaacaaagtatagagataaaaaatgatctgggccgggtgcggtgactcacgcctagaatcccagcactttgggaggctgagatgggcggatcacaaggtcaagagattgagatcatcctggccaacatggtgaaaccccgtctctactaaaaatacaaaaattaactgggcgtggtggcacatgcttgtagccacagctacttgggaggctgaggcaggaaaatcgcttcaacccgggaggcggaggttgcagtgagccgagatcgagccactgcactccagcctggtgacacagcgagactccatctcaaaagaaaaaaaaaaaagatct

SEQ ID NO: 1242648 - DNA, 4001 bp, Homo sapiens
agggagggaggaggaagcaacaaatgtcccagctaccactttttttctaagagctaaaaatattgcaggataaatacagaaccataagtaatacttaaaaattaagttttgacagcacagtgatgcttttctttttcttttttttgagacagagtctcgctctgtcgcccaggctggagtgcagtagcgcaatctcagctcactgcaacctctgcctcccgggttcaagcgattctcctgcctcacctcctgagtagctgggattacaggtgcacgccaccatgcccggctaattctctttttttttttttttttttttttttttttttttgtatttttagtagagacggggtttcgccatgttggtcaggctagtttcgaaatcctgacctcctgatccgcccgcctcggcctcccaaagtgctgggattacaggcgtgagccaccgcgcccggccgcatttttataagaaattatccatggagggagcttgacattcccaaccctccaaaagttccttcacctgcactgaacaagcagttaaaaaacaagaccattccttaaatcggagcagctctcctgacagctgtttacattaattaaggtttggtctcacaggtctgggagagagggagaaagagaggcgggggaagaggggagggagaagaggtaacagggaaagaagtggcccaagctgagaaaaatcttggaagcgcattcacctggggtacccttcagaaagatgcccgcctctttcccgagggcaccaccttgcctctcccgcccacagctccgtggtggtacagcaagcactgctcccgctgccgggctgcctgcaactgtaatgtgttatttaattttgtaactactattaagagctctccagcgtttttgtgatgcgctggaatgaaagacgctccataaaatgaggtttattattagtagtattatagctcccgggcctaaaataaagcagaattataaccacatacacacttcaaagggaaaatccgaagccacaagcttctcaaacattgccaagcgggcaggggatgggcgggggcggcggtgcagaggggctccaatccggcgccccccactcccaccaaccccaccagctctcccagcacccaccattcaccctgcctggtggggtcagcgcccgcagcccgggctcgcccccggccgcagcttcctctggtggtggagggtctggggtcggacctgatccctctcggcctcccctcgcccaccagctctctagtggctcccgcactgccccgcaggctgcctcactctcagccctagcctctccgcctggtttctaattcccttgcaggagcctcagtttcctcccgtctcccaccttgacttttttttttttttttttaatccagaacgaagctcattcctctgcgatccctcacatcggagggctgctcccctcctccccggtccgggacttgccagcccagcccaggtctcctcggccacttttcacccggcctggggcgcctctcccctcagcccgggggtcccgctggcgcccggcggcttcctctcctccatccctttcctccgcggcccgggtctcccctccgcccccggtctcctcaggctagcctccggccgggaccctccaccccgtcctctcctcagtccgggtctcccctctctcgcgtcgccctcagccaatcccccgcccggcccggcgcgccagcggctcacccgcagactccccggtgttgatccagtccgggttggcgatgctggcgatggcgaagatatcggcggccagaaagagacatcctgagatgatggtcagtttatccatctccccgccccgctccccccaccccccgagccccggacaggcagcggcctcacgcctcccgccccatgggccgccgccggggcccggagtccccgcgccgctgcctcgcgccccctcggcccccgcgcgccgctcgcgccctccgcgcgcccgggaccagcagccgcggcgcggcccgcacagacggaaccgccgcccgccccggaactgctcggcccgcccgcccctcacccggaagcgaagccgcggcgttggcgaggccggtcccggctccccagccgccgcgccccagctccgtcctcccggctcggccggccgccctgggcccctccccgcaccgcccgcctctacgttctggacccggacccgaccggcccggctccggtccctgcccgggtcccggtctcttctggcaggccacgccacctcttggctttctgcccactaataagattgttgatgttgatgactgggcacaggctgcggcccctcctgagcccctcagaagcaaaactggaatgagagtggggagctgcccgtcttccagcaggaggcgggccccgactcccgccgagcgactccgggccccgcgcggtccctgtcaccttgtattctcattgcccgttccgcggccgtcagctcccaggattgccccatttagcaaatagctttcgacaacccctcttcgtcagacgttgtaggtgcagaggtgctggagtggacagaggcaaggcgcccgctcttggggagctcacgttctggtgggaagagacagaaacacattaagaacctatctgtaaaataaagataatttcaggtgcagatccctgaattcaatggaggtcagtgtgatgggagtcggagcgatacctgcgatagggaaggatgcatttccgctgagaccatcacgatcgtaaagatctgcactttgaagacctggcgcaagaccagacagagggaacagccaatgcaaagatcattaggggaggggggcagaaagagatcagcgtgtccaaggaattgcaaaatggcctgtgtggcaggagagtagtatgacaagaggtaggcagaggctaggtgtagggctttgggggccttggattttgttctgagtgcaatgagaaggcaatggagggtgtttgcagaatcccatgatcttacttaatctgtgaagatccatagtgtagcttgtatgggggaaaggcaaagatgacaacagggacgccagttaagaggccaagtagtccacgagagagaagtgtagctttggctagggtgagagtagtgaagatggagaggaatggacagatttggatgttttgtagatagagggaaggacctgctgataatggggaaggagttgaaagagaactcaagaataagtttttgacctgagcaaccaggtgttatgatcccgtttactgagttgtgtgtgcagcgtcttaagttggatgaataaacaggaaaataaggcatttgcataatttgtcagcatatgctatggtggaggttttcttttcttccacagctcatgggccgaatcaccactaaccctgacgtttgatccagctctccctaatggtactccgtgcagcagatggagatgaaacactcattttctccttaaatgccacataggtcgtctctagaaggacctagaagagtgacatctgtctctatttttggaatgcttacatgtccacaaaattcaggaggtttcaaattccaccaaatccaacagccttgcagaaatgtgcaacagagtatcagtgtcactacatagctgggagaaggaagggtttgattgctggtctatattgacttttctgtccaaacattggtctcttgggggaaaggttttttttttttgttattatacaatttatttttcctctgccacagaaattgacacaagataattcatatactccaaggatccagatataatgcatatcacattactgcaatagtcttcagtttcttttttcttttcttctttttttaaataagtactggagaaatttaattgagtcatatttggcttcttgttggggttttctattgcccagtgatagaagaaactgtaactatacaggactaaattcccagataatatccactgatgttctctactggccagcttagaagaatcctagggctgaatgtt

SEQ ID NO: 1242649 - DNA, 4001 bp, Homo sapiens
aaggcttctggcctggcattggctccacccccaggtctctgagccacagcccaggtagctgagcagaggcactgctgggcttcccctagtccacatagcctggccaccacccagacccggggagggggactccaggtggaaggagcctgggaagggcatcttcgctggggcagtctcaatcctaatgctggatcctggggtccccggtcccactgaggcaaggcctgcctcggggatctctggggaaccctggggattcagaaccccacactggtccggccttcacgcttccagaaagctgagatctgctccaaggtgacccgtggctggaggccccactcaggatccgggctccctggccgctgcctcctggcctgggggctcccaaactggacgctggcctctggcctctgctcgggttcagcccagctcaccaggcctgtggcggggggcctcccctcccagggctggggcccccagaaggtgctccgggctgggacctccagtacggtctgggggcccaagttgctgggagcagaatttggggctgagggggcaggtggggctgttgctcgggcctccaaagtgcccacctgggtgggaggctcaggggcccgatctgtcagcagggggaccgcagagccataccagtcctcagagcgctctcgggcggtgcccatgggctcaatccacagctctcctcctgggcgccacaccagggtgggtgcacggtggctggggtctgggcggagagcacggcggaacaggcgttcagccaacacagcggtggtgaggatgaagagcgcagccagggtggccaggaccagcatgatggggatgcagggcccacagggcagtgagggccatggggctgcttcccatgcggggggcccctccacgcgcccagagggcggctctggagtcaacggcatctgagagacacaggggtgagaagaggaagtaaatgaggcagagggggcacaaccaagatgagagagaggcagcaggtgtccaggaaagcctgggagaagggctgggcatgggggctcatgcctggaatcccagcactttgagaggtcgaggcgggaggatcacttgagcccaggagttcaagaccagcctggacacacagtgaaacctcatctctaaaaataatttaaaaactagctgggtgtggtggctcacacctgtagtcccagctacacaggaagctgaggtgggaggattacttgagcccaggagtttgaagctgcagtgaccccagattgcaccactgtcctccagcctgggcaatagagcaagaccctttctcaaaaatgaaaaagaacattctggagagacagagaagcaagagggaccagaaagggtaagcgtgagccaggtggggtgggaggacaggcagcctacctcggggcacagccaggccctcctgcctggctctccaggcctttccagaatccccatttccctcccagaccccagggtgcctcagacaagaaaggtctcaagggcttctttcctccccactcggccccctcaagtcttgctcagacctagagaggaagtggtgggtgaagaaatgagaacctcccctcccactggctcccctgcgtgtgtctcccccaccgcctgccgccagcacctccgctggccccttgaggctccttcgcccctcaccattctcctcggacttgatcttgctctcataggctccacggaatctgctgccgggccgggccgggccaggcctccggaggcgcctctgcacccctcctgggctccccagctttgcccaggctctggcctgtctctatctctcgtttgtctctgcacacctctctgtcccccacatcctccatctgcagggggcctcctgcacccctcaactcaccttgggtcagtccctgggctcctctccctcctagagccactcttcctggtgctggactaagaggtgcaggcttggagggtgcagggcggtccgcctctcagacgtagaggcccggcctcggatgaaggcggaagggagggcaccgcctgttgctgggcaactgtgccccaactcgtctgcccctggggagtgtttgtttccaaagcaacccaaggggatgtggtcactgcggtgaggaggcttttcctggggtaaggtggggctggaatgggcaatggttctgttgaacttagtgtcaccccatagccaggccctgagccccagaacattcaccgaaaagctgagaaagaggacgccggggccaggcacagtggctcacccctgtaatcccagcattttgggaggtcaaggtgggcaagtcacctgaggtcaggagttcgagaccagcctgccaacatggcgaaaccccatctctactgaaaaatacaaaaattagctgggcatggtgacgggcacttgtaatctcagctgctcaggcggctgaggcagggagaatcgcttgaacccgggactcggaggttgcagtgagctgagatcgtgccaccacactccagcctgggcaacagagtgagactccgtcttaaaaaaaaagaaaagaaaagaaaagaaaaagaaataggacactgggactttagcccgtacattcccagagaaccatggtgcctcccccgttcctcctgggaggatgccccaccccatcctgccttgtcttatccacggtgcctccccagatctgctcctgccatgcagcccccacaggcaccccctgcttggccagcttgcttcacaccttttttttttttttctggtagagatgggctcttgctatgttgcccaggctggtctcaagctcctggcctcaagagatcctcctgcctcagcctcccaaagtgctgggattacaggtgtgagctaccacactggcccctgcctcatacttttaattaacataagtctctctctcttcagaccatttagcccccattttggttggaaaatatcagtgaggtgaggcttgggtaacaaaaatgtcaagcctctgagaggagtccagggtataaaaacaggcgtgggcctgtttccaaaaccctgaccatcctcatgtctgtccctctttcctgctgctgagggtgggaggagcctggagcagagtgtgacaagatgtcatcaggctctggagtccaggtgactttctgagattctctagtttgactcatccacagatgacaaaagtaaggcttaaagaaaagagatttcatgaccaaagtcgcatgaccaatgtatgtgtgggtgagcatgtagtggccagggtggtggaagaatagatagaaatccctgggctgggcgaggtggctcatgcctgtaatcccagcactttgggagaccgaggcgggtggatcacctgaggtcaggagtttgggagcagcctggccaacatggcaaaaccccgtctctactaaaaatacaaaaattagccgggcgtggtgccgcacgcctatgaccccaactactcaggaggctgaggcaggagaatcgcttgaacccggtgcagtgagccgagatcgtgccattccactccagcctgggcaacagagcgagactctgtctcaaaataaataaattaaataaataaatgaatgaaaagacagtctccgtcagactgccccatcctggtggttttgagccctgctgggaggagctggagatggagagtccgggggaaaccgcctttgcaaagaaagagatctaacttaactgactccaccttgcttctaacctccaagctgtctttgtttattcctgggcgtaggctgaactaactttgggagaaacttagtttgtagtttatagtttaaacaaagacagtaacagccctttcccaaagcagaccttcttgcctggggactagactaacactagccataggattagaaattatggtttaggagtcatgcagctggaggctacaagattctgaccctccctaaactgctcctaacatcagtgcttgagatattttgcagaccctgcacttgatggatcagctggc

SEQ ID NO: 1242650 - DNA, 4001 bp, Homo sapiens
aggcaacatgttggtgacatcacatgaaaacaaaaactactgacccaagctccaaatgcattccaaaaatacggccaacaagccgggcgcagtggctcacgcctataatcccagcactttgggaagctgaggcgaatggatcacccgaagtcaggagttcgagaccagcctggccaacatggtgaaactctgtctctactaaaaatacaaaaaattagcggggcagggtggcacatgcctgtaatcccagctacttgggaagctgaggcaggagaatcgcttgaacccgggaggaggaggctgcagtgagctgagattgtgccactgcactcctgcatcccagcctgggtgacagtgagactacgagtctggaaaaaaaaaaatagagatgggggtctccctatgttgcccaggatgcctcagcctcccaaagtacgaggattaaaggcgtgagccaccgtgcccggcccagttttctcagtcttaatggtaaaggtgtaaacaggaagctcctgttttctcaaaaaaatccagagaggctcacaagggatgtggccagactgatgctacgaatggaaagcgcttttccttagatctattaggttggctcaaatgtaattgcgggttttccattacctttaatggcaataacgacaaagaaaccccgcaattacttttgcaccagcctaataaatatcccctgcgagcagtagtgaaagacaaaggacagtggcaaaagccatggggcctcctcgtgtagaacatgtaacaatttcccttttctgttctatttccctctctgggtggcatggtaccaaactgtattttttttccttaaacaattttttaaaagctgtacatattcagcagatagtcactctattatttacagcatcatctggtatcccagagcatacacaataccttccattctttccaggctctcctctctccttctcaggaccaactatatcttttttttctggagctcaccaatttcccctatcctgggcagctggcagttttattccatcaattgcattcttatgcaatcttccacaaagagaatagggataaaggggaggggacgggatttgggatccagatgattgagactcagaagtctgtgtggggaatggagtgcggctgctaggctggtgagtgggatgagggtcttccagatgtgggaagtaagactgggttacaaagcaccactctaatcactggggagacctgcctgaattctacctaatggggcacgagtccatacatatatacacataagagcccagcgaaagcagggctgaaagcagcaatacgtgaggctccaggggtgcagctcacctttcacgagccaggtggccgtggcagctgaaacagtggcttttgcgttccccacccctatgcccagcaagactgcctgggtggctagggagccggagaggctggaagcaaacgcctggagaagaaaacaagtagggtgagaagcgggcgtaggagcgtggcggtctaagtgccttcatctgttcttgttcttggtgtatgaggcatgtcagaccccccgccccccgggctccgagtctcagtcacccgtccattattggggagggaggagtggcctgcactgtcctctgccccagacgaccgagctgacctgcacggaatcccacagctggtagggcaagtagtccgggctgacgctatcagggaagccctgaggcaggaacacggcctggagcccggagaggggcggtgagggggccccggaagcccccacttcgcccgcatctcgtccttcaggtttgaccgtgaaggccctggagagcccccaccagcgccagcccccgacctcccactgcaggctcccgtccgcggcggcgcggcagccccgtgcctccccggagccgaactgctcggaacacagcggggtctccaaacccgcgtcgtcagccatgccgagcttttggatcccagccccgcccctgccgcacggtggacgtggcaggcggcacttccggctgggctaccgcggctgcagagggacatctttcaagaacaggcgccggcctcggcgtccgccgcgcagttaggaaactgactgtcgctctctccggcctcggcgctgcttcggacgccccggcaccggcccccgttgctttgtagcattctgcagctgggctgcaggcgccgtgggcctccgccagttgtgttcgagacgcggttcggccacagaagttttagcttgtgacttttggcaagtcagtggccctctctgggcctcaggtgccttttttgctgtgagaccagcgactgtatttttaaccctgattttatccctagatctacccaacacatagtaggtgctcaaaagatatttatgagtgaatgaatgcatcatgagaagaaattggaccagatgaggccctgtgaagctgcttgggtctttttttgttcttttttttttctctcttctgagtgtccctggcctggactagaaattctccatccttcggccttctgcgagactgcaggaacattacttttgaaggatgctaaggaatccgagggatgaaaaaaatcaagagattgcaatgatgtcacaaaacaaggaaacaaggcaggaagttcttgtgtgtttttttgcgggagagagtccatgaaattggggggagtccaaagagggagtgtttctgtccttggaactcaccttttcttctttccatttctcctcttctccttcccatctagtgcagcatcttcactccgaagcagaaatttgccaaaaaagcatcctctttttatcagaaaataaaatatcctggtttcttagcctggcattcttggatccccacagtttgatcccaaccgacaactccttatttgaaacttcagattctcccaaaccgtcaccttcctcgtggacttaatcctggaaggcccttctaccccacttcgccttatctcacacaaacacagtctctctctgactgagataaacttgaacacttcttttcttttctttttttttttctttaaatttcgggtttcaaaatacaaatggcctaatcacaacatttctgtaatgttgtctaaattcaggtactggtttgaatagaggacaaaaataaaacaaggtttgaagactaagtactttaaaaacatatttatttaaatagaggcagggcctccctatgttgcccaggctgctctcaaactcctggcctcaaaagtgatccttgggctgggcgtggtggctcacgcctgtaattccagcactttgggaagtcgagccaggtggatcacttgaggtcaggagtttaagaccagcctggccaacatgttgaaaccccatctctactaaaaatacaaaaattagctgggcgtgggggtggtgtggccataatcccagctatccgggaggcggaggcaagaaaatcgcttgaaccgtgcagttgtcattaactccgtgtttgttatctcttttttaccaatggtttgccagtttcttctacaaatacctgttgctacctatgtgctcattgggatagtgagcaaaaacaaacaagggtcttggtcttttggaacttatattagggaaggatattgatcaaatcatacaaataaatgcaaagttggaactatttcaattgctgtagaggggtacatgttatttaatatgaggacttttagaaggagaattgagctaatcagtggaatcaagggaaacttttttttttgagatggagtctccctctgtcacccaggctggagtgcagtggcacagtcttggcttactgcaacctccacctcctgggttcaagtgattcacctgcctcaccctccggagtagctggggttacaagcattcaccaccacacccagctaatttttgtatttttagtagagacggggttttgccatgttggccaggctggtcttgaactcctggcctcaactcatctgcttgcctcgcctcccaaagtgctgggattacaggcatg

SEQ ID NO: 1242651 - DNA, 4001 bp, Homo sapiens
cagagggacacggttattccagccagtaagctgggccttgggaggtaggcaagggccagggtggggaccccaggctgggcgtctggctctgctgaatgccaggaggggcctccagaggccgcagggaaccaagaggacactgactaggacaaggggacaaagctgaccggctggcagatttttaacatcgacagtgatcccactcagcaaagaggacaaagagacccactggaaagtatctcgaacctgtccccgagctggtgatgcctcccggttctcccctacccccgtccagccaaagacctcagcctcacctcgagttctgggaagctgctttcctgaatgccgcaggcagccgcagcaggtgcctgtcggagaagcccgtgttcagaggagcatcgccttgctctggggtctacaagtcccacttcctgctcagagcccaatcagggatgaggcttcttgcccctctcccacacccgaccccaccaaggatgagcccccttggatagggcttccagagtggccataggagaagcatcgtccagtgctgccccattagagagaagagggggccctgtgagcggggccctgtgagcagatcccacgccctccagagcccatctggagcctctggcctgggcaaataaggggacagccacagagaagagaggaggacaggctccagtacttccctgacctgatggtgccaacctggacaccaccacacagctgcttcattctgccagcttctgagcatgagcctcaggggtatgccacagggctcgatgccctgccttccctgtcaccccaaatcccaggctccttgctagccagggtctgaggaggcagagacagaagtccctccagtgagggtccgggaaacctaccccttctccttgagtgtgaaggcttctggggcctgaggagcagcggatggggccatttgctggtccctgaggcccgccccaggcctgggggttcgggctcccatcccaacacgggtcccatcccccactgacagcagccggcgctcagggtggcccttggcaggcaccgtggtctggcggaggcccttggtgggtctcgtgtctgaagcatggccaccagcttggcctggggaatgcggtggggcggaggctgtcgtgccagaagaggtgacaatggacctagatttcaggctgggggccttgtctctctctccggccttagtgatgcctcttcgaactcgtacagccttctccagtgcctgggtcagaaactccaactctttgaggtcttgtggactgggtgtgcatgctgtgaaagccaagaattatgcagggatctctccccactgtcccccaggagggttcctcacaactgcacgccagcagacaggccagagcagcacctggagaaggcgggtggtggaggtttacctggaagggggtcctctccattagtttctggccctggaggtggcttcaaagcccgggtcccagttggttccctgcaaagacacgggcagccgtcgcacggccaggaggcagggcccagcccaaacagacccgagggggccgccgggccccgcggcaggcccccagctcagagcctgcagggtaaggagggtggcactgacaacccacagctccgaagtgggcggctgcgcccggtctcccagccctgggcgctcggggcgggactctgagggcccgagggaggtctggccagtgggtccggggtccgcgtaccaggcatgcagcagccgacggcaaacgcgcaggctctgctccaattgcaattgtcgctgtgcgcaggcgtccagggcgccctgcagctcggccaccagcctgggggacgcaccggcggctcagcacctcggccagcgtcgggcctcgggccccgcgcctggctaccggcccgcccgcatcctcccaccccctcctgccgcgcaggcctcaccggcgcgagcagcccgccggcagcatgaaggcggcggcgtctccttgcaatttgccgcctctgaagagccacgccccttccgggagggaaggccgccccttcccggccgggctgcccaatcctgaaccggggctcaggggccgcccccgaagctttctctccctccttgcgggcaagcctcaagccccgcccactcctgcctcccaggtctgacggggactccggctcggagctgggcccccgaggccgccagggaggtgactgcgggcgacgccgggattttggtttgggtaactgggtagatgggggcgccattatcgcgcttctcttgcagggggccggtgaaggttatacgagaggctccatctgtccttattgaaagtgctcttaacgcagggaccagccgtcttgctgacgcctgggccaccgagcacagggacaggacggggttgctggaggtgaggattccgcgtgtcaggggcggggatgaaggaggagaaagtgttcacttttggacatgtgacgtgatagcactgggcagaggggaggaagctcagaccttggagcagtgggccaggcgaggtggcccctggtggggcaggggacgggtagggacagatcacggggcccacgcaatggccagggaggtggaggagcagtaggacagtgtcacagaggcaacaggaggctgtcacgggagggagtgggtcacaggccaagtgctgctgaggcctcggcggtgtacacagcacagcaggggggcgggggtacagggccttcggtgatgcgggggacacctgagggaggaagtgaggaaggcagcagggccccatgtagttggtgttaacaagaataaacaattagggggcaagaaatcccaggcggtagctgaaagaaaaacagagcctggggttgctgtttaaagatgggacaggtgagtccattccatagtcgttaatgggaaggtgccatcgcagaggggaaggagggcacaaagggagttgtcagggaggttgggacccaggcagctctggcccagcgctccgggtgggcccctccatcagcggtgggggagggtgacggtggccctgcctccctggagattctctgtgaaggaggaggcagggaaatgctcagtcagcaggtgggtgatgcaggaacccacccaccacaggcaggcggggccaggtccccctggagtggtttcctccttcaggtgcaagctgggagaaagcagagaactgactccatgcagagttgggattaagagcccctggacaaggggccgaggcagtgaaggacgtccatcactcatctgccactatcctcctcacatttaatcctcacaacacccctgtgaggtaggtatcattgccccccttacagatgaggaaactgaggctcacacatgcccaggggcacacagtcgacaggacgggtctacagttccaacgcttgggttctcaccccgaccacaccccacccagggtggccagaattcccttatagtagcaaaaagacagctgccgcggacatgaacacacatagcaccagcacacataaaagcagcagctcagtgagcatctcccatccctgggtttccggttcaagagcatttgggggccaggcgccgtggctcatgcctgtaatcccagcactttgggagaccgaagtgggcggatcacttgaggtcatgagttcgagactagcctggccaacatggtgaaatcccgtctctaccgaaaatacaaaaattagctgggcgtggttgggtgcttgtaatcccagctacccaggaggctgaggcaggagtatccgggaggcggaggttacagtgagttgagagttgagatcatgccactgcactccagccggggagacaagagcaaaactgtctccaaaaaaaaaaaaaaaaaagcatctgggggacacttctggccaagtggttctttcttacatttgcagagtaaacagaagtggatggcagcagggtgtgttgtggtcagcccgttcccagggagaggccatggtcacatggccccaggcaggctccccag

SEQ ID NO: 1242652 - DNA, 4001 bp, Homo sapiens
tctcaacaaaaacaacaacaacaaaatatttagagcacggccatattaggaactatagagaccctaaatactaaaagcgttatggcacctgtttgcctgcttgtaatataaaattaaaattccaaaggtagaaatgtactgggatgcagagattaagacagcatcttcctggattttctgattgcaaacttcagataaatccactgaagtcaaatgtttctcatgtttttggttagctttttggtcaagccagcatgactttttcattttttattattatttttttgagacagagtctcactgttgcccaggctggagtgcagtggcatgatctcggttcactccagcttccgcctcccaggttcaagcgactctcctgcctcaccctcccaagtagctgggattacaggtgcgtgccaccactaatttagcccagctaatttttgtatttttagtagagattaggtttcgccatgttggccaggctggtctcgaacccctgacctcaggtgatccgccagcctcggcctcccaaagtgctgggattacaggcgtgagccaccatacccagccagcatgactattaactgaaaaaaaaaaaaaaacctcagggtgtggaagtgctcagaggcattcaatgctgatgtagcgtgtcaaggaagcagtctcttaagtgttgggcaaatgaaaggaataagacaaaatgaagtgtttatcaagctcaaaagcagaaggttgtacctgattatttctaaggtctttcatttgctcatttaatctaagctacttcacatcatttgaagagaaagtaaattatctcgctttctgagatgcaggagagattccccgtccccaaatcccactatcatcaacaacacaacttcctcaagttcttcactcacacacataccacctgctgaaccctgaagcttcagtcactcattcctagctactccaaccacaagggacctacgggcctgccaaccaggcacacgccacgccctccctatggtggactcctattcatcctccaagacccaatttaactcctcctctctgaagccttcccctagccccctggtggggataatcactcccttcttggtgcctcatccgaatgccttctttagacatccctctactgtgcgtctgccccattatactgtcagctccttgaggccaaggaataagtctgagggctgtgcctaggataggatgaatggcggccattttacagatgagaaaagcaagtctccaggtgaacagaggagctgaggaaactgaccaacagccagatctcccgactcgtccagactttaaaagctgagtccaccattaccctcatccagcgaccccagaacccgcgccaacttctggggacgcggaagcctggaaactcaagttttctttagggaatgaatggacaggggcccgtggaaggcgcagagaggcagcagacggggagagaaccaagaacccgccagtctggcttcagattgctccgctggaccgcggtagcggccagggattctacggtcaagacaacttgggggtggccggtcgaccaccagaacccgacagagaggaattcacactctcagacccaggccgaccccatcacaagtaaggacagcccctctccaaagcccacccgccgctgcttccttaccaaggaaagacggccatcttcccagtcacatgaccgcttgttctggggccgtctgctcggcttcccatccttaccccgccactccccgcacccctcggccgccatgtttgtgaagggcagctggccgccccgcagcggccgcacagcaccttctgcagacgccatgcttgtgaggggcaggcgacgctccgcacagcacaggcttcattttcagctgacgccatgcttgtgaggggcagctccccgctccggacagcccgggttacaactcccgccggcgccatgcttcggaggagcaacgtcggccacggccagagtgccgtagtttctatgagtcatgattgtaaagggcagctgtctacagtgccgggtggtcccgcctgcgggcgtcatgatggtaaagggcatgactgctgcttagctcacctgcgtcctctaggggcagaaaggactccagaaggcggcggagcgaagacgcaaactgaggttcagccagtacctggttttgcggctaatacgctgtttggcgtgggacagccatgccccctctaggccgctgctttacccactgctttgcgggcggttttagacacttgcagaatgcccttcccacgactagcaaccgagggctgccctagatctaatatgattgactacagctaatgcacgtggggaaattagggttcgcatttcgtccaacttggcaaagcagtgtttctaggaaggtggatatccatttcgaccacagaacgtttttaaaaattattttaggccgggagcggtggctcaggcctatgatcccagaacttcgggaggccgaggtgggtggttcacctgatgtcaggagttcgggaccagcctggccaacatggtgaaaccccgtctctactaaaaaatacaaaaactagttgggtatggtggcgggcgcctgtaatcccagctactcgggaggctgaggcaggagaattgctccaacccgggaggatgaggttgcagtgagccgagattgcgccattgcactccagcctgggctacaagagcgaaactccatctcaaaaaaaaattttttttttaattattacttttataacttacttagatatccattatggtcccttagagagaaagcattcgatgtttttataactcttacttttcattcgggggtggtggtctgtggttgttcatgagatggtgacctatgacagggaaaaggatcatctccagaacgggccctccagtgttcagctcagtatgagtaggaaagtatatccactcgtacctgctattcccaacactggaagtgaacaagggttaaagggtggccacgggaaagcaaggagctcttcccatacagccatgcatgttatcacatgcaacatctcaataagaggtcaaggtgaggagccttttcctaggctcacactgcatgattaggcagtaacaagaggaggattcttaaagttgtgcaaattaacagctttgatgtgagcttcaaccttcgcattctcttttctccctctccttcccttagcaggcttctatctcttaataagttaagacatttccagcctgagttttaccttctgaaaagtccaacttttagtagagacggggtttcactatgttggccaggctggtctcaaactcctgacctcaggtgatcctcccgccttggcctcccaaagtgttgggattacaggcgtgagccactgcacctggcccaggggacatattaaataatgagatatatctttcatggaacttgtaaagaatgattatatacaatatttgttttggcctaatacttttcaatatctgtttcttttttcttttttgttttggagacaaagtctcattcaggctggagtgcagtggtgcgattatagctcactgccacctgtaactcctgggttcaagtgatcctcctgcctcagcctccagcgtacctaggactacagatgtgaaccaccatgcctggctaatatcggtttcttttttgttttgttttgagatggagtcttgctctgtcacccaggctgcagtgcagtggcacaatctcggctcactatagcctccccatcccaggctcaggcgattctcctgcttcagcctcccaagtagctggaactacaggcatgcaccactacgcccagctaattttgtatttttagtagagacggggtttcaccatgttagccaggctgatctcaaactcctgatctcatgatccacccaccttggcctcccaaagtgctagaattacaggcatgagccaccatgcccggcctatttcttaatagtccttcccctggtaaataaaaacaatcaa

SEQ ID NO: 1242653 - DNA, 4001 bp, Homo sapiens
tgtaccagctaatattttggaaagaactctgcaggagtggtgttaagttatgaaagaatttggccaactcccctaaattaaaccggcttttatggttgggcatggtggctcacacctgtaatcctagcactttgggaggccaaggcggatcacttgaagtcaggagttcgagaccagcctagccaacatggcgaaacccaatctctactaaaaatacaaaaattagccgggtgtggtggcagacgcctgtaatcccagctactagtagggaggctgaggcaagagaattgcttgaacccgggaggcagaggttgcagtgagccgatattgtgccactgcactccaacctgggcaacagagtgactctgtcttaaaacaaaacaccaacaacaaaaactagctcttacaacacacaggacatatgtagccactaagcatcagcagggccttaccagcaatctgtaccacctggtttctccaacacactgtctccacagacataagtcttccagagtcaaggataatttataatccaatggagcagctgatttagtccagtagctcacactagagtgactaaagttcaggcctgcacaaacaaacagcaccaacacctaccccacccccttttcttagtgctgggacatcaaagtaaacacacaggggttactgaatgcaaacatccttgtacacataaaagtagtgatgctggaaatggagagggtgaagggagaaggctgggccagcaaaccccaaaacgaccaaactgcattttttagaaactaaatgttacttctccctaactcctatttcatccaaccttcacctgtcacaactgaggtctgggtttaggattacagcatccgatacagactatatttcaaaagagagagaagcggggccgggtgcagtggctcacgcctgtaatcccagcactttgggaggccgaggtgggcggatcacgaggtcaggaattcgaaaccagccagcctggtcaacatggtgaaacctcgtctctactaaaaatacaaaaattagccgggtgtggtggcgcgtgcctgtaatcctagctactggggaggctgaggcaggagaatcgcttaaacccacgaggcgttaagttgcagtgagccaagatcacgcaacagcactccagcctgggcgacagagcgagacttcgtctcaaaaaaaaagaaaaaaaagagagaagcaagtcagctgttcctttaatacacacaaactcaactcccttgaccagagccccaacatctgatcatgggttccaagcctaggtttcccctcctaaaaaggggaaggaagccacagcccagaaaagcagtgggagacagaccacaggccacagtgatgatcagaggggtcagccacttctcagccattatttagtctgtaaaatggaaatgggaataacaacagtacctatcctcaggtgccggcgaggggtactagagagaattacgtccaaaaagagcagggccgggcattaggcatttggggagagcaagctattattgtctttactactactgttccaccgtcccagaagagaccctgctgagacccgagacgagcaactgacaggcaaatcgggccagttggagcgggtatctagtgcctggagcccagcgagccgagaggacgaaagaggtgaggagctgcgggcgcaggggcgtgagagactgagaacaggtgggaagagcccaggagaaagcaaggatcagcgaatggggtcctgacagaggaccccaaactcacccagcgtgaattcccattgctcgttccccagagagcgttcgggcactacctccaggtccagcattggttcggctcgcctggcccgggcggcctccctgcggcagcgcagaagggacccgagctaaggagacaaagcagcggctgacaggccgcccccgccggcccgccacagccccgctttccacctcctccccggcggcagcggcagcagcaccggcccaacaccacacctcacctcacttcacctcacctgcagcagccgcggcagcgggggcaacgacggcggcgggcgcgactgcagtaaaagtggcgtgccgggccgtaaagcgcggggagggccgggcgaaggcgggagtgccagcgcgagggaggagcctggggcggagccgcgcacgcgcaaactgcgggtcccgccgccgtctctgcggaggctgagtcgggcagggctgtaacgttgggaactgttcgggctctaggagcaaggagcccagtacttcgtgagcccctacatctgtgcaccacagcacacacacttcacatatctacataaagaagggttcaccacacaacacacacgtcacacagctgcacaagacccgtctgctgtctacacacacgtcccactcacgttcactggtagcagaaggcaagtacagagggcacgctgaggcccagcaggagggaggacgcggagtccctaagcctcacggcccccaccgtctccgttggggccggaggtgacgctggccgcagcagcttttagttgttcaggaatgacggccccacccagtcgcccctggggcaagggtcgaaccgtaagcgagtgaggactgtgggcgttaggggtcggaattggttcggggagaggactgggtagaagaggaaggggccaggccaggcctccctgctgaccacatccaaatgtgcgcagtcccccgggaccaggatccgaagccgccggcagcagcgtggaccaaagctgtgggggtcttgatcaaccccttggcgctttctgtgccacagttttcctaatctgcaagggacaggaaggttcctctagcaggttcagcctgaggttttggcccgtgccccgggacaccctgaaactaaaggacagccgaggcctatgctgatgccaagccttcacggaggcagtctctgggttctcacaaccaacctgagatgcgagattataccgactttacataggcgaatacatgaggcccagagatgttaaagacccaaggctccttggttctaggcgcagaacccaagtcctttccattacattgcccctggaagaaggttttcagtaggggagagagtggcatactaaattctcaaactggcttgatactagcgtttctttggaggctctatcaaaatttgaagtcgctgtttgattaaaatgaactacatggagaaggttgtccactgcagcattgtatgccaaaacaacagaactgggtcactgagatgtccagtagggaagtggctaaataaaccgtgatatagatagatagatagatagatgatagatagatagatagatagatagatagatagatagatagatagagatatgtttttaaaggtgaatgctgagagcagtgctcacagcggtaataccagcactttgggaggatgaggtgggaggatcggttgagcccgggagttgagaccagcctgggcaacatagcaagacccagtctctattaaaaaaaaaaattagctggtgtcatggcagtaggttgggccaggagtcctagctactcaagaggctgagaggtgggaggatagcttgaggatagctgcagtgagctgtgattattgagccccggggctccagcctggatgacagagcaagatcctgtctctaaataaataaataaataataaaaagtgaagtaggtctctatgttgatgtggaaggaactccaagagaaaaaagccaggtgcagaagtatgcataccatgaccacccaccacccccctcccccggcctttttttctgtaaaaacaaaaataaaagaaacagtggctgtaccaaaaagaaagaacatttctggaaaaataaaacattgtcaatcatacctaatagagtggcagaggacaggaatcagggggtcattattccttatcatgacaagcattaaagatatgtttagaaaagcctagttgggcagctgggctagatagcttgggaaggaaatctggggaaaaatctt

SEQ ID NO: 1242654 - DNA, 4001 bp, Homo sapiens
gtgtgtgttcccactcatgcacacatgtggagcctgcaggtatataatgtatatagtgatatatacataataatatacaaatatatgtattgatataaatatacctatgtagatatatgtacatgttatatagaatgccatatgtacgatatataatgatatataggtatattttatatataccccatatagcataactattctcttcatttcataggctcagggtgtttagtaaatagcaacagtggactctgaatcagggggaatttcaagtcctactaccctttactgccctttaccaaggaacagaagacaccttgcttttttgttttggagacagggtctggctttgtcgcccaggctagagtgcagtggtacaatgatagctcactgaagcctcggcctcctgagctcaagtgatcctcccacctcagcctcctgaataactgggactacaggtgtgtaccaccacatctggctaacatttttattttttgtagagatggagtctccctgttgcccaggctggtctcaaactcctggcctcaagtgatcctcttgcctcagcctcccaaagtgctgggattacaggcatgtgccatcgcgcctggctgacagtttggagtcactaagtgatttttttttttttttggagtcactactctgaccagcccctgcatttatatcttagagtcttaaaggagatggtcctgttattcagggggctggggagcttgagcttgagagctggggggtgagggtcctctagagccagtgtcaggagaactctgcagctcgagaggccgctgtggctttggccctgcagtcagtgcccgttcatccccaatcagggcagcggcaggagatgtgaattgggggctgcttgcttcctctgtacttctgggaatagggcaggtgcttggtgcactctgaactgggagcagcgggttggggacgcatctggtgcacacagccagcgggtgttttttgtaactagagctctgttccgcaattcagggcacagtatttcttagggcaacagaatcgtcgggatgaagagggcctccagagactctgataaacccttcaggcggacaagacaataggggagggaacggcattaccggcagaaggaagagcatgtacagtagctcaaaggaatgaaccgcccaacaggtttaagggaagaaagtgtcagttgctggactctccggtgaaaacggaccagacaatgcagggccctgaacgccaagttgaggagctcagagcatccagaaggcgaaggggaggctcggagccgcctctgaataacggccttccggctccgtctcggggtgggtttctcagctgcagcctgttagccccgccacagccccgccccggttctcagagccccgcccccagccggcctgccacgaggctgccggttgttatggcaaccagacgccaacagcctcccgggtcgagcttttaaattttaaagctgtggaagtggaaagcccatcgctcctcctctcacccacccccagcccgtatttccccgcgttttgttcaactccctgcaggcgcagcaggcccgaggcccctcacctcaggcctctgcctccactccccgcgctgtcctgacagcgctataaacagcctccagcgcgtcactccgctcgcgtccgcccctcgggccgcgccgcaggtacagaggctgtccccttcttcagcactctccctctcagcggagctttacattactagactgcctccgccttccccccaccccgcccagctcctctttcgggcctttgcgcgtcctgcctctcctgcaatgggattggttcccctggagggcggggacggagcaggacaaacaccactagctcattggctaccgcgggcatcagacagcgagccgggaagctgaccggaaggtccgggtgcgggacgtgtgcattccacggcgcccgggagctgtcccggtgccgacccgcgagcttcccggcgtgctccgcgccctcccgcaactacttccggggcgggtgccgggggcggtgccccggcgagggagcgtggcggcgagctgtttggggggggttggcgacggcagcccgagggcggcgcaaggcctgaggcccagcacaggtgggttccgcggcggcccggccccagcacttgccggcacctgcagcccgcctagacccggcgctcgggcgtcccgcgctgcacttgctcgccgcgtgactggaggaccgagcccccacattttctttatgtggttgtggtgggggcacagtaatgccctgtgcgccgtagcgttcctgtggggatgtggccggggggcgtcgggaagcgtcactgctgtgagttacgggtttgtcggccagggacccgccccggggccagtgagctacctttgcgatgcggttccacggggcgagagggggtgcctgggtgctttcacagacctcctctgtgggcgtgacagttaccaccagcatcacatttgttaagatttttaaaaattttttaatttttgtgggtacgtagtaggtgtatatatttatggcgtatatgagagattttgatacaggcatgcagttcgtaataatcacatgtaaaatgggggtctccatcccttcaagcatttatcctttgtgttacaaacaatatgattatactctttgaattatttttaaatgtgcagccgggcgcggtggctcactcacgcctgtaatcctagcactttgggaggcaaaggcgggcggatcacctgaagtcaaggatttgagaccagcctggccaacatggggacacttcgtctctactaaacatacgaaaactaggctggcatggtggctcatacctgtaatctcagctactcgggaagctgaggcaggagaatcgcttgaacccaggaggcggaggttgcattgagccgagatcacgccgctgcactctagcctgggtaacagagtgagattatgtctcaaaaaaaataataataaataaataaaatgtgcaattagattatattgactatagtcaccctgttgtgcggtcaaatactagatctttttttttttttttttttttttgagacggagtctcgctttgtcgcccaggctggagtgcagtggcttgatcaaatactagatcttattcattctgttttttttgtatccattaagcatccccaccctccactacccttcccagccttggttacactagaagtaaccatccttctactttctatgtccatgagttcagttgttttgatttttagataaccacaaataattgagaacatgcaatatttatctttctgtgcctggcttatttcactaaacataacgatctccgcttccatccatgtttttgcaaatgataggatctcattctttttttatggctgaatagtactccattgtgtctaagtaccacattttctttaggattcactgtaaaggtaacagatacttagcattttcagaatggacagaaccaaaaagttgaatgaaaactaaaacgtcttatctctaatgctactttacaccacaccactcgggatgggacattttagttttcactttagtgttttttttttgtttttttttttgagacagaatttcgctctgttgcccaggctggagtgcagtggcttgagctcggctcactgcaatcgcctcccaggctcaagcgattctcttgcctcagcctcctgagtactgagactacaggcgcccaccaccacacccagctaatttttgtaattttagtaaagatgggagttcaccattttggccagggtggtctcgaactcctggcctcaagtggtccgtcacgcttggtctggttctcattgtccttcagacctctggggatgtcagatatgcaagtctccagtaaatagagaacacggcctcaccctgcaggaggcctttggcgtggaagagacatgcccagtgaaggcttgagggaggtatggaagggactctgaactgaccctc

SEQ ID NO: 1242655 - DNA, 4001 bp, Homo sapiens
atggactcaaaactctcaacagaattcctgccagcaacttataatcaaatataggatccttttaacagaaaacacttgatcaaattgctagagaagagcagcacgttaacatgcgcgcagatgactccgattagcaagctttcaagcacttcaaaactatatagactgccacgctttcaaatgcctaactcaagaatcttttccataaagttcgtcccacttccgactgtagtacaaaaaacatcaactcttatcttccctcaatgtcttttccagagggaggcaaggctcagccgtcttccagctcaacgcttctcaacctgagcactactgactttaggggcatgataattcttcgctgagagggggccggggcggttatcttgggcactgcaggaccttcagcagcctctatacactgggtgcccaacaacagccccttctaggagaagccaaccaaaaacgtccccaggcgttgccatctgtcccggggggcggagggaggtgtcaaaatcgcctccggtggatctagctagagcaccgccgcgattctcaagttgcaaggtattcaaggttagcagctgggctggggagcagaaaacacacttggaacgcagggcagacaccctgacgcaggcggcccttccctgaatcggcaatgcagcaaggttatctttacctttgtagagattggtgacggcggtggctgcgttttggaaggggacccagagagaaagtcctggctgctgacacactcggtctgaaaagcaagccaaaaaaaaaaaaaaccaaaaagaaaaaagaaacacacatagaaagagaaagaaagagaacaagaatgttatttgcgcgtcaatcactccggaacggccatattaggtttcgccattttgttcaggggtttcgggatcccaaacccagtgtgaggaccgggggggcagggaggtcgcggcggggaaaaggggatgccgcagagctcaggggcacagatcagggacgagccgcggcgcagggaagcgccccccctggcagtccccgccccgaggccggctcagggcacaatggggccgccccgccgtctcccttcgccattttgtgacgggggctcctcctctcccgtctccgggccgagggggacaccgggtggccgggcccggagagcggggaccctcggaccaccccaaagcggggctacccccacgccggctctggcctgtccccccaaccccgggcctccctcccgcggcgccatcttgcggggagggggcggcagggccgcggagccaccggccgggatccccgaggccgccgccgtcgcggccccccgaagcggccgctgagccgatagggccggggccgggcccgggcgggggcggccaagcggtaccaagatggcggcggcggcctcacctttgtagagctgggccacggcggtggccgagttctggaagaggtgccacagcttctgctgcttgtgctcgggctgcgcggcggccgccgcctcctcctgcagctcggggggcagctgctcgtcctgttcggcctcggccaggcactgccgctcccacttggagaaccagtgctcgggcccgtgctcctggatctcggcctcgccctcctccttccgctcctccatcctccgcggcctcccgcggcctcgccgccaccgccgccgcgtcctcctcaggcggggcccccgcgggagcgtcgtcgtcaagcggcccggcggcagggcctggcgaccgacggcgccttctcctttcagcggcccaggcctcctgcaccccgacggccggcgagccccgccccgcggccccgtgcaaccagggacgacccccgccccaggccttcccacccccgggcccggccgaaggtcgccgcggaccagataaccgctgccgcccctcgcctcggccgccgcagcctgtctaacgcccccccatggcgctgcggcctccccactgccgccgccgccgctgatcgccgagccctccgcgcagctcggcctgcaccgcggagcccaccccaagactgagcaacgtcgtcgtcgtcgccaccgccgaggacggctctgcggctgctggtccccgccctaccccgcccacatgctgacaggagaagcaccgcccactgggcccaagctaccctgcccggttgaggcgtggccgctccaagggcccctattagtcggatccggccggttccgcgtggcggcttctgagcacagcgtcgtgattggttcttcggcctgtctgcctgacgtaaccaattggctgggggaagggagtgaatgtcaggaaggatgaaggaggaggagggggaggagctgacagtggttgcgtccgagccaagggggcgggtggggggtggaggggaagagctagaagggatgcgcatgcgcacttgctcgctgctcccccccccgctcaggggcgttgagtggggatcacgtgacgaggcccagcgaccgcaccccgcgggagcttttccggcgtgtacaggccctggggggatgcaaagtcgagtgcggctcctgtgccgcgggcactgagaggtatagtgggtggtagcgtgcttactccagcccctggggctcccaaagggaggagggtagtagagaaagtgaataaaacgcccaactcgtgtccaagtttgcaaagcgctttcctattcttttgagtactcccccttttttttttttttttttgagacggggtcttgctacgttgtcgaggtctagactgctggcctcaggcgatcttccagcctcccagggcgctgggattacaggcttgagccaccgcgcccggcccagagtcccatttcttagacgggcaaatcgaccatcacagccaaagaaaaacttccgagttgcgaagtcggctcagttgcccctgcgccctggcgtcccccgaggacgtcgcgccttccgggtggacaggacctcggcggccgcccgcggagccaaggataacccgacggccgacggtgcccggtgcccgcacgcgtgcgtctgcgcctttgcgcgcgcggcggcccccgcacctgtcccgaaaagcacactcccaggccacgtgcatgccccgcgtcacgtaccggcccctgccttccccggcccgaacccgcgtggcggtgccgagcgctgcgcccgcccctactccccccgcagtgcgcgatagctggacgcccctgcggctgcgcgcccccctcccctgtcggggctttctccagggtctgaggccccggagaaggcagcaacgcagacaggcggtgaccgcacagaggcaaaacccaccatccccacctacatgcccacgggaggcaccatccggcctggagcggcggagggcgccggccagaggcagcgtcgcccgcagcctgcgatagtgcgcttgcacagagcaaggcggctttggaagaaaatctgaccccctcaccgcggcctgcaaacccctgcaggatctggccctggcgcctctcacacaatcccctacttggcttgtaccttgcgcactccccctcttccccacctcgcctggacgctcacacactggcctgccttatttccctgggacactaggctctttcctgccccagtctgctatctctggaagctcttcctcctcctctttcctcagatagctcctgtttaggaagcctactaggacaagcctaaagtagcacccttcacactgtctcgtattgcctggttatattatttcataacatcaatcactatctaaaatgctaaattaggcctggcgcggtggctaaaaaacaggtttccaattgtagggaagaatataaagtgaaaagcaaacaaaaatcattctacctacctcattctacatcctcccaatcctattcccaggaaataacttgtgacctttgaaaacggagttatgtgtacgtcgagtgtgtatgtgtgtgtgtacctatatacaagtatgtcccttcttaaggaaaaaaaaagatgattttatgtgtactatcctacaagc

SEQ ID NO: 1242656 - DNA, 4001 bp, Homo sapiens
atcatcacttactaatctttttaatgatgggggattatacttagcaggcccagaggcctagcctggcttccactgcaggtaagagcaattcagtaccacggctcagggttccaggcctggccttgccattttccagccatgtaaccttgtgtcagtgactttgcctttacaagcttctgtttcctcatttttattttttaatttattattatttttttaagagacagggtctccctctgttgcccaggctggaatgcagtggcgtgatcatagctcactgtagcctcaacttcttgggctcaaggaaacctcccgtctcagcctcctaagtagctgggactacaggtatgcaccacacccagctcattaaaaaatttttagtagctggggggactcactgtgttgcccaggctggtctcgaactcctggcctcaagcactcctcctgctttggcatcccaaagtattgcagccacaggcgtgagccactgtgcctggccctgtttcctcatctttaaaatggggctgacagtatttggttggagagttggtcaggggattaaaacagaaaacgcagggtctggtgcatgaggagtgctccgtaagcatgaactatcagtgcgctcttcttcagtgtccactgacggcacgctcccatttcaagtctccagaggtgacctgcaccttgggctgggaaaatacactctacgtgggtctggggtgcaccccaccggcatgggaaggcgcttccagggagacgagattaggtggtgagctttcagcctccttggggctggtgagggattaagtgtttccataaatacacggcctcctcccatccacaggaccgggtccccagcggtgggggcgcagaacccaaggagggcgtggcctgcacaggtgagggtgctttttggagttaacccagcccaggacaggggcctccccacagcgttggatgggtggggtctaggcaggaaacgccagagcctgtgactcagggtatccctctcagagcctcagtttcctaacctgtacattgaggcgttcgttccccgagaaccgcactacctcacaagtgcctttgcctcgcagccttcccttcctccctcttcctccgggctccaaagcctgtcgagcctgcacagattttcccttgattccatctgggccccgcagccggaggcggtctgagagaagtcccagccgccctcagaccccgccctccgcctatccctggggggagctgcgggtgcccctttttactgagacctcccctagttccgctcgagcgcagccagccaggagaaggagcgcgtgcgtccacacgggtcgcccttcgcggttgcaaacctgctttgatgccctgggagcgcaggggggcccctaagtgaggcagttcataaataatagatttggaaatactcgatagagtggaaatggttcctcgggaggcctcctgcccccgccccccgccgggctgccttccagctctcaggaatggcgttctggtccattcccaaggaactcgtgacggcgcggggtggcctgtggtgagtggggggccagaggcttccgcgcggggtcacacccccaccgccgtgcaagttgcagcgcggccagagccgggccaagtttcccaaagcccgtgtctccgcagcaaagtctgcaagaagttggggggacgcccgggcccgcgtgggtctcccaccgacccccgggccgcgcccctgcagcggctagagcttgcgaggcgtggacgccgcccggccggggccgcgttgctcggggaaggcgggcgtcccggggaaggggcggcgggcacgaggcgcggggcactcaccgcttccttcttggtgggctcactgcggagccgcgcccgaggcgcgcgaggcccgcccgggcgctggtggtggtggcggcggcggtcgggctcggggggccgcggcgacgagcctgcaagacagagcagcgggggtcatggcccggccggcgctcgggcagccgcgcgcctcccgcggtcccgccccgctcctagagggcggcgctgacggcagccgccgggccgcgggcgccaggattgcacgggccaggcgcggggcggagcgggcccgcccgtcgcctccctggggagcgtgccaggacccgcccggcgccctcggcggcggtcccgacccctcgctgcttgcctgtttcctccctccaggccccgggcagtcccggggaaagtttgggccgcggcccgtagggctccccaccgtgcgcccctctccggggctgggtgccgggctccctgaggccctgcaccccagccctgggtgttgaaaaagggcaccagggttcctcccatactggggggcccgggttcagtggacctcgccgcccggaagcgaagaggagaggcgagaacagcccccccgccccatctcgccgtctgcagccgccctccccttgtgcaggaccccagggactggtaggcagtgccccttccctgtggctgcagctgtgggggttcccttttgctctccacgcaagcctttgcaccccacttcgggggcgaaccctgggttgcagcctacaaggaggtcagggcttgcctcctggccccctgggcagcttcaggtgtttggtgatgaccttgatgagcatcagggagaggaatcccccacctccccgcggtgtggacacagagctccccgcggtgtggacacagaggtcttttggccagatgagcttcttaggaggcacactccctccgtcagccctacctgtgtggaggcctctgcagacacctgcccagtggggcaggaggaacagaaagatgcctgccctgtgctttctatgtcattgtcacaagcctgtggtaccctgtccaccctacaagcccaacgtctccacaccccctgccctatatatttctggaggcttagaaggggaaactgagtcacagagcaggaaagtgacattcctttagtgaatgtggcaaagagttgcaggaaatggagtcatcttcctagccgtgtgctgctgcttgagtcattcctaaaaatggggcgatctttaggttcccctgaccttatagagtccagactgacaggcaggaaatgtatcatgtcccccactcccccgcctctaacaaagagaaggggcaggcctggggcaggacgttccttccattcgtccccaccctccggaggcaggatgggacctgccgctggccggtgctggggtggtgggcgtgcccatcaaagctgctgccccagctgctgggctgggggaggcctgtgcaggtggctccctgctgagggcacatccctggggaggggctagaaagccagaaagagctcagaggcttcagggtaggagggttagggggctcaacaagctggctgtgggcaaatcatcatgcctggctgtgtgccggcccttcgctgggtgtggggaggcagggaccagacctaggcttctgaggaactaagatggacaagcctaggcgactaagaactgaggctccgggaccccacggcacagcgtctccctcctccatcagtcacctcccagcccagctgtccctgccctgcagccaggttccctttcatgattgtgcaaagatttgattaatatctatctcccccgcactgccggttcctgcccatcccaggggatccctgtgccccagcccctcaggagtcagcgggtccctggggaagtgcagcacctcctgaaggtcccaaggggccatttcctgggctgctgagggtcctatgtcctgctcctctccagggagctttggggcagagctgctgtgaactgtctcctctaatggtggcagcggaagtccctagggatgacagacaagcagttgccctcacccctgctttcttgttctggaagggtgcagaaggagtgacactggtggagatcagcttgtctctgggcttcagtttcctcaaaggagaactggggatttacttatttatcaggttatgtgtttaacctggc

SEQ ID NO: 1242657 - DNA, 4001 bp, Homo sapiens
gatagacctgaacatattaaccagggaagtgaatgtaattcctgtgatgatattaaattgagtttggagagacccagaagtcaagcttccccttcgcccccaaatcaaggcagtgggtaggctatctgtaaatcattagcaccttagagtaaaatatgtttgtcagatgtgtctgatggaattggcactcgagatctttctgactataaatggtaagtggtatggtttggatctgcgtctctccccaaatctcatgtcaagttgtaatctccagtgttggaggtggggcctggtgggaggtgattagatcataggggcactttctcatggtttaacacgattccccttggtactgtcatgaaggcgagagttctcgtgagatccagtcatttaaaagtgtgtgtggcacctcgtcctcccacttcttgctcttgccatgtgaagtgcctgctcctcttttgccttctgccatgattgtaagcttcctgagacctccccagaagtggaatctcctatgcttcttgtacagccatgagccaattaaacatttttttttattttttttttaaataaatgacccagtctcaggtatttctttgtagcagtatgagaatggactaatacagtaagtaagcacacaaacataatggaagctttccccaaaggcaggtgctgacctggataaagcagaggagtctatgcatttgggaattggaaaacctcagtttgagccctggctctgccctttattacttctgtgacttcaataaaatgacttattttcactttccttatccttcaactaggggtaaaaatggtgcctccctggtagcctgactgggagcaattgaccacataacccaggtacaaatctaagcacagggccttgaccacagtaaacattaaaagttagtgatgtgttgagcattgttattagtaatggcattttttactcattttgctctagggtcaggagattcaagaccaggtggcatcttctgcagaggacaccactttccaaagacatggcttggttcttcatagatgataggtcttgggggagctctgggaaaaactaaggcaaacttggttgctacatttcttggagaaagaggaaagggtgggttagaactagctcgatgtagggtagaaaagaggaggtatgttagctggagttgcagttgcagtaatggcagtgaggaatgaatgttctttgattctgaaggcatcacaaggagagaagagctgagggcagtaggaggatcccatcctgcaatatggagacccagaagccactgccccttggcccttctagaattctgaccaatactaacatttgcccagcttgactaaactttagacaggtttcttcctgatgataggcccttggcctccttttccttagagcatttcctctagaaaacttggatttgtaaattttttctctgcccctttgagatgtaaatctctcagtctcttgctagttttacaatccaggaatgtttttctcaaggacctgggaggaccctttgaaatgtaatcatcaagaaagattgtaccttgtctctcagtctctgtgagaggatgggagcctaacatttataagtgcgaattagcaacacagacagcctaatcatattaactaattcccccacccccttaatgtccttgggtagttctcactagcttatcccagcacttcaaaaccatcccgccttttgtttcaggagagttaagttcaatctctctcccctactgcaactaccttgagtaaagtcttcctgccatttctcttggatggtacccacctcgggagcttgtttcttcttcccctgcctccgctccagccactccagcacacaggtgaggtcagacatgcgcctatcttcagcagtcttccacatgtatttcctctttgtgggcattaaatccttcaggtccatttgttgctctgacattgtggagtcttgctagtggcttgggtgggaggtggctggcactgtctcactctttcgatccctttgtctggacttgatggcctggtgacttagaaggtagggtgtggcctccagatgtgaacataaagggcagagtgagccaagaccctgggatattggccttaaaaggtggaaggcctgggcagtgattgtgaagtcattgcccgtcttggtagctggccctgaggtcagagtggaggtgggacattggccacctcccactgttctccatgtggccactacccctcttcaggcgctatgtctcctctggactctgccacagcctccttgcagcctctccacctctacctccacagagatcttaataaaataaaggtctgtccacgcatcttcctttctcaaaaaccttcaatggctccttgttgcctatctaaaagaaatctgaattctttagtttggcatcctatctttctgtagtgtactctaattagaagaaagctttttataagcccaattcgtctatattcatttattcatccaacatgtggttatcaggcacctactaagtattgggaatggtgctggggatacaatgcaggaaaaaaacataggcaaacctcctaagacatatgggctagtggaaaagacagggcagataattaccgtatgaattcataatgacaagtgaagatgagtgctttcaaagaaaggaatgtagttctatgaaaggccatatcaatggtactagacttggatggggtggtgggtaggccacctttgagctctgagctaaaggataaatagacttcaacagggctgttatggtctggacatttctgtccctccaaaattcatgtgctgaaatcctaacccccaaggtgatggcattaaaaggtggggtcttgggaggtaattaggtcatgagagcagttctctcatgattggaattggtgcccttgcagaagagactagagagagctccaccatgtgaagatgtagtgagaaggtgtcaccaggaaatgggttcagcagacaacggaatctgtcagagccttaattttggatttcctaggcttcaaaaatgtgataaatgaatgtttgttgtttataagctacccactttgtggtattttgtcataggcccaaatggattaagataagggctttggaccagagaaatatgcctgtgcaaaggccctgtgacaagcgggaggcatggcactaacaacagaaggcaagggtgactagagtaccagaggcaaagaggcaatggtacagaggtggccagaggccaggccatccaggaacttggtagccacaggttctgctcagactgggaagggaaagggagcaaaggaaaacaataaaggaattcaaaaaaaggggagggagtggcatggtcaggcttcccttttttgctctagtaaacttctattgaaggaaattatatatacaaaaatgtgccagaatcacaaatgaagacatctatgtaaccagtaccccagaatcttccatacagcccctggtagttattaccaccctccaagggtaaacatcatcttatcatccaatttctttttttttttttttgagacagagtctcgctctgtcacccaggctagagtcggcttactgcaacctccgtcccccaggttcaagcgattctcctgcctcagcctcctgagtagctgggattacaggcgcactgtaatttttgtatttttagtagagacggggtttcaccatgttggccaggctggtcttgaactcctgacctcgtgatccacctgtctcggcctcacaaagtgctgggattacaggcgtgagccaccgtgtccggccttattatccaatatcaaactttttcttcctgttattgagttaaatataaaccaaataatatgcatgtgatattttacatctggatttattaattttgcaatatatttgtaagattttagaaataatgaattattttgtctttgtttatatggtaatgtctttattttaccttcattcttgaagaaagattttctggataat

SEQ ID NO: 1242658 - DNA, 4001 bp, Homo sapiens
ccatgaagtgcttctcacggcattgtcctgccatcgtagtcactgtctcaaccatctgaacacaggatggctcctggcctcctttcttgacatgaatgaggcatcaggaagcctttgctcctgagaagattctgggctgaagatgtccagagacagcactcaaaggaaaaaaaaaaaaaaaaggacgcttggagctctctgggatggtgcctcccaagtagttgggattacaggtgcccaggcatggggatccatttacaccgccctctaatgttctcactagacctagtccctgtgtgccgggggcatccctggctgctcctgatgatccttctctggtgacagtcacttagtctggactccttgggggagctgagagtcgtgaaggtgctccgtgtgcaccgtggctgtcttgctagtgcttctgcgggcagtgacaatgatggacagagtgtggtgctgcttggccaggatgaagtttcatgtggatgtggctctccacgcatggcgctcactgcagatggttcttgatatggacagtcccaaccatggttgcagcttgtttcttctgagctcatcgtggctggtgttggttgcagatggcattcatcatttaggatggtttcatcatggaaggttctaactcgtgacagttcttaatatcgtcagcgtttgccatcgagaacatctgtcgccactgatgagttttggtacagggggtcccaccaggatgctgctgactacagatggttttgccattgatggatcttgttatagatggcttgtcactgaagttcacagtcgatgtcattactcttcgctgttttgacacaggtggactcagcattggtgaatcttgatactacagctcttcctagcaacagtggttctcagtatagacagtctcctcactgactgtgttctcaggataggcggtgctcagcatagatccttcctgctacatgtggcctgcccactgatgcttgttgctacaaatgggattacccactgatggttgacacagtcagtgtgtgcttttgaaaacacctttcctacttgttttgggaatatccactctgggtgcagcctgtgtttgctgggcctgtgtgttgttttctgggagactctggctgctggagaggattctcacaaaggcatgcacacctgggcaggctgctcccccgtggtgacctgctcactggttttcacgttgccgcccgtcttgtcctcctgcacgctggtgtggctgctctgcctgttttgggcactgccatccagccggacgctctgacggctgctggcctgggtggagggaaggctggctgtggaagtcagcagcccgctgctcaccttgtaggtgagggcactgctgcccaagctgatgaagctggcgctggacaggatgctgctgccgctgccgctgccgggcaggctggcctcactctttccctccagtctgcttggtgctgtgggcggggccagtcagccggctctttagagagctgggagggtctatggagcccagctggctggtttggttactggccgcctgggtgttgagccttctgttcagccgcactctccggtggctgcccaccaagctgatgtcgctgccctccttgtcccctgcgtacccgctgctcaggctggcatggctgccctcctctggcctcgggtgctgcacgctggaaacatgactctcgctgctctgggtgtcactgaggtagctgctggacactttcaggggctcctgagccactcctgcatggcgtggccacgcaggggactggagctctaagctgggtgactgtaggcttggctctccttcctgctcattctggacagaggattcccctttttctccctcgagaaaaatggggggcagctgaagtggtttatccagggagagggggccctgggaggcctctgaatgttggctgtgacctctctggggagaggtgactccgtatataaggctgccctttgaaaactctgtgttctgagtggctggctcagttcccatggtgatggggcttgtgaggtgaaggcgggtgtgggagggagaacaatgctgtcctggcaccagtgacatcagtggcctggcctggagggtaggagtggggcagaaaggggctcatggccagagggggtgggtgtcaccctctcgggagcctttctgaggagtctgtggccagacatcaggtcaggggcctcaggcgtgtgtcccagccgagatcctatgagccgagtttcttctctcccaagtctctgcctgcttgctgagtgtttcatttttttatttttatttattttttattttctgtttgtttgttttttgagatggagtctcactctgtcatccaggccggagtacagtagtgagatctgggctcactccaagctctgcctcccgggttcaagcgattctcctgcctcagcctcacaagtagctgggattacaggcgcccgccaccatgcctggctaatttttgtatttttagtagagatggggtttcaccatgttgcctaggatgatcttcaactcctgacctggagctatctgctcgcctcggcctcccaaagtgctgggattataggcgtaagccaccgcacccggcctgctgagtggttttgaggacaggagggaatacagcaggccggatcatcaaggccctggcctggtctggctctcccaacttcatcacacaccacgccctgcccctttctcaccttggatgcttgaccaggctgagcactctcttattgcaaaagggactcacagctggatgccctggaccccaacactatgaaactgggtttctgagaaaagctttttattgcaagttggctcagaaggaggcaggagtcagctcaaatctctctccctgtgctggctttaaggcagtagttttattagaaaaggtttagggagtggattctgagattagtaggttattggtgcaaggagaagtgaggtctgcaaagacctttggcatgtgcagttacctcttcatgcctcctcatgggtcccatgtgcaaatttggagggagtgagtgtgaaacatgcagtggaaattcaggctgtgacatcagcaagctggtcttgcactaactccagttggccatattgcttccagctgattgcagctggttttgttataagtgaaaggagtttcaaattgtttctttttttatttgccttcctgcaaattcaagaatttctgttagtggtttctttagctctttggagcatggtctcatgatttcatgatttgatgctcttacctgctgcagggccttggcactggctgttttcacccctcagggtgcttttttcccctctggcatcctcttttttttttgagacagagtgatctcggctcactgcaagctccactcttgttacccaggctggagtgcaatggcatgcctccctgcctcagcctcccgagtggctgagattacaggcatgcgccaccacgcccagctaattttgtattttcagtagagacgatttctccatgttggtcaggctggtctcaaactcccgacctcaggtgatccgcccgcctcagtctcccaaagtgctgggattacagcctggcctcccccactcccacttttttttttgagacagagtctcactctgttgcccaggctggagtgcaatggcataatttccactcactgcaacctccgcctcccaggttcaagcaattctcctgcctcagcctcctgagtagttgggattatgggcatgtgccacctcagccagataatctttgtatttttagtagagatggaatttcaccatgttggccaggctggtctcgaacttgcctcggcctcctgaagtgctgggattacaggcgtgaggcactgcacctggcccctgctgtcatcctttatgccacttcctaattgatgttccttgtgacatgaatgaattatgtactggttatttattgccaggtcctcagccagaatataaacttaatgag

SEQ ID NO: 1242659 - DNA, 4001 bp, Homo sapiens
tgttgagtcctccatcctcttacccatttcaggcaacctatctggggaatcacaaagtctttgaaaaagaaaaatatttattttcagcaagaccaaagtcccaagtgggggcaggtgccaaatttgcccccgccaccagagggcctaggcccacaggaagcctgaagccaaattcaggcgtggaaggaggggagccaccagtggggcgggacagtcacttgtactgaggagagagcggggggacaagtggagcagtgcagacactcagcatcttgtcgatgtccacctgggttgacttatccacctcggccttgtggtcactcacccccaagctgggcaagcccccaggctcctctccagcctcctctccgaggggagccagggcatgggtgggggtcactagtggactgggacagggcaaagcgaggcctgggcccagctcacctgccaagggcagcaaggcctgcagttgctccacacctccctcctcgggaaccggggccagctctgcctctgcctccacctcagcctccccgtcccccttccctgcctggttcagctcagggttgcaatagttgacgtactggtacagcggccgcaggcgctgggcctttcctgcaaagacccagggcagggcagaggctagagcgccaggttgtgccatgtcgggccccacaggcagggggagaaggaacagtccagggactgccactcacgctccagcctcaatgtctctaagggtgcagacaccatgctggccacagcgtggagcacgggagcccccaggctcttgcgcttcttggcttttttgtgctgtttggcagatggtgagggctcactctggctgtcctctggctcctcctcctgcagcggcagcttgggtggcagctcagcttcagccttaagatgggcacgaaggcccgggaggctgagagacctgagccagggacaagagacttgagccaggctccagccctggctcccattccctggcccagggaatagcccagcctgcccacagccccagggctcgacgcctgtcccgttcctggtcaatgagaccccaggcccaagaggcttagaggccagtgagcccaggcccctacaagccctgaagctcccactctcctgctgctccctacacgggggctcttgaggaacgggaggagagtgatggtagtggctggggacgagaatcctccctgcaggagtgcaggatttaggaatcctactgtggtgtgtgccccaaccccggggctgcagctccttccccccgagagccccctcacttgacaggctttctctttggaccatgacggggcctcacaatggagaccacgggcctggggcctctctcctctagcgccccggcatgcggcttgggccgctcctcccccagcttgggtccttcctcctggagctccgactccgaagctgcgcctgctgggcgctggtcttcactctgggttccgcgggcctcatgggcaggcaccaggaactggtctcccgccactggacactagagatgacacacaggccatcggtcaccatggccgggcaaaggacatagggatccgtcactgaacacctaacgttagacaccgaaacgggaataaggacaccagcctgtgcccctccccgcctggagggcccagcctggcagttagcgggtcggggcgctcagttccacctctcagagcgctgcggccctgtgtttgaaggttaaacagcctgacggtcacctcggaggtctgagcgctgccgggctcctccgtgagctgtccctgccccacgaccgtcgcctcctggacccccggccgcctctccgcccctgccgaggccatggctgcgcaggctgagtgcgtcctcgacagctgcttggggcgggccccaaggggctggatggtggccccgcgctgaccccggagaccggccagcaagcgagggcagagctgggaagagaaaccggcgaccgcggagcccaccctcggccgaaactacaagccccaggacgctttgcgccggggtcagtgggccctgaccccggggacggaagccacggttgcccggcaacaacaagtcccgtcgggtggcagcggctggcggcaaaacctctcgagtgagcccctgcccgagtgccgcgggggagaggccgcgagcgggaccgagaagtgggctgggagcagaggtcgcggaggtggcgagcgaggccggggcccaggcggggaccggcaggggcccgggagtggcgggcacgccagggtcagggtgccgggcgagggagggggcccggggttggggaagggggcccggggagggaggtaaacagccctgcaggcctcggggcaccgttgctgggcggcgccggcggcatgtgcgagggcccgtcccgcatctcggggcccatccccccagacccgacgctctgtcctgacaactacaggcggccgacctcgggtgagtccgggggcttggcggtggtgcgaggctcaggggtcggccctggctccacctctgagccccggactccgcccggctccgccccacagctcaagggcgcctcgagggaaacgcgctgaagctggacttgctgacttccgaccgggccctggacaccaccgctccccgtggcccctgcatcggtcccggtgccggagagatcctggagcgcggccagcgcggcgtcggggacgtgctgttgcaactcgaggggatctccctaggtcctggggcctctctcaagagtaagtcccaggaatggaagaagggacagagaggcagtgcggggtggaaagagatcaaaagcagctgctctttccaccctgacgtgggcccaggctttgcatctcttgagtctcagtttccccaactataaaagggggagaaatatgctaccttctcgaaggaggtgaactgaatgaggtagttcccacgaagccctagctctgctttatgcatttgttacccattaaatttgtttgttgagtgcctactgtgtgccaggccatatagatgctagaacacagggctgaagataagcatgagccatcactgagtcaaggtgggatacaaagatcaagagatgaatgtcatatatgagatgatctatggtgtacttcaatggtgtacttcactataataatggaggaaatcacctgggcgcagtggctcactcctggaatcccagcactttgggaggcccaggcgggcagatcacttgagtccaggagttgaagaccagcctggccaacatggtgaaaccccatctctacaaaaaatacaaaaatcaggctggcatggtggagtgtgtctgtaatcccagctactcggcaggctgaggtagccggggaggttgaggctacagtgagctatgatcatgccactgtactccagcctgggtgacagagtgagaccctgtctcaaataataataataataataataatggagaaaatcatcctgtgatacttactacatgaggaagggaacacggtgatgagggagagtgtgtgtagggtctaaggtagttggagaggtcagggagctctttctgtaggaggcagggggcaggcctgtgtgtgaactagtggaagttggactgtgtgggccccatgtagggcagaacctgggggcatcttttctccagggaaggaccctaaggaccatgagaaggagaacctgaggcggatcagggagattcagaagcgcttcagagaacaggagcgcagccgggagcagggccagcccaggcccctgaaagctctgtggcgctcacccaagtacgacaaggtggagtcccgggtcaaggcccagctccaggtacctgcttcagggagccagaagtattatccattttgttggccaacaggcaactgtaccctgatctgagttctggggtgggagggaagtcacagaggtaacagaggactaagagaccctggctctgctgcagggcgaggctggggggcttctcagaagtagtgatggtggggctgatcctg

SEQ ID NO: 1242660 - DNA, 4001 bp, Homo sapiens
agagcttgaccctctttctgccatgtgaggacaccaagaagacagccatctgcaagccaagaagagagccctcaccagaacataatcatgcttttgttatggcagccaaagctgggtaagctgattttatatgaaagaataaatatgggggagggggtgtataacaaaatgaatgtgatctttccaaataaaacgctgatcttgttttgttgaacagtttttcagaaactcctataagtttattatcctttgctcttttatataaaaatagccataaaaagtggctatttttcccaaaaggttgctttatgccaattagaacaaagtcaggatttgcaaatacttgtgccttacagaaattggaatgcataacgcataccatgtaaaccttacacttctacacaattaactggaataattggaaatgatttaaacactgaaataatctcccgcaaagagtcatattgcaaagtccagttttgtcaaaatttaacaaatttagttcagtagtaagaatgaaagtaactctttggaaaacatgactaaactgtttttatactgcatactggtatagctcctacactgtatttcttgcacaacctttttctgataagcatttttactacagcccataaaggatacttaataaaacatgtaacatgttttctgttaaaagatttgaaaaacctacaagaattctccttgaaaaatgcactaaaatcagcttattaaaaagtctccagccatttcaaattactcttgatttaaaaaaaaaaaaaggcggtggggggaggggaggagagaaaggtagtcattttgaaaaaatccactcagtggaaaaggaaaaaacacacccagatctacatgttggtaacaaacgagggccttacgaatggttttaactgaagtagttttaactcattagatgttaaggcttaaaggaatgtctattattccagtaaagaattgagacacgcttcaacacagcgatcactgaaatgagatgttttaaattacaactattacaccatgaactcaatgtagaaaggaatcgtttcaaattcaagaaacgagatagagagatagagagatagagagagacagacagagagagagagagagagagagagagagagagagagagagacacacagagacattcagacagacagggatacagatctggaagcagacaggccaaatttgtaacagtggatactgcgaggggtggggaagttaggagcgcccaaaaaggaggaagggcttaaacaggggctttattcaatcatgacccattaaaaacgatgtaaaggcaggattcgcgattgcacagcaaaaatataataaatagatgaggaaggggaaaaaatctccaaattcgccgaaactcaaaatcattacacgcggccccctttgtcccactcaggcgcccgccccggtcgcggaggggccgttttggggaagccccgcacccgtcggaaccgggaacaaagccgccccggccgcaggaggggttctcggagctagggcctggcctcggaggcgggcgtgcggcacactctcgccggggctgcggcccgcaggctcccaccgctgtcaccgccgccggcgaggagagtctggggctccagacagccgcccggtgagcccaccaaaggcgcgctcctccagtggccgggacacagcaagaaggggcttggccgtctggccgccgccaggtggacgctggcgggccacggccccgggcttttcccgggaaacccctcggtgcagcccgaccggccccggatccccgccgccgccggcgggccccaggatctgcccaccgctcggcctccgggagcccggcgaggcccccctccacagacaacggccgccaagccactgccgcccgcccgcgcgcccggcccccggcacccacctgttggtcgcactcggggcatgatttggtggccatcttcactttcttggctcgagttgcagacatgctcctctcccttagcggcggcagcagcgacggctcgggctcctcccctcacacttcggcagcccggcctccgcccgcccagtccccgcgggcctcaaacaagcctctggcgggtgcgcgcgcgcgcgtgcgcgagctcgcgcgggacctgggcgccaagggggcggggcggagcgtcggccggcggctcctggggaccgcgacacgcgctcccacggcggctcgcgacccacagcccgcccgcgagctcgcccagagtatcacgagacgaggggagacctcccccccctccgccagaccgccccggcgcggcagtggccacgcctcctctcggcctggccgactacgagggggcaaggcctgggcgggactcggcagtaacgggcgtcgagttcgaccaacgaatgcataggtagggcgggccgtagtgctgggcacgccccatccccacagagaccgtgggagcgaaggctggggaatgaatggtgaagggcgtagcgtggatcctggcatttaataaacttaagtagatgttaccaaggctaatcattgagaaattatgatagacattttatgagaccactggacccagcagcagagtgaaaattcatttatttattcaatatataattgcctaagtcccactgtcaggaaaatttgaataaaatgcagtgtcagccttcaaggagcagcctagctgtgtaaaccagtgctactcactatcaagatgagggatcagatgtttttctttttccaatctgtccgtgactgatacttactaaattaacattaaaattaaattattcgaggctgggcgcaatggctcacgcctgtaatcccagcactttgggaagccgaggagggcggatctcttgagcccaggagttccagaccaccctgggcaacatagcgagacccccatctctacaaaaagtaaaagatttttaaaaattagctgagcgtggtggcccatgcctggagtcctagctagtagagaggctgaggtgggaggatcgcttgagcctatgagattgaggcttcagtgagccgagattgtggccactgcactccagcctgggcgacagagcgagactccgtctcaaaaaaaagaaaaagaaagaaaaagtgaaatttaaaaacaactatgcaaaacgtaagcttacttttaaatatttaatttgacagacccaaagttatacttaataaacaatcagaacaaacataacagaaagaaaatttacaaactgtacacttggctcagagaaaatttaccaatatgcatttattacagagactggctattccactgataactttttattcaacaattgttaactaaagcaaagttatgagttacaattttacatagtaaatgcctgtaagcacactttgtataaataacagttatataaatgtttaaagcttttaatatgaaacccacgaaattgcttcctgtttggtccatttacaggcataccttggagggactgggggttcagttccaggccattgcaaaaaagagagccacactcaattttttgttgttgtttcccagtgtatataataaacatgtttccactatactgtaatatattaaaagtacaatagcattatgtctaaaaaacagtgtacacacgttgatgttaaaattgggctaaaaatcctgggcaaaatggtgaaacccgtctccacaaaaaattaaaaaatagccatgtggtgacagcgtatgcctgtagtcccagctactcaagaggttgagttggaggatccactgagcccaggaggtcaaggctgcagtgaaccatgattgcgccattgcacttcagcctgggtgacagagaaaatccctgtctcaaaaaaaaaaaaaaaaaaaaaaaggagttaatcttcacaaaccctgccactgctttatcaactaatatttatgtaatattctaaatcctttgttgccattccactatgttcacagaatcttccccaggagattccatctcaaaaaaccactttctttgct

SEQ ID NO: 1242661 - DNA, 4001 bp, Homo sapiens
taataataaataaaaaataaagtgcacaataaatttaatgcacgtgaattgtcctgaaaccctcccctccacctcagtccatggaaaaattgctttccacaaaaccagtccctggtgtcaaaaaggttggggaccactgcaatgggacgtagaccctgcccactgggagctcattgtttagagagacacaggtgaggaagccgttgctgctagtcaaggatgctcaatgctttgatagatggaaacagtaatggctgacaagtactgagccccactggtaagatgacatatacacacaatctcatgagacacatgtgcatgatcgtgtgatactcccatccaccagctgcagctgaaggatgaggaaaccaaaactccacgagagcagttaactcagtgccatgcagccagttgggggagatccaggatttgaacctgggcagtccagttctgaagctctgttctaggcactggcactgcctttgctcccttctgggcacagttcacgggtgtggttgtattaagcactgaattcctagggaatctgttatggagcaagattattgagaggagaaggggcagtggatgtgggatgtggcgtgggtggagaagccgggctcactgcagctgccaaggagtggggaccctggtctgaggctgttaggtggggccgctttcccagtgaatgctgcccagtcatgattaagagaaccccctcccttctttgctaaaagaggataataataatgggtgtaacctcagggatgacggggagagggcactgaagtaccccatgcaatgcacctgggttgtgcccacattgagcagatacttagtgaactacagcttttgctatcacatgcgccccaggaagcacccagccctgtgggagccacctgtgtgcttgtgtgtgtgtgtgatatgcttgtgtgcatgcgtgcatgcgtgcttgtgtgtgtgatgtgcatgtgtgtgtgcgtgcgtgcatgtgtgcttgtgtgtgtgtgcatgatgtgcgcatgtgtgtgtttaccttggcctgtctccagcccccttcttggggatcttatagctctcaaagctaaacaaacacttgactgtttttgcagaaccttcaggagactttggctgcaagtggaggaagtggggtgggaacccgatcttgagggtcctcagttttgtccacagccacctcattcaaggggaggggtcttcccacaaatatctgttaacggggcactctccctgctccccttgttcgtggcgttgtgaggaggggctgtcaaatggatcatttcattctgagaaaaagataattcccaaatcccttcccatgttgcctttaaatctttcctacttctaaaaaattgcgtaacagttagctgggccacagccgccaggaagatccagcccctggcctcctctctccttatagccgaggcaggctatactggggccaggagtctgccaggtcccaggcgtacagagcagggcaggggacaaagctgagagctagcttcccagtgtccagccagaggaattggggctcactcaccttccagcactcggacccccaccatgccatccaggttgatttcaggcagcctctgttctaggaagacggtggctctctccagcgcagacaggatcaggtctgcaatggtggctttactttcagcagtgtccagcccaggcagtgaggaggaccacagcggtggcagtgctgtcagtaagagcaggagcagcagccccaggctggccatggccggcctctgctcactgctggtcacacgctcagcaccctgagctctggccaagcccagactgcctctgcacgccctcctcccacctccttcccacctccccctggcagacatgaagacaagtggcccggcagggctgccaagaagcctggggtggcctgggcaaaggactctgggaagggtggctgcagggggatgacggttaggcagcggaggttaggccagtcctgggcgtagagcctgctgtccacgggatgctggggagagggctgcccgccctgtccttctcagccctgattctccaggctcacaggctagatctttgatctagcaattgcaattcaacccagaaatccaaaagctctgaaagcaaaacgaatttttttttctttgttttttgaaatagggtctcattctcttgcctaggctggagtgcagtggtttgatcacagctcactgtagccttgacctcctgggctcaatagatcctcttgcctcagcctcctgaatagctgggacaatcggcatgtgccaccatgttgcctaatttttgtagctttttttaatagagacagggtctcactatgttgatcaggctggtcttgaaccgctggcctcaagcgagccaccttctttgggctcccaaagtgctgggattacaggctggagccaccacacccaggctttgttttaaataaatttgaaacaaactcatttgagggcacgtctgccttgaactgaggcaaacttccttaaaggggcaccgtccaattgaaatagaattggagctacaaagatgagccatgtgtgcatttcgaaatttcctagtagccacatctaagaaagcagcaataagcaggtgaagttaattttaacgatctagtttatttgacccagttatttaaaatattataattacatctgtaatcaatatagaaatgatttgtttttatttttgtcatactaagtctttgaaattgatgagtagtttatgttcacaacacaattgttttattttgttattttatttttaagagacagggtctcattctgttgcccaggctggagtgcagtgatgtggtcatagttcactgcagtctcgagctcctaggctcaagggaccctcgcgctttagcctcccaaggagctggcactccagatgtaagccaccatgccaggctaagcacatttcaattcagactatccatatttcaggggcttgatagtcacatgtagctggtatactgggcagtgtcttagttttgtgctactacaacagaatacctgagactgagtaatttataaagaaaagaaattcatttggctcatagttctggaggctgggaagtccaggttcaaggggttgcatctggtgggggtcttcttgctatatcatcccacggtggagggcagaagggcacgagagctggagagagagaagagaaagaagctaaactcattcctttatcaggtacacgcttttgcaataacagcatgaatccattcatgagggcagaggcctcatgaaagattccatctctcaacactgttgcattgagaattaaggttccaacatacgaactttagggcacacattcaaaccacagcagagagtgaggacctagcgtccttattggtttcattcagtgtgaatgcgcatctgtttccttgcagaaatgttaatgttggtttcctgggtgctgtcccaaaccttgctggggctgttgtatgtatgtgcaccacattatctttctaaaatcccaacaattttgaattcagaaacatacttggtcccaagggcttcagcaaacagattacagatctgtaataataatcaaaagaacaccactaaagtgtgtatgtgatgctccctatgtgcagatgctaggttagggcttctccaccttttaatttcgtcattgttcttttttctacccccggagtgtttttagacgttttaatcctgaaaaatctttagtaagaggcttattgagatattattcacataccataaaattcaccttttaaatgtgtacagtttcacagtggtttttagtatattcacaaagttgtgcagccatcactatctatctccagaatgtttttgccaccctgaaaagaaatcccatacccatttgcagaaactccctattccctcctccccagcccctaccaaccatgaatcaactttctgtgtctatggtttgacctacggtggatatttcatataaatggaat

SEQ ID NO: 1242662 - DNA, 4001 bp, Homo sapiens
gacacaggactgtttttctcaccaaactggcctgatgacagacaggcagatggacaagaacgtgcaggccttggcttttattgagatcagagctgtgggctccccggcctctcagggaggcggtggcgggggggcctgattctgcactcagcccggcctcccaggtacaagtggctgactggagtctaagcaggctgcaagggcacggccatgcttctattgcttctgcccctccctcggaacctcctcctcctccctctccccatcacattctcccgaggcccaggcctgggcgctgggccgctgcctgggccaccccatgtggcagggccactgccgggggccgagcccctcctgctcaggctgcctcctcggccatcctgcccctcctgtacccagtcctggcactcgggatccctatggcctctccagggccccagagcgggttctcttgcacaagggacacatggcctcttcccaggtcccccaggacctcttgggcctgagcctagaaggactaggctgggggagggcacccttgtctgggtccatgctggaactggaagctgaggaaagaggagagaaaggagtcacttgagggacccaaggggaggctgggggggaggctggcagcccaccctggggtttccagaatccgatattcttgaaaacagaagggaggagggcaatgcttcctccttaacagaatccccaggggagggaggaggttgagggaacagaatggttcaagctggaaggaccctcatctaacctgaaccctcattttacaagtgagaaaactgaggcccagcaagggagacagattccaaggcccctcaccgagtgtggagctggggcagtcacccagccctccctcccagatcctccctttttctcgcaccgctttgtccctggtggattctccagaccccgcttagctgtgcgtgatgcagagatggggacagattcatcaagatcttggccttctggggcatggtgccactgtggaggcttgggagtggagaagggcccgcctgaggccccagcccaaccatcccctagggtcttcccccgtgcccagtcctgccttgacagagctcaccactgcttcccaggctgtccctgggcaatcgggcttccagaagggctgaacagaggctgttacgtgggcccagagtcccctgtggcaggtccagggcccaggctgtgccctcaggctgtggcaggcagcccccagccataagccggcccagccagtggctctcacactggccagtgggtggcgggtggctctccaggtagaggcccaggccccggaggtggcgcagccggaagttcttgggcttgcttccctgggcactggggcactgcggctgcggggaccccaggcccccctcgtagatgttggggggtgcgtcagggtggccggggcgtccttgggcctggctcactgcatctgcagaggagacagcgggagggtggtggccagccccccacagcagccatgaggggagggtgcagtcacatacctctgagaccagctcacatgatgggctacacccccagccaacctggcctcagtttacctgtgtgtcaaatagtctcagtccactgcctcccctgcccatgcccaagacacgactcctcttcccactcccaaccaacagggaggcctgggaagcctcgggccttggtactaagagtgctttcaggacctcaagtcctttctactaccctgttctgcccgctaccctaggaagagtattctggtccccacagagaaattgcacagtgggtttgagagaaagtggccagcccaggggctcatggcctggcccagtggccattcccctctcccaagcatacatgtccctgaggccacccctcggctttgggcccaggtggggacagaagcctatctctcttcctgccactcctccccacagcccggcaccttctcttatgtgcagctcagaaaatgcacagaccaaggcttccatggagggccagtgtggtggggaggagcaaccaggacttgggtgcagcagggccctgctctcccctgcctagggggtacattggcaggtctcccctggcaactggttcttatgacatcacggggaagactcccagccttcctggacccctagtttgggagaggacagtgcccaaggcaagggcagggtgaaagaaaggcatgggaaggggccagaaccctgggggaagtccctggtccctctggctggggtcaggccacataaaacagacagctctggcaaactggagagtccttctctcaggtgatctcttggggccagcttcctcatctggggtgggaaatgagggttcaggagtacagacctaggaagacctaggtcggtactttgaaaatgctgaaaaggggctgggggcggtggctcatgcctgtaatcccagcactgtgggaggccgaggcaggctgatcagttgaggtctgtgggaggccggggtgggcggatcatgaggtcaggagatcgagaccatcctggctaacacggtgaaaccccgtctctactaaaaatacaaaaaaattagccgggcgtcgtggcgggagcctgtagtcccagttactcaggaggctgaggcaggagaatggcgtgaacccgggaggcgaagcttgcagtgagcccagatcgcgccactgcactccagcctgggctgcagagcgagactccgtctcaaaaaaaaaaaaaagttaaacattcatctttccggacctggccaagcaggaagcgccatcatgggagctgacgtccgccacaagaaggacctaaaggttcggcgcaaagagcccaagagccaggatatctaactgaggctgtttgttggtcaagctgtacaggttaccgtccagacgaactaactccacattcaaccaggttgtgctgaagaggttgtttatgagtcgcaccaaccggccacctctgtccgtttcccggatgatccggaagatgaagcttcctggctgggaaaacaaaacggccgtggttgtggggacgcttaacggatgacgcgagggttcaggaggtgcccaaacttaaggtgtgtgcgctgcccgtgaccagccggcccacagcggcatcctcagggtgggggccaagatcctgactttcgatcagctggccctggactccctcaaggacggcggccccgtcctactctccggtcttcgcaagggccgacaggtgtaccggcatttcggcaaggccctgggaaccccacacagccacaccaaacgctatttccgctccagggaccagaagttcgagcgcgccagaggcctacgggccagccgaggctacaaaaacgaaccctcttattaaaaagattttggatgctgacaaaaaaacaaaaagttaaaacattcaattttctcttgtcacagacgacctgatttttctttttttcttttctttttttttttttttaagatggagtctcactttggcgcccaggctggagtgcagtggcgcgatctcggttcactgcaacctccgcctcccgagttcaagagcttctcctgcctcggcctccccagcaggtgggattacaggcacccaccaccacgcccaacggatctttgtatttttagtagagacaggctttcgccatgttggccaggctggtctcaaactcctgacgtcaggtgatccgcccacctcggcctcccaaagtgctgggattacaggcatgacccaccgcgcccagcaacctgatcttgtatgtaggaaatattaaataattcatacttgaaaaaaaaaaatcctgaacctagtagagctttttcagagctaatgaagttcagaaaaatctcaagtcataaaatcaccacacaaaaattaattgtatttctagatactagcaaagaataaaaagaataaaataggaatacatttaaccaaggaggtataagacaactctgaatactataaaacattgctgagagaatctaaagacttaaa

SEQ ID NO: 1242663 - DNA, 4001 bp, Homo sapiens
atctgtaatcccagcactgtgagaggccgaggaggagagatcacttgaagtcaggagtttgagaccagcctggccaacatgccaaaagcccgtctctactgaaaatttaaaaattatccgggtgtggtggcacaagcctgtagttctagctactcgggaggctgaggcagaagaactgcttgaacccaggagacaagaggttgcagtgagccaaaattgtgccactgcactccagtctgggagacagagtgagaccctgtctcaaaaataaaaacaaaacaaaacaaaacaaaaaaacaaaaaacaatcacttaggtaacccaaaatagtgcccatcatttgtgaaaagaaatactcactagttgtattctactcagaaaatggttgccttgcttaaaaagttttgcagaaaactgcaaaagttcctcatttctggtactattcggtaatatatatgtaggtttctttcctcagttcccactctggaaaaaaaaaaaaaaaggaaaacgaaactttttttttttttttgagacggagtctcgctttgtcgtgcaggctggagtgcagtggcgcgatctcgactcactgcaagcttcgcctccagggttcacgccattctcctgcctcagcctccggagtagctgggactccaggggcccgccaccacgcccggctaattttttgtattttttagtagacacagggtttcaccgtgttggccaggatggtctcgatctcctgacctcgtgatccgcccgcctcagcctcccaaagtgctgggattacaggcgtcagccaccgcgcccgaccggaaaaggaaacttttaaaaatagctgctggtgcaactaacttacgtgctctggtaaacaagaagagattaaaataaaaaacaatagctgcccaaataccccctttttaaaaactagatgcaaaaaaagggaatcatctaatcccatattataaaattaaaatttattttcatttgttgttgtgtaaaactcacatgtggaagtgttccttgcacaggccgcagcatgcaatacagtttcacacttctgccagatattctatctcagaaagcaaattacctgcaaactaacactggatgacaagtgtcaccagaagtgctttggaaacatgattatgttatacaaagacttggcaaatccaacagcatacagtgcaactgaaaccttccccaaggatctgagaagtcttgccgatggaatccttggacatcaagagccaggcgaggagcagtttccgatctgctgagattctgctccgccttcacgcgaatcagcatagccaagtgccccatccaccagccaagtccttcagtgctgaggacgcacgcatagccaggacagtcacgggcaaacgtgacatcaaatccgaagggcggctgtcggctcccttcctgccagccccagcgggcaccccgtcaagttctcgctctgtaggcagctggagtctcaggctcctcagaacgatcactgggctctggcacctctccccacacctgtctcaaccactggtccgcctcgctctcctccctcaggtagcaccagatgatcagcgccacgaggaagcagctgaggggcagcaccttccaccagggccgctgatgtccctttcccatggtatggcccaccgaccagcggtgagggttggctttgctggaggaaaactcaatggggcggtcagggtcgtcctcttcctcggcggcagggtgggcccgatcccgggaaccgggcaacggatgaaggcttcgggaagcccagcctatgagcctcagcgcccggacggccctggaagagagagagcagtaagcgctccgcccgcccgccggtgtctgccctcggccctccgagaccttgaggagctcacccggccgccggggcacacaagacacgattcattgctgccttgactcctcgactgacgccttggcgcgccgtgatagcgtcacttccgtcgccggaaaccggaaaccgggcgccataccaggcctccgctcacgactacagaacgtggtcccagtagcgcagcggaaatgacgttcggctgcgaagagctctttccgtcgcaggcccggagtgcgcgatggcatgccgggaaatgtagttctccgtccctttcgaataggaccgacaccccggtccctggccccgaagagaggcgggcgccgcgggggcggacgttgtcctcagagagttgtctgagtttgcctcggagcagttctgaaccgtcatgaaggtgcgcggggcctggttggggatccgcgccctcagccctgcccgcctgccctgggctgggcgcccgcacctctctgccggcttccccgaaggccgtggcaccgccctattttttttttttttttttttccgtttagttcttttcgtgagacagggactctctctgtcgcccaggctggagtgcagtggcgcgatctcacgtcactgcggcctctgaaaccgcctttgcaaaaattatcactgaggaaatgacagtggaagagatgagacctaaggggctccgtcgtgcttcccacccttaagctgtcctggttcattcctgggcgtgggcagagctaactttgggaaggatttcagttcatggtttcactctgaatcaaagtcaacagccctttccagaaaaaacccccgtcttgcctgaagaccagtctgcctttgcaggactaataaatcagctgcaaaattagaaattggccgggcgccgtggctcacgcctgtaatcccagcactttgggaggccgaggcgggcagatcatgaggtcaggagatcgagaccatcctggctaatacgatgaaaccctgtctctactaaaaatacaaaaaattagccgggcgtggtggcgggcgcctgtagtcccagctactcgggaggctgaggcaggagaatcgcttgaacctgggaggcagaggttgcagtgagccgagatggagccactgtactccagcctgggcgacagagcgaggctcagtctgaaaaaaaaaaagagtctgaacctccccaaattgctcctggggataacatcactattgtaaaatctaagatcaggccgggtgtggtggctcacgcctgtaatcccagcactttgggaggccaagtcgggtggatcacgaggtcaggagtttgagaccagcctggccagtatggtgaaaccctgtctctactaaaaatacaaaaagtagcctggggtggtggcgctcgcttgtagttccagctacttgggaagctgaaggagaagaatcgcttgtaccctggaggtggaagttgcagtgagccaagatcatgccattgtgctccagcctgggtgacggagcaagactctgtctcaaaaagcacaacaacaacaaaaacctaagctcaaagatcagtgcctgaaatatttagcagagcgtgcactggatggatcagctggtaccacccagaccggtcatctggcccaaccggttctgccatgcccgccaggaacagaagagtctgaacgtgagtccatctccaacctgaccaaccagcactccccacttcccaagcctctaccctccaaattatctttaaaaattcctatccccaaatgctccggctgactgatttgagtaataatagaactcctgtgtcccgcacagccagctctgcgtgaattactccttctctattgcactccccctgtcttgataaattggctctctctaggcagcaggcaagttgaacccattcggcacttagacctctgcctcccgggctcaagtgattctcccacctcagcttcctgactggctgggaccacaggcgcccaccaccaagcctggctaatttttgtatttttagtagagacggggtttcaccatgttagccaggctagtctcgaactcctgacctcaggtgatccgccggccttggcttctaaaagtgctgggattataggcgtgagccaccacgcccagcctttatttatttacttatttattta

SEQ ID NO: 1242664 - DNA, 4001 bp, Homo sapiens
ccgtgcccctggccatccctgcccacgtcaacctgggcgctgcgctgctcctggcccctcagctctactggttcttcctcatctgccgtggggcctgccgcctcttctggccccgctcccggccgcccccggcctgccaggcccaggactgaggccgggggccgggaccctccccctccccacccccacccccgtggagacagggctctggggctgatggctggggttgggagccagggtcctcttgcccggacaaccccaggactgacgatgaccccgaaagggaagaggccccatctctcggggactgagggggtggagagaggggacctcttccccctactctgcccccttcctgcacacccttgcgctggaggaggggagggggcaccgcctcccacccactgagggcaggagggcttgtggggagggacaccaacagggtttcaaggggaccaggagtcagaatgtggggagacgcctctgccaaggccatcccagcccctatgctgccatcccccagggctccccatcacccgagaggagaggacgccccaactaacccccgctggccctcgggcctcccgagtggccggctgcaaccacggctcctctccagggtaggccagcttgaggaatcttatttattttatttatttacccaaatttgaactagtctgttgggttgggggaaggaggtggctgctacccccaagccttcccagtgctgacaaccccgggggcaggcgagggcgcccagtccctcaccatcggctgcacatcgcgccctcgggccctgccatgtccctggtgctactgacctctcaaggcttcctccaatctggggtcgggggaccctgggaggtgctttacagaccgctaataaaagacgatctgcgtgaacgccaccaaggcccttgccaccaagttctttggggctgggaagggaggaggtggggggcttgggccatgggaaacagaggggacaggatccccagctgctcgctgggcagtcagggaggaggaaagcagggaacttttgctcatcaacaggagaggaggtgggtgtgggtgctcaggttgagtccagagcccttgtccggctctttaggcccctttctggaagtttctgtggggcatggagatcagaggggagaggtcacagcctgccccgctagaactggggtcttcagccgctcccaaggaaggtggtggtgggtggggttggagaaagggggcaggccttacatgtgggtgcagaactggaaaaggagaaagaagaacgccaccaccagcaagcccaccaggatgtgatggaagagcccggggctggaacctgctagacaaacaggacccttaactcccctctgatggcccaatgaagggtctggggctgctctcctccagaccctggcggggagggaggtcccttctcaagctggttcatacctgagttaatgaacacgatgggtttctctccaataaactgggccacagccagcagcctggcttggtctgagtccggataatcgaagaagtcaggtctgtctaagaagcgcggagactctgtccccagggctgacgccgtggcacgcttgggtctgggtgctaggacccaagcaaactctgtgacaacagccaagctgacccctgcctttatctctcgaggcggaagctgacttgggaccctgtgagaccacccagccttattgcagaggctgtggagggtcttgatttccctcagggtcagctgggtgcaccacgacaaggctcgcggttgttggggggtaggtgggaccagcaggatgggagagaagagtggagagaaaatgagagggtgcagggttggcttccgagtccctaagtgggcatcacactttatgctcccagagctgcctgccttcctgctgctcccaagacagcttcttaccagtttctatggcccctagtgcagccagccacacccacaccagcacccatggccacagcctcatgactcctatcatgaggtgggggctctgtgatgtcacagcccagagctgttctgatggcactttggggtgaggggagaaagtgctaggagctgggacccctcccccatccctcactctcatcagaagaggagaggagaagagaggttgggaccagtcttcaccccctggaatgtcgctgatgataaaaccataatggtggcagccccagcatttacaaagaggagggatgcggcacggccatcttgctgaaagcccgaactaaaggaagctgtgtttggacaacaggcacaatttggggtggtggcacagggccacacacctccggttaccccttggatcaaccacaggtaacatttgttttatttattttcatttttttggagacagggtctctgtctgtcacccaggtgggaatgcagtggcgccatcttggctctctacagcctctgcctcctgggttcaagtgattctcttgcctcagcctcctgagtatctgggattacagctttggataaatcccttccttttatctgtctgccaccacacccggctaatttttgtatttttagtagagacagggtttcactatgttggtcaggctggtcttgaactcctcacctcaggtgatctgttcgcctcggcctcccaaagcgcccggcctattttatgtattttcagagacagggtctcactctgtcacccaggctggagtacagtggtatgattactgcagccttgaactcctggcctcaagtgatcctcccacatcagcctcctgagtagctgggaccacaggcatgtgccaccatgcccggctaatttttgcattttttgtagaaatgagggcttgctatgttgcccaggctggtttcgaacttctggcctcaggtgatcctccagcttcggcctcccaaagtgctgggattacaggcatgagccaccatgcccagcaggtagcatttattgaacacctattactatgctggctggaccccatttatggccaagtaccttgcacaaatttgttcatttgctcttgcactgaccctcagaggcaggtactcttttttttttttttttttttttttttttttgagatggagtttcactctgtccgccaggctggagtgcagacgcacaatctcagctcactgcaacctccacctcctgggttcaagcgattctcctgcctcagcctcctggagtgggattacaggcgcgcaccatcactgttcggctgatttttgtacttttagtagagatggggtttcaccatgttggccaggctggtcttgaactcctgaactcggatgatccgcctgcctcggcctcccaaagtgttgggattacaggcgtgagccaccaagcccagcccagaggcaggtactcttgcctcccttatacacgggaggaaatcacggcacagaggggaaaagtagtgtgggcaatgcacacttcctggggggggggttcctctctgaggctcccccttgcatcctatccgcagatccaggggcacagggctctctccgtcctcccccgccccctccttagtgctcagccgggaacgaccctggggttaggaaccgagaggagtagcaggcgtctcccactaggtggcagcagcggccgcgcctgagtccacgctcccaccctaggaaaggcgcagcggggcggactcccgggcctcctcccgcctcttccacaggttgcatccgcggctgcaggaaaacggatggctgggaatggccgtcgggggttggtcagaggaagtccctcggccctttccgaggcacatctcttggccatccacgcgtccttcgcagactccgctccctgcacctccgtttcctcttctgtggccggcggctcccccgtggccaccccatctcccatctctgccacctcccaacagccatttccactcctgcggccccatcccagctaaggagagcgcccttctgattggcaggtgggcctgtctgtcacgggcatgttccatcccac

SEQ ID NO: 1242665 - DNA, 4001 bp, Homo sapiens
tctccctggggctcaaacctggtagctgccccctctcaccaatacaagccttgtgaagatcctggagcagggcacaagccgctgacgtctgctccagtgagaagccctgctggcggcagaaaatgagcgcgtggcagaagaggtccagggtgatggcgtccctcaggctctgctcaggacaccctagctccagcagctcagccagcacccttgggagggagagaggagtgagtgacaactgggcctcctttcatcaccctacacccaccacatgctttggagtcagccattcctcatgttttcccaacctgacccctcagcctttgccaagagctcttcccacgcccccctcagtccctactccctcatctcagcattggtggtcttctccagctggtgcatggaatggacgtccaggtacttcctgttatagtaaaagaaaaagagtattggtggccgttacctatcatgacaaggctgtgacagctagtgcgtgagactgggagttggccaccggcgtgaagctgggctcttttgccagcttgctgtgtgactatgcaaatcgttaactctctgggcctaaatgaactcttatgagcctctccatttctaaagcctagggttaggaatcttgaattcttttttctgctctgccactaccttgtatgaccttggtcaagtactccctgtggccctcagtgtccccctctgtacaatactccttagcggccatgagactccatttacattctgtctttggctctttttttctcacactgcctcctctttggactggagaggctggaaagccaacttccagtcacctggagtaattgcatctccaggcctcagtctcatctgtaaaatggggatgccctggccacagacaggactgttggggagacaataaagaacgcaaatattcagtgtaatttttgtctcttcacactcaccacatgcagatccggggtcggggcagcggcggctgcggaaagaaagcgaattggggaaggcagctgcggtgtcctggcccgtagcgaatctccagcaggccggagaagccgctgtaacttgccatctcatctcaaggactaaggagaggcgcgggcgagggagggcttcagcaggccctaggtgctctacgcgagcacagtaaccaccggggtcacacacccctgcctctcctcgcccaagcagcccgggagacgtcccgaacgttagtaagcataatgacaggtggcgcctgcgggggagccggtttataaatattcacgagcagaccagactgtcccgccctcaccggaaacaagttggctccggggtcttcatccgctttcgccgccgccgccgtcgtccactgagtccgcacactcgcacgcgtccgcgcggccgacccatgcactgagctgcgatccttccccgcttcccgccgcagctcggagagatgttcaagctccgactgcaccctcattcccaaaaagtggctggtcttgcggttgagcatctcgccgctcttccgtgccgcgaggcgccccgggctcccgccgcctaggttccaggacagccagcgctcggtcggcggctaccaaggccgggcccgttcgcctcgctccggccaatctacgcgcggagaggcgcggcggggcgaatccgtgggggcgtctccctccgtctcaacggcgacggttgccaagggggcttgtgagggaaggaaggcggaaagcgcaggctcacgccagtgggagcgaagagaacgcgcagatacgtgagaagttgcgagtgcccacctgggcgccctctcttccaggttgctaatacgagggccggtgctgtcctccaggctgggaagtgggagcgcggtgtcagttactatgggaactgcctcttggccaatcaccgagagaaagaggaggtgtttgggaagaagccagaggacccgagtggcgggaccaagcgtaaccaatagaagcagaagataaagaagtttcctcacatccggggctgcctttggcgcctgcgccctgcgcaccgttggggggggggcagtggcgtccagtgacgcccagtgacgtccggtgaaatccaagatggcggcgctaggctgaccctcctgctggtgagggctctggcgccgggggggacgggatccagcaggtgtgtgcagggtggagggtgtttggggctgtggaacaccagccgttcccacatctctgctctgtgtcttctgcaggtgacggaagtaccgcctcctcccgtttgacgcccctcaggggaccctgcatcgctccagccgccgcggccatgtctgggccaggcaacaaacgcgccgccggcgacgggggctcagggcccccggaaaagaagctgagtcgtgaggagaagaccaccacgactcttatcgagcccattcgtcttggaggcatctcttccacggttcgtgggctcttgccttaaccctcagaacttcccagagccctccctctgttctctggccaaactgtgcggaatcttacacccacttccccaagtttagcaaggtccgcgttacaggaccttgaaagaaaggttagaaagaagctcagaacacgacgcctgtcttccctttacagataggaaaacaggtttccagggggcgtgtgacttgtcaaagactaaggatttacaaggggacaggcagaaacaacgtgagcctcctcacaacaaagacactttcgctgtgtgttgtctgagcctccttagattctgttagcggttagtgtgggaatacctccatctcccatgcattgcagatgctctgctcctctttctctctctgtgattggtttgtgggccctgcttgacgctctcgtcggcccctttgtttcctttggtaggaggagatggacctgaaggtactacagttcaagaacaagaaactggcagagcggctggaacaacggcaggcttgtgaagatgaactccgagaacgaattgagaagttggagaagcggcaggccacagatgatgccacactcctcatcgtcaatcgctactgggcccaggtggataccttctgctttcaaagaccaggccttgattcagctgccaatccccagattcccctgctaggaaaggagtatcatgttggaaagcactaagggattcataacatttttgatgttttctccttccagctggatgaaactgtggaagcccttctccgatgccatgagagccagggggagctgtcttcagcgcctgaggcacctgggacccaggaggggccaacatgtgatgggactcctctcccagagccggggacatcagagctgagaggtaggaccagagtgctgggatctggggagcttaagttctgggagaagtcctggggaggaggggactttggtgttgggcccctgaattgcctatcttactacttctcacgaaatggatttcatgtttgggcagtaaagtgcagtgcacaaaaacacaggctttagactctgactaacttggtttatagagcaattcatgttttgacacccatttgtttcaaaacagtattatggttgagtattaaatatgtatttgacgcttcctagaaatgagtgttgcacttgctataagggaggaaattataaacatagtaagcagaaagtactggggctcctgaaacggaatgattgtgtgtgcatgcatgtgcgtgtgattctaattatattggtaaagtacaggaagcttccctgaggatgtgatacgcaactctgtagctttgaggaaattactttacctccctgaatttcatttgtctcactttcaggatggagataatagtgcactataggttgtgttgattaagtgaaccatgagtattgaagggctcagtctggaacttggtacagagtggtagtaactgctgctcttatcctcatgagggtctgtccattccttccagaccccttgctgatgcagctgcggccccctctcagtgagccggccttggcttttgtggtggcactggg

SEQ ID NO: 1242666 - DNA, 4001 bp, Homo sapiens
tgctgcctttatggccatctgtcacactctggtgtgcaagagcttccacatccatcccatgtgaccttcgcaacaccctcaggcaggaaggagaggtgctgccatcacctccaggggcacacggagaagctgatgcccagagcaggtatattaggtggcctcctgaactctgaggtgttgtgagggcctgggaggtgttctggaggcccagggatagctcctgcaaccacacttttgtgtttggaggattctctcatgggatgcagcttctggacccacattccctgctctcctcaccccacagggatatgttggggtcagggccagtggctgaggatttgctttccttaccgaatgacgggggaggcacacttctttcttgtaggtttgaaatgtgctattcctagaagagaagaacagaaaagcttagggtttgtgtaaactagggggcagggatgctagagcacaggcctggacctgtcttctcagaactgactcttaataataaagcccacgggtggtggggatggggggatcctctgagcccaagaagagtgagagggtgacatcagaagcaggcgtgtgctagctcatgcgtgaatgtctaggggctcctgggggctggctgtcatggaatcctgcattcccaagccaaccagcttcaagctgactccagctacacttgtgcttggagcatcagaaaagacaggagcattccaacctgctgagaactttccaagacatgtagctgccaatcacatcacctaggatgatctgtcagacaccctcaacttactgaaatactgaagaaaaaacatcgtcaaactgtccattaatgaacctccttccactataaaaacccgggtgctttgtctctgggatgacaaagcacttggggttacacagcctgtgtggctcttccctgttccactccccaacaaactgcttgaatgttggctggatgaagcgtctccagtgggtgcaaagccctgcttccctgacagtagtgggtcaaagtgctttgtatgtggaaaccgtaagagcgatataagtgtttttgggtttcattgtcataataaccattattattattgctatttttgtgagagtaataggttcacgcatcaactctcccagataatgcttgaaaacagaggatggggcactgccctccacagcatccgaggccccttctggtaatgacagcactgctatattcctggtggggagggggggggccacagccatctcagtccttgtagttcaggtgggccaaactcaccactgcccagcctggaaagctgggaaaaaaaagaatctcctttttgttgaggttgataatctgataacatgtaaacctcaggaggtcctggtgatcatcttgcctccacaagggaagccagcaaaaaggaaggaagctgagagatggagagaaaccttccaggaccatggtcaatgtgtacctggatacatccatgcctgaaggcctacttctgacattttcagttatgtggaaccatcagttgcgtttttgttaagccaatgtaagtgaggttcctgtgggtggcggtcaagagttctgcctgtgcataggtcatggagcaatgccgggccgggaactcacaggcgaggtgtcgggtagccgcgggcaggattcaggactcacttgcctgccatcctgcgcgctgggtgtgagtgccaacctgcagagcccgacgcaccccgcgcccggccccccggcagcagcgcctgaggctgctccagtggcctcatgatgatggtgacaacgccgcggggacggtggggaccggctcgcacgcatatggcttcttatggctgacgcgccctttcacacacacatcgtccgcaggccctgacgccctggctcccgcctttccctcctgccccaggaggaacccaacccgagctcaaccccagccccaacctcaaccgctcagaggagcccaacaacgcccgcgcgcccgcccgtcccgctgactagcccgcgcccagccaatcaaaattggccttctaggtatgtgaccttagctggcagctgattggtccctcacgagagacgcggggtcagcggctcagagcgcggctgtgtggggctgcggggctcccgccatgcccgctggggtaggtcctgcggaccccggccactggagccactcatcatttccgacggatgggccggaggggccgccggccgccccagccagggtctcggtagcctgcaaggagagaaagaggtgggagcagcccgcgcggggccctgcgtcttgcataggcgcttctggtaaaatcactcctttatctcagataatgagttggcgctggatcgctgcgtcctcaggtggggctcgaatcgtgacttttagagaaataggttttctttctttttttttttttttaacaacatggggtttaaagggcgcggaattggaagcagtcgtcacccggaggcctgggcgtgcaagcaccgaagctctggctggccctgagcctccccaccccacccgctcttttcgctggaacgcgtgtactttgggcagttgctgacgtggagacaggacgtatgtcttcatattttagtaaaacccaatgccctctgcctctctgattatgttctttaagttatcgccagttccaatttgtatttcttggaaacggttgggtcttccctcacttttcagtattttcatgtagactcaaatactctggattaatatttgtatttgcccaaaccatcacgagcacctcttaccctgatgggcaatacttcagtgtgctgcgttctggccacagagcaaacagggtgctcccaggcactgccctctcggatttcttgccttgttatttaatcattaagatcgtgacctatgagcaggactgtttccagccagcacatacacatgtcctctcctggccagcatccatgctgattagacggtgcccctgccatactagctgcctaatatttcagataccccaccccgtgtgtgtgtgtaaatcatgtcactgccctctttgtagctaatgacaaaattccaagagtcaccattagcctagcacattatgcctgtctcatttctgcccactttggagcactcggcttctctgctgttttcctccagagcacactgaaacactgccatagcacagcagggcatagaagacaggctcatgctcccctggacgctcaggccttcacctcgggcacactaggtcttgtcattccatgtcaagaatagctcttcactgccctcacccacccaagaatggctaaaattaaaaggactgacaatacctagtttgtcgaggatgtcacagctggaaccctcatacatggctcatgaaattgataaaaccacattggcaaactggtagtatttacaaaacctaaacatatgaatacctgatgaccaactaattcctcaactcacccaagagaaatgagagcttatgtgtaccagaagacatgaacaaaactacccacagcagctttcttcctgatggccccaaactggaaatgatccagatgtccatccataggaaaaaaagattttaaaaagaaagtatggcatgttcacagagaggaaattctgtacaacaatggaaatgggcacacaaccacaacccacaacaatgtggatgaagtgtacaatgaagtcagaccccagaatgtacagacaattccatgtgtgtgatgttcaaaaccaggaaagcaaatccatcatgacacaggctggggatgtgaaggaaactccagccaccctgcccctgtgctctgagtaacaaggcctagatcccaatccttgctctgcctcttatcagagacaggtatcagacaagttgcctaacttttctgagcttcagttttatgtctaaaataatgataaccatagaaccaatcccaaggaagtttcagaagatcaaatatgaaagagcatgaaaggtgctcaaaaaccagggactgtcatggtagctcacatctg

SEQ ID NO: 1242667 - DNA, 4001 bp, Homo sapiens
ggtggacgccaccacacccggctaatttattcatttttttatagagatgaggtctcactacgctgccaaggctggtcttgaactcctgggctcaagtgatcatcccgccttggcctcccagtgttgggattataggtgtgagccactgtgctcggcttattttccctttcttatttcttcttgggctgccagtaactgaacactgtccacgtgctggtcggggttagcaggggtcagcagtcaaaggtgagccagggtcagaggccacgcctcagcgcgcagctcccttgcccaccagctgctgggccttcagccaatcactgagctcctctgagcgtcagtttcctcttctgtaaggcagaaggaatgcctctttgctgctcctcacagggctggttcttggagattctcactcacttgtgtctatctcccctgctaggccgggcgtgcctgttcaccgtgactactctggtacttctcccatggtagctcctccaggcattttttagaaattggggtaaggctgagcacagtagctcacgcttctaatcccagcactttgggaggccaaagcaggaggatcacttgagcctaggagtttgagtccagcctgggcaacataaggagaccctatctctacaaacaatacaaaaattagccaggtgcagtggtgcacacctgtggtcccagttactcgggaggttgaggtgggaggattgcttgagtctgggaggtcgaggctacagtgagccatgactgagtcactgcactccagcctggatgacagagtgacaccctgtctcaaaaaaaaattggggtgaaattcacataatgtacaattagccatttttaagtgaacaattcagtgtcatttagtacatcagtgaggttgtataactaccacctccatctagttccaaaacattttcatcaccccaaaaggaaaccctatatccacaaagcaattactccccattctctcctcctccaagcccctggcaaccactgctttctgtctccatggatttacctattctggacatttcgtataaatggaatcatacactgggtagccttttgtgtctggcttctttgcaatacttgatggaggctgcaagcttggcgttttggttgtgcctgactctaaagcacccttcttcccactctgcataaggagatggcccatcgtaggtgagtaagcaacaagatgtcccaggagaaggctgggcgcagtggctcacgcttgtcatcccagcactttaggaagccgaggcaggtggatcagttgagatcaggggtttgagaccagcctggccaacatagtgaaaccccatctctactaaaaatacaaaaattagccgggtgtggtggcatgtgcctgaaatcctagctactagggaggctgaggcaggagaatcacttgaacccgggaggcggaggttgcagtgagccaagatcacaccactgcactccagcctgggtgacagagcgagacggagtctcaaaaacaaaaaaaagacgtcccaggagagagccagtggtgaagggaggaaaagaagtgtctggaggctgggggcgtaccttggccatgacttcatcatgaccctccaccatcttccggagcttgatcagatgccacaggtcctggacgggccgggcagtgccctggctggcttccagcagctgggcagtggagggcaggtcctgcagcagggccagctggttctccaacttgtcgaggcggctcaccacgtggtcgaagacattgctgagcctcttcatggggttgaggataggctgggcgtctccttccctgggcatgatgaccacctgcgaggtctgcaggaagtcctcatcgcctgagaggactttcttgagctcggccatgtggatgtgctccaagatgccgtgcagcaggaggtgcagggccttgaagttcagcaccccgcactgtgggatggcgatgttggccagctcggtgaacgtgagtgagaagctcatcctgccagggtgggtcagtggggctggggttccaggtgtcctcaaggacaaggggtagctttcagtggttccgagagctacatggactggtcctcagaggcctggggtggtggtgagtcacagcagtcagggaggaatggcctctgttctggctggagctcagatcagagtctctggttgccaggacaccaaagaatgtgatgaaacgggcgcaattcaaagtctggagtggggcaggtgctccctggtaagcctcacccagagtaggtgctcagttaatattggatgaatgtttgaatagctgatggcagcctcttcattcaagccctctggtgatgtgagactggtaactttttcctagaagcacatatggaagggatggagaggcagctccctccttggaattttctcgaatccgggcagaagacaggtttcttggagttaggaagacccaggttttacaaagagataagaatctgaagtactggctgggtgggtgtgggggttcaggcctgtaatcccagcactttggggaggcaaaggcgggaggactgcttgaagccaggagttcgagagcagcctgggcaacatagtgagaccctgtttctacaaaaaaaaatttgtaattagctggatgtgctggcgcacatctgtagtcccagctactcaggaggatggggtgggaggattgcttgaagccaggagtttgaggctacagtgagctatgattgtgccactgcacttagcctgggcaacagagtgagaccttgcctcaaaaaaaaaaaaaaaaagaaaagaaaagaaaaagaaaagagaaaaggccgggcacagtggctgacatatgtaatcccagcactctgggaggccaaggcgggtggaccacggggtcaggaattcaagactagcctggccaagacggtgaaactccgcctctactaaaaatacaaaaatcagccaggcgtggtggcacgtgcctgtaatcccagctactctggaggctgaggcagagaattgcttaaatccgggaggtggaggtttcagtgagccaagatcgtgccactgcactccagcctgggcgacagagcgagactccgtctcaaaagaaaaaaaaaagaatctgaagaactacattcatttctggacgcatccaaaggccccccacagtgttccattttctcgtgtgtgtgtgtgtgtgtgtgtgtgtgtgtgtgtgtgtgtgtagtgtgtgtgacaaagtctttctctgttacccaggcaggagtgcagtggcgcgatctccgctcactgcaacctccgcctcctgggttcaagcgattctcctgcctcagcctcctgagtagctgggatcacaggcgcctgccaccacgcccagctaatttttatatttttagtggagatggggtttcaccatgttggccaggctggtctcaaactcccgacctcaggtgatctgcttgcctcagcctcccaaagcgctgggattacaggtgtgagccaccacacctggccaagtgttccattttctgggaaggagagcccaggtggtaagaagggcattgtcggctgggcgcggtggctcacgcctgtaatcccagcactttgggaggctgaggtgggcagatcatgaggttaagagatggagaccatcctggccaacatgatgaaacaaaaattagctgggcatggtggtgcgtgcctgtagtcagctactcgggaggctgaggcaggagaatcacttgaacccgggaggcagaggttgcagtgagccaagattgtgccattgcactccagcctggtgacagagcaagactccgtctcaaacaaagaagggcgataggctgggtgcggtggctcacgcctgtaattccacactttgggaggccgaggcgggcagatcacgaggtcagaagattgagaccatcttggctaacagtgtgaaaccccgtctctacttcaaaaaatatacaaaaaattagccaggcatggtggcgggtgcctgt

SEQ ID NO: 1242668 - DNA, 4001 bp, Homo sapiens
agacctccctatctcacagggttttgtgacaaataaaggcaagaatgtgcataaaaggctttgttaatgtaaatgctcacaaatgtaagaattatattgatgagaattttatgtatagtttttaagatgctgtagaaaaaaaagacatacctaccaaaaaacaggttctacattgaccttaacaaaataaatggatgtcagttacatatagctcgcttgcaccaacctcccattttcccacttcatcaatctcaactctctcagatcttcgcctaatgcactccacatagtacactctgaactttttgcacaacccagatggtatacatggatccatatgcctgttttcaagattggctaattggcctcatttgcacaataaactattaagaactctctaataaaagtcgacaatgttgccacactttgttaaagagctaaaggttctgaaatgcaatgcctatcatcactttataaaagagctgaatttgagagaaaaagctcttacaaacccttattgaaggagaattttcccaatggacacagtcttaggaacagttgggaccagggactccaatgccaccaggattctctctttttcccaactctgcttctctgtttgctggcttcattctttccatgcaaaccagctttcacaacatagtgaaaaacatggctgtctaagcttccatggctataaacttctatctcctatttccaatttgaaaaattccaggaagagattggcatacattgggttggatgtccagccctttatcaatcaatcatgtccagggtataaggtctgataaatgcattgtaactgtaaacaaatatttgtagttgggaatgtaagagctccccaccaaaaagagggcctatttttacaaaataaatgaatagtttgtcctggtagtggttgtcctgggtaggcaaaagattagtgtccacataaaaaggcagagttagtaaagacatgagtctgcccctgtaaaacagtaccagtcaaacatttccccaggtccgagatttgtttactctataataagaagaataaacctgcccattccaccaaactgtggcaacaatcgcctgaaacgtgagtgcatagtaacttcaaaaatattacaaaatttcaaggtatgactgttgctattactatctatataggttactaaatttcccatttttcacactgatgcctggagtcagactgacacagcaagtagtttgaataaactgaagctcatctaacatcacaggctgtgagtacactccttctcaagccatattgccgtccagctgtgtgtggttattatgccaagttcatcaagagatatttgagcttctcagggagcaggaggaggggaagacagaatgagactcagatggaaggaaataactcaaccaaaaaacctctgattagtctacttcctagagaacttccttctactttccaaactcttagtcactgttctatcttccagacaattatcagctaattaatttccatgcggacaaagatcgctgtttaataggtcagcagtgtatcaccttgaagtgaaaatcagcaaaggaaagaagggtaaatgataaaaggcatcaatagtatgatgtctgtcctaagtcaacactgggaatagggattcagtcactgggcaccaacttcactgctaatgaatgatgagtgactgactataatactaaggcttgttatttctgtgctacccttccctttacataatatcaaagggaaagtccccaaataatgacaaaacacaccacttatattgcacactataatttcctaggcatgttcccatatgccatttatcgaaaatggtgtacttacagtctattagaaacattgctgaacttgggagccttaagtacttgccacttaaccagtttggtggccttgggaaaagtcttgacttccatttcttcatttgtaaattggggataagagtatgtttttcaacatcttagcatgaggcttgactgcaaggatttataagttatctgtaaagtgtgacataaatatgaagagtttttcataaggcctagtgaaaatctcagcaaaggacgcaatgaaaataaagaaaacctatgtttgaacttaataaaactcggattcaaacgatgccaaggagttgacccgaagtcacccacaggtagctgaaaggtacaagtcttccagttccaagccctctttcctatactgcctcaccgatgatccaccaggggtgaacgtcaatatctttcctctgaaaatatatgttttattctattatgtaagctgggaaaagaaaatgtaactgaagacatagaatgagtcatccagcaattagttaccctacataatgccactgataatacatagaacaatggctgtattgcttcagcacacaatctgtctcaagcaccagactaaggaatttacatgcattaaatcatttaatcctcagaattagcctataaggtaggtatgattaatgtccccatcttgcagatgaggaaggtgaggcacacgggaattaagtatcctgccccaagtcacttagtgagtggcagagtgagtattcaacacagacaaattagcttctgtgtctgtaatcctaccattatgctaggccatctcccaaggacaccaagcctagtgcaccatctgattctaccttttaaaaactcaaacaagagaaagatggattttatccagagttttgagctgtatctcatgtatttccagaggttttcccaccagtttctggcttcatactgtccagcattgatctcaaatatccatcttatcagcattgatctcaggggtttaaaatcattttgaaggtgataaagtgaagcacttgtccttctggacagcccacctcctgtcttgctttgttagttttagtaaatgtgtgttcaggcaaagtcaaaggccccgaacagagactcaccaggctcagcaccatccttgcctttcccatgtgggaagaatgcttctccagaaacaaggttggcctcggaagttggctgttgcccaaatggcaggagagagcggcataagggagtcacactgaaagtgattttaaattacacaaattcagcaaatacagaaagagaaagaaaatttaaatcaatgatactagaccgtgctatacattagaatcacctgacaaagcttaaaaaacaactatcaaaacttggcccactctggaacagctaaactagaatgcttgaggacagcaccttgctttaaatcctgcaggcattttctacacttggctggtgaacttgagatgggaacaacgctccctttggtctcagttcccaggggcctttcacagtatgaccatctcgctgcactgagtgtaattcataatacagtgtaaaattgtatttagcatattaaattattatatgctaaacattaccgaatatattatacatttataaatatatttaggtatattaattttttgttttgttttgatttgtttttttgtaccaggacatcagtgagtacaggcttaaactcagaagttgcaataggctttgctactgttatcaatttagctgaaggacaaatagaggaaatgtacctagcacaccatcttaagctaagtgggaggctaggcaaccacctaaatacacatctttttttgtcccctcatctattcaggacaagtatagctactgcacatgagtaccaatgtgagttcaccatctttatatggagaacctgcagcctcagtttgctgccagtctttagcctttctggtctcatgagtcatccccaaactcattgttgtccctttccaggaatagtgtcacagatgggagttaaacagcacacaggtagacataccaactctgtagtttcaaagagctggtactgtaagaagacctggtagcttttgactcagttctatctctatctctatttttatctatctctatttatctctaaatctatctatcatctatctatctatcatcta

SEQ ID NO: 1242669 - DNA, 4001 bp, Homo sapiens
ccaaggcctgtggcaaggccgtccccaccgagagggtggggacatgggtggtcagggccagctacggtctgcgttgggtgttaaagaatgagaaggctgggaaggtcctacccaagcctaaccttagtacagccttcgggacagcgcagccgtgtcaaggggtctcagagcaagcgggctgcccaggctcccttcccaaggggctgctactttggggatctcaggaaccctggcccccttccccaggatcctcagcaccccactttggttcatgggtccctccccaagccaggcttcttcctgcttgcggggggagcccaggggtccctgtgcagggagcgctgccagggcagacactggtgctcagcgtgcccctcccgcccctcctcccaagccccaggtgctccccactccctgtgggctgttgggtcctggtgggggagcatgcaggcagcacccacgggcctcacctttgaggatttcgatgtctatagtgggccgtactcgaggcagccccctccacaggtcccccctccacaggtccctgtcactcacccgggcatagggtccagggggccaggccgggcggcagcagtgcacacagggcctcctgggcagcccgggccaggcccccacgggcagcagcagtgctaggagcagcagggcgggggctgccatcttggccagggctgggggagaggaaagaggggagggactgagaaggaggtgccccagctggagcccccagaccctacggcagcccggccctgcccccgttgggaatacagccagtggaggcgggagcttctgcctgggcacggacggtcctggcccagtgggtgaggccaaggccgaggctcaggggctgctacactctgggccgcaccaggcaccctgcacacctggagtcggggagtcctggtccccaaagctggggcccccacacccggcagatggtggggaagccgttgtgggacacagaggtctctgagacagccctctaaactcaggagcgggtagccgcccaaggccccacccactgtggctgggcagagccctggggcgtggtggctggtctgctccagggaaaggccccccaaggctggcctggggtggggggccctgcacagtgcacagaggcaccgtctcagccaggcccagagagcctctcgtccggagcccccagggcagggcctgcaggggcctcgggaggccactcctctgcctcccccagactagggaaggatggtcccaccttggtgccgaggggaagccagagccaacctgggtccccctgagcaaggtaggccccctcccaacagcagctgccccaacaagcctggcccccctgccaggtgggccttgcctaccccactcccctcacagccacatctggaggcttggccaggagtgtcttccgctagggcaggtgcacgggtcgggatcctcaatattccctgaagatgggctctgctggacaaagatctaggctgcctccttcaggaagccctctgggattgtagcacagggcaaggtccttcctcctgcagtgggtcattccaggtgggtggaatgtctctggcagttgagacaccctctgcctgcctccccatgagctcagcagaccctgactcaccccctggccccactggacaccacaagagcccccctggactcctccggcagagggagcctggcaggagtgggtgtgtgcatgcacggaggcctgcaggagcccccacggagttcccggccgtcccagcccctggccctgcctggcagacaatcagggctggatcatgctccgctggggttcagggggagcccgacctgcccagggcggctgtgaagactcccacaaccagccccaggccctgtgcttcctgttaccgtctcagggatgctccctgcctggccggccgtctgtgttactgtcccagcaacccagccgtcaaagagccctttcatgcccgcctgggcgcccgtggcttcctctgggctgtccaagagcaacaggccgagaggccagctccgccgagccctggacaggatcctggcagggcccctgtgtccactgcgaagcctgcctcgcggccccagggtcctcctgccagccccgtgcccatgagcggggctggggcccggcgtcttggccggctgggttgggggatggtgccgtgggcacgcagctctcctccatcgggaaaccaagcctgctgcccgcctggggtgcggcgccctgaggagaagcaggcagatggaagctgtggctgggcgggcccggcgggggggctgtaggccgaggcccgtgttcggggcccagaccagggcctccatgctgcacggggcccccatggccaccaagccaccgggtgacgcacagccctcatgctgctggcggggaagccaggctggatggagcccaggagcgcagcctccccaggctccgtggggtctcttcattccctcatgacacccctggggaggccccgcaccagccccgcctctcagcggataaggactgggccggacgactcgcgggaatgacttctaggcctcccaggcctcagcgggcgggggctccattctctgtgggccccaggccaagcccacacagcaccttggccttgtcccgctccgaccctgggcctctggacacggacacgcggccattccccacaggtccttcctccacaagccggcccctgttgtgggaggtgctggacgtggcaggagaattgtggcggccttgcctgaaagcaggctgtgggcggggaggggccccgagctggctcagtcccctcggcagatttgtgtgcgacctggggtcccgctctccccgcagcccctcagcttggcctggccctcagcacccccatgctaaagaccgaggaggaaaggaggacaggaggtgaggggagaccaaggggtcccccctgtgggagcttcgtgtgccaggctgcgggcaacgggctggggagggctgtggtggggaccgcaccagctgtagccggttccaggctcccccctccaggtggccctgggcggtgacagctcacccttggcagcggcacccactaggcccagcggccccctctggggacagccatcttcaccctgttggctgtggtgacacagatggggtgtgaagacctgagcgcctgtgactatggcacctgcatccgaccgagccggctcagcgtggctgtgccctgggcggcgagaacacagctctgcagatgtgtcccagtgggacagtgtgctcctggggcttgcagagaaagacgggcggacgcccacactctgctgtgccctgggtctgagcctcagcctcccatgcccgtgaaatgggcacccatggagctcagaagtatccagagcgtccctgaggcctagacacagggaaccctgtgcccctcagtgccccccgacgccagcagaactgccccctaaaaagagaggcatgttcctgacagtcccccttgagggcaggtcccagagcctccccacgcacagagcagggtggagggaggctgaggggtgggtgaacggcccgggaagggtgcctttgggtcccttgggttcgggtggcccgggatgacccgtcctggggagagtccgtctgggcaggcggctggcagggccgatgcctgaactatgtggcacagaagctgcaggccaggcctgagtggggtgggcagggagcgcggggggtgactcagtggggcaggacagcatgtctcctggacagaaatagccctggccaggcatgaccgcggcattgccgtggcgacgggggagcggctgctgccgggtgccctggggcccaccccccacagacacccagcagcgtcccaggcgggccccgggagggccgccccctctccgtgctgcggggcgcttgtgccagtgaggtgcgggtggaggtgccaggcactgggggagggggcctcagcaagacccccgactccacccctctctcccagccttcagctccctgc

SEQ ID NO: 1242670 - DNA, 4001 bp, Homo sapiens
gcggtgagctggagatcgcaccactgcgctccagcctgggcaacaagacagaaattagtctcaaaaaataaaggaaagtcacagaggggcaacagccatagagcagtggggccaagattccaatctaggcaggctagcgctcttgacggtcgtactaagaataaaaaaggggggtgggtgcagtggctcacgcctgtaatcccagcactttaggaggccgaggcaggtagaccacctgaggtcgggagtttgagaccagcctggccaacatggcgaaatcctatctctactaaaaatacagaaattagttgggcgtggtggcacacgcctgtagtcccagctacttgggaggctgagtcaagaggatcgcttgaacccaggaggcagaggctgcagtgagccgagatcgcaccactgcactccagtccacaggtgtggaccccaacaggaggaatgagtgtagctcactcagagtctggggtgggccaggctttctacacgcatcgtgtcatccttccatggccctggagagaaagtctggccacccccatctcgagataaggacacagaggcttgggggtgaagacctgccgaggctccacctcagcaagcgtcagtcggactgcatgcctggggtctggctcctaagcccatgctctttcaatggcccaaacatggaatgcatggaagatttcagttagaagagaacttggcagctgccaaagcaggctctcattctacggaggaagcacctgagacccagaaagaggaagggcctcgttcaaggtcacaaggcactgaccatgaagccaggaggggctggcacggggcagtttcttggcagagctggctgagtggtttatttgttacaggtttgcttgaaagcgttctctgccgaagagtttaggagcgatcgtgactggttagtgcagcccattccgccgggtctggatggtgagtcgtgccagtgtgtcccgtgcgaacacggactacccgcctgctcccagcatcttgccctccccaggacccctgaaacggaggctaaatgattcacccaaggtcaccaaatacaagagaaacggagtgtggccaggcgcggtggctcacgcctgtaatcctagcactttgggaggccaaggtgggtggatcacctgaggtcaggagttcgagaccagcctggccaacatggtgaaaccccatctctaccaaaatacaaaaaattagctgggtgcagtggcgggtgcctgtagtcccagttactttggaggctgaggcaggagaatcacttgaacctggagggcagaggttgcagtgagccgagatcatgccattgcactctagcctgggcaaaagagcaaaacttcatcaaaaaaagaaaaaagagggccgggcgccgtggctgatgcctgcaatcccagcactttgggaggctgagacaggcggatcgcgaggttaggagttcgagaccaacctggctaacacagtgaaaccctgtctctactaaaaatacgaaaaattagccaggagtggtggcatgcacctatagtcccagctactcaggaagctgaggcaggagaatcgcttgaacccgggaagtggaggttgtggtgagctgagatcacgccactgtactccagcctgggccacagagcgagacgccatcttaaaaaaaaaaaaaaaaaaacggagtggaaatctgaacccatctggctcgggacggtctctcctctctcctctcgaaagaccccatcagctaagacaaggatccagtcgcatcttaggaaatttgaggctctacttacaagtgttattgctggtttgccatgcacaggaacgctgagaacaccatcgccctggcctcatcgaacgactccagagaggggcccacatctgctcaaccaagaaggagaaagctgaggtcttccaagtgttcctccccaacatcttgggtctgttcccactgactccagtctgaagagggtgatgttccctgctgtctgttctcactttgatcaggaccactgtggactggcgtgtacccacctctttttgtagaaactcatcccaacccctgagcctaatggttaaagttcaacccatgcctttcccaacagggtgggtccacagggattagtggcctctgctggggacaggccactcaggtcactgggctttgatctggcaaacaggagcacaagtctgccagggagctagaaaaactgtacggtggggctgcgtgagcaccaggggattacgcgggaggcgggggcgagtggatgagagcagagtccctgtttctttcatggggttgaccgtgtggtttggggctccgggacactcaataccaggcacaaagccatggtgtgcatgtgaggagggactggcaggcaggctcagaagtacaggaatgggactggccaaagcgctgctgggtagacaggccaggggagcagggagcttctgtccacccaccagggctcctgaagtcatggagtccttgcttgccttaaaataggtgcgatttgattcattcatcctccccggaagcaagatgccctgtggcttcggacacttccaggtcatgcctgctgtcttggcataaacattaacagggccacctttctttctttccttttctttttttttttagacagagtttcacttctgttgcccaggctagagtgcaatggcgtgatctcggctcactgctacctctgcctcccaggttcaagcaattctcctgcctcagcctcctgagtagctgggattacaggcgcccaccaccatgcccagctaattttttgtatttttagtagagatggggtttcaccacgttggccaggctggtgttgaactcctgacctcaggtgatctgcctgcctcggcctcccaaagtgctgggattacaagtgtgagccactacgcccagcctcttttcttcgtttcttttcttttctttctttctttttttgagatggagtctcgctctgttgcccaggctggagtgcaatggcgtgatcctgcctcactgcaacctttgcctcccaggtttaagcaattctcctgtctcagcctcctgagtagctgggattataggcacacaccaccacaacggccaattttttgtatttttagtagagacggggtttcactgtgttccccaagctggtctcgaactcctgagctcaggcaatccacccacctcggcctcctaaagtgctaggattacaggcatgagccactgcgtccagcctcttttcttttctttctttctttctttctttctttctttctttttttttttttttttgaggtgaggtcttgctctgtcacccaaggtggagtgcggtggtgccatcatggctcactgcagtctcaatcacccaggctcaagtgatcctccctcctcagcctcccaagtagctgggactataggtgcatgccattatgtccagctaattttaaaaattatttgtagaggcaggttctcgccatgttgcccaggctggtcttgaactcctgggctcaagcaatcctcccagagtggcctcccaaagtgctcggattacaggcatgagccactgcccctggcctggtacctcccttcatgcccagggtccacatgggtatgttagctggtcactctagccaggcagctggtgatatttgcagacgccaacccacaaagaaccttcctttgggtcctttgagcggcacagcagtttattcacccagacaccttttacctgtgaaatggaacccatgggattgggatgcaccagtttgtgacttcttgttgttgtttaaacttacaatcttttagggggcagggctatcataacttttcatagaatcctggaatcttagatctagaaaaccctacagaacacaggtgttgaaatgcgagtccacttgtaggctcctgaaagcccaagaatcccactgaaatcccccacacaatggatagggtctgcggctttcggccactgctctggtgggcc

SEQ ID NO: 1242671 - DNA, 4001 bp, Homo sapiens
tcctttcagaggtgagcccctgcattggagctgcacagcttggagttccaatcccagctttgccatttcccctttcagcctccatttctttgtctgtgaaatggtctcactaaaactcaccttccagtgctgataggaggcccagagaggtactgtatggaagggaacataacagctacaggctcggggtggctcagagtaataagtctccccaacagggagacctccagacatctgaagtctctgacctgaccccatcagtatctcacctctttctgtgccttgggcaatttggtgttggtgtttgtgataaataacaacaaaaactcacatcaacctagctttgactctgtgacatgtatttgcctctcacaaccaccttgtgaaatagaaaccagcaagatccccatttcacagatgagggaactgagggccactcacacatgtgtgcatgcatatgtactaatataaatacagcatgtgcatgcactgcccccagctgccctcccaatgtgtgtgcctgcaagtccatagagatcttcctatgaacacattaatctttctatgatcttccattgtgcacacagagcagccaggcccagaacattcatgtgtacaaacacacacacagccctgcagactacatctgacacacgcatatgctctctcacacacaaacccctctgttggagacccaagtttgcataaaggaccacagcaaaacacatgcccatgcacacacacacacacacacacacacacacctgcatacacacccacaggcgcccaccacctgcctcccagaggatccatctgcagccgagaggctcagcatctccctggggaacatcctgagatgcagcctatttttagagctactgccggctggtgcttctccccctttttggcttcttaagttttcctgagaaaacagcagcaggtgccgacagagccgtgtccccaatggatgactcagaatcgtggcccggcccctctgggttatttttgaagccctgtgaacactgctgcatgccggcacctctgtcctctgtccttcccttcctcgactggacaatccagctctgcctgggtgatggggtggctgctttgggggagcaggcccatggagcaggctacacaggacactgggtgctcagagctggtgggcatgactagcaagaagagctggaggcaggggactctggctctgggggaagcacccaaaaggtggctcagagcaggtgctgggagaagatgatccctatgggtcctgtccatctgccccatgtctgcctgtctctccctctctgcttgtctatatcatctttttctgaatgtctctttccagctcttgcatacccagatctgggggttctcttccaaaatatgctcctttgttcttggggccccagagggagccaaagactccacagcaccctccctctggtctactgcaactttctggcttcccagactgtggtcccccacccaacctcacaaagtgactgcctctccgcagaggagtggggctgggggatgttcctcccatcattactttttcttctccgcaccccacctgtcttgcactggctccccagggaaatagggaaccccttaccccacacccccacccctgcttggtaagaaatggccccaaagggaattgactgccccagacccacactccagccgtctggctctcaccttctgcctcttctccctttctctgagtcctaaggaaactgaggcaggatgaaggagctctcttccgcgtcagcccaggaggctggtgtgggccacgggctcccacgactcacacccggacgtgcgcaaacaccctgctcggtgtagacacccagacacatgcttgcgcccccaagtgcccccttccctcacgtaccggccgagaaggcagctcggccacttctgcggggaaattctctccgggggacactgcgcccttgccacgcggagccccgctcccccgaggtccccgctcacttgccgtgcgcgctccccgcagacacccgcgcacagcgctccgcggcgcccgccccccgctgccctgggccacccccacgcgctgcgcacgcccggggcgagtgagtgagagtctgggcctgggtctgagcgggctgggcaatcaggggcttcgcggaggaggcggcaggacacagccgccaggtcgcttgctggcggcggggccacccggggcgcagcgcggactttgcgtctggcgcgggggaccaaggcttgggccaagttcgggggccgggatgggaagaggggtcccgcccagcctggagtgtgggagctttccggtctgggaaaccagctgggcaagagggttggggcgagtgcagttgggtcgggggtccgagccagaggcggtgggggaggtctgtgcctaccgtcgtcctggccgtagccccagccgtggtggccggtcatgccgctgccgtccccgcagccgtgcacctgcccggtcggctcggtccgctcgttcgggctgcggctccggccccgctcgctaccgcggagcagcctcttaaagcagcggctggcgggaggagcagttcccgggggacccgccccccaccccccagcagggccagagaggccggcctgccccgccctcgcccgccggcgagccagttgaaccccgagcggagattcagggcaggaggaagtaaccctctccccccaactcccacccctgccctggctgggcgactatccctctttttcccccagcaacccgtgcggactctgggacactagatgcccgtgccgcacatggcgtcccttccctaggcttgccccagacctgcaaatgccaccaccagagacctgagctctgggtcctgaatcttttggggttggaaagtcccctttaaactgcaaactacactgaccatcaagtgtccaaaactggagcttccactgtttgccagaggctgttgcaggcgctggaccaagctttgggtccttcctatggtataaccctctctgttaccctacaaggttgggtgcttccatcagccctatctgacagaggaggggagtgaggcccagagaagtgaagtgacttgcccaaggtcatctagccagggggtaaagggttcattagctggggttcttactccagacactgggggttttgtgggatttgtttgtttgtttgtttgtttgcttgtttgtttttagacagagtcttgctctgtcacccaggctggtgctatatcagctcactgcaacctccacctccttgattcaagtgattcttctgcttcagccttccaagtagctgggattacaggtgtgtgccaccacatccagctaatttttgtgttttttgtagagatgggggtttcaccatgttgcctgggctggtcttgaacttctggcctcaagtaatccacccgccttggcctcccaaagtgttgggattagaggagtgagccaccactcctggcctgacactggggtctttaccatttctccttggtgctgggtacaagggtgtgctgtgagtgtgggggtccgggaaccctggggtagatgcagggacaggaatggcaatgtgaacccttggcccaggtggaaccagatcccccaagggggagtgagaaggagtggcatcaaccaatgggcctgaagacaggcagacaccaggtggcttccccatggagctaagtctgaggctctgacttccaccctccctgttattttgtctactgcttcctcctttcttcagggactctgctttgtccctccatagcctgctgtttgtccctcctctcctgacctccccataaccttcagtacaccccctgggagctcagaccctccaccctgcactcaaccccagtgcctgccttggcccagtattttcccacccacgagccctggtcgttgttgtgccctccacctggtgcgtcctctgtcttccacccactggctccagccggcccaatctgattcatcttagcacgtggcct

SEQ ID NO: 1242672 - DNA, 4001 bp, Homo sapiens
tttctatgatcttccattgtgcacacagagcagccaggcccagaacattcatgtgtacaaacacacacacagccctgcagactacatctgacacacgcatatgctctctcacacacaaacccctctgttggagacccaagtttgcataaaggaccacagcaaaacacatgcccatgcacacacacacacacacacacacacacacctgcatacacacccacaggcgcccaccacctgcctcccagaggatccatctgcagccgagaggctcagcatctccctggggaacatcctgagatgcagcctatttttagagctactgccggctggtgcttctccccctttttggcttcttaagttttcctgagaaaacagcagcaggtgccgacagagccgtgtccccaatggatgactcagaatcgtggcccggcccctctgggttatttttgaagccctgtgaacactgctgcatgccggcacctctgtcctctgtccttcccttcctcgactggacaatccagctctgcctgggtgatggggtggctgctttgggggagcaggcccatggagcaggctacacaggacactgggtgctcagagctggtgggcatgactagcaagaagagctggaggcaggggactctggctctgggggaagcacccaaaaggtggctcagagcaggtgctgggagaagatgatccctatgggtcctgtccatctgccccatgtctgcctgtctctccctctctgcttgtctatatcatctttttctgaatgtctctttccagctcttgcatacccagatctgggggttctcttccaaaatatgctcctttgttcttggggccccagagggagccaaagactccacagcaccctccctctggtctactgcaactttctggcttcccagactgtggtcccccacccaacctcacaaagtgactgcctctccgcagaggagtggggctgggggatgttcctcccatcattactttttcttctccgcaccccacctgtcttgcactggctccccagggaaatagggaaccccttaccccacacccccacccctgcttggtaagaaatggccccaaagggaattgactgccccagacccacactccagccgtctggctctcaccttctgcctcttctccctttctctgagtcctaaggaaactgaggcaggatgaaggagctctcttccgcgtcagcccaggaggctggtgtgggccacgggctcccacgactcacacccggacgtgcgcaaacaccctgctcggtgtagacacccagacacatgcttgcgcccccaagtgcccccttccctcacgtaccggccgagaaggcagctcggccacttctgcggggaaattctctccgggggacactgcgcccttgccacgcggagccccgctcccccgaggtccccgctcacttgccgtgcgcgctccccgcagacacccgcgcacagcgctccgcggcgcccgccccccgctgccctgggccacccccacgcgctgcgcacgcccggggcgagtgagtgagagtctgggcctgggtctgagcgggctgggcaatcaggggcttcgcggaggaggcggcaggacacagccgccaggtcgcttgctggcggcggggccacccggggcgcagcgcggactttgcgtctggcgcgggggaccaaggcttgggccaagttcgggggccgggatgggaagaggggtcccgcccagcctggagtgtgggagctttccggtctgggaaaccagctgggcaagagggttggggcgagtgcagttgggtcgggggtccgagccagaggcggtgggggaggtctgtgcctaccgtcgtcctggccgtagccccagccgtggtggccggtcatgccgctgccgtccccgcagccgtgcacctgcccggtcggctcggtccgctcgttcgggctgcggctccggccccgctcgctaccgcggagcagcctcttaaagcagcggctggcgggaggagcagttcccgggggacccgccccccaccccccagcagggccagagaggccggcctgccccgccctcgcccgccggcgagccagttgaaccccgagcggagattcagggcaggaggaagtaaccctctccccccaactcccacccctgccctggctgggcgactatccctctttttcccccagcaacccgtgcggactctgggacactagatgcccgtgccgcacatggcgtcccttccctaggcttgccccagacctgcaaatgccaccaccagagacctgagctctgggtcctgaatcttttggggttggaaagtcccctttaaactgcaaactacactgaccatcaagtgtccaaaactggagcttccactgtttgccagaggctgttgcaggcgctggaccaagctttgggtccttcctatggtataaccctctctgttaccctacaaggttgggtgcttccatcagccctatctgacagaggaggggagtgaggcccagagaagtgaagtgacttgcccaaggtcatctagccagggggtaaagggttcattagctggggttcttactccagacactgggggttttgtgggatttgtttgtttgtttgtttgtttgcttgtttgtttttagacagagtcttgctctgtcacccaggctggtgctatatcagctcactgcaacctccacctccttgattcaagtgattcttctgcttcagccttccaagtagctgggattacaggtgtgtgccaccacatccagctaatttttgtgttttttgtagagatgggggtttcaccatgttgcctgggctggtcttgaacttctggcctcaagtaatccacccgccttggcctcccaaagtgttgggattagaggagtgagccaccactcctggcctgacactggggtctttaccatttctccttggtgctgggtacaagggtgtgctgtgagtgtgggggtccgggaaccctggggtagatgcagggacaggaatggcaatgtgaacccttggcccaggtggaaccagatcccccaagggggagtgagaaggagtggcatcaaccaatgggcctgaagacaggcagacaccaggtggcttccccatggagctaagtctgaggctctgacttccaccctccctgttattttgtctactgcttcctcctttcttcagggactctgctttgtccctccatagcctgctgtttgtccctcctctcctgacctccccataaccttcagtacaccccctgggagctcagaccctccaccctgcactcaaccccagtgcctgccttggcccagtattttcccacccacgagccctggtcgttgttgtgccctccacctggtgcgtcctctgtcttccacccactggctccagccggcccaatctgattcatcttagcacgtggccttgtgccagggagagggcttgtctctggctagtcctcagcaggcagttttggaaagacaaacagaggggtggatggaaggacagataaatgatcccacccggggtcctgtactcagcaggagtcgaacagccactagtacaatgtctgctgtccagatcttgaatagagacactctttcaggccctgctcttggctgaccttgtacaggaatctgccatcttgtctgcctggctccccttcatctctgtgtctgtctcagtttccctctcccaggccctgaaccccagatcctcagatagagctatggagattaattgataactggttgggtgggccaatgtcagtgactgcccaggcctgcgaagatggccctctctgatccaggagcaggaagggatccttaatataaatatgaccctagggtggggcaggggacttatgacagagataagtagcccccaagaccagatgtgacagagaatccaacactgtcaaggccccaggtctccaagctggaaatggcatctacagatcaagaagacaaaggcatgcttctggg

SEQ ID NO: 1242673 - DNA, 4001 bp, Homo sapiens
ggctgcccccgggaccacagcagcctcctcttcctctacaagcagagatgagtctgactcactcgatgtttggatttgagaaaggagaaacacgggctttatgactttttttgtacagattcctctttcgtgtttaatatttgtacagttaaacacacaaggtagggaagtgtacacaggccgctcctgctgccagcctgtctccccacctccgacgggggacgtctgcgggcagggtctctccacccgtccccaggcccggagcagaagccacggcctggccaccccagctgccggctcagaagggccggtggggagacccggccctgacacaggcaccacgcaaggcccttctcagggcacgcggagacccgcccccaaggccacctgctggggggccccctggacctccgtgtacatcccacaaatgcccctggccctgacccaactctgttctggaaccttctctgcagtctgtgccgctctggccgagagtagaagaggctgcctcttcctctccagccagggaaggggctggggagatgagactcccccttggcagtgccaattgcctccctgccccctacccttcagctgcgcatgacttaagtcagccccgccaccgagttcagccagaaaaagcgagttcacaaccaacgtcaccgcctctctccacggaaaaggccctggcggcgctcacaggccccacgggtctccccacgcactcggaaccaccaggcgccggctgaaaactttgcgcccctgactccagctcctctggcctccccctcccccgcgaggggcctgcctcgggcaggaccttcagacagtgaggggtgggcaagggggaaattcccgtcctggccaacacccttggggccgcgaggagttaggaccttccctccctccccgactcctctcccctccaagcccgcgggggcctcaccgcttcgcttccaccttctccgtccggagccggccctggggaagggagtccggaggcgcccggtggccccccaagcccgccactctcagaaattagagcgcggtcctccagcccctgccctgcacccccgcgcgcccggcccacgccaggtcccaccaacaggggcgcgcgggggcgcatgccgagggagtcccgcgccccgggcccccaccctccccacgccccccgccccccgccccccgccggccgggaaggatatgggttgcagaccagccggaggcaccagctgcgcggccgcgtggtctgaccgaggcagaagaagaccgtggccgccaaggccgggtacgggacgcgctgctcctcgtcggcacccagctccgcgccgcgctcggccgccgggctctcggagggtgacacgccgagctcggacccccgctccgcctcgcgtcccggcgccccggggctctccggggacgcccccaccaacgccgcagggccagggggcggcgcgcccaggggcacccggacctcgtcggcggcccgtgcgccctcggtcatggtggcggccggcagcacctgcagaggacagggggtgacccggggccggtggcgacgcccccgccctgcctcccgcggcgcggagctgcgggaacagccgcggccgccgggatgtctttgtcttttcttattagagacaaacgcgccccccgcccccgcccgccccctccctccctccagcggccccacccccaccccgaggggctccccggcccgcttcgcgcaagttgaagagggtcccgggcgcgcgtcctcgccgcgtctcacctcgctctgctggccggcggcgtccccgcgggcatcgcccgggcggcgcggtcaccgcggaccccgctcggcgcccggccccggccccggcccccagcgcctccgcccccggccccggccccggcccccagcgcctccgcccccggcccgcgtccccagcccgcccggctcccggccgcggctcgactccggctccggctcgcccggcggaggcgacggcggcggcctcggcgcggcgtggaggccgctgagcggacgggtgaggccggggcgcggggcgcggggcgcggggcgcgggccggggaccggtgaggcagcgagcgagcctcgagcccgtccgcgcgcggcgcaggaaacttcgggctgagcggcggggggcggggcggggcggggccggcgcgaccggggcggggccagcgtggccggggcggggccgggggcggggcgggcgggggggtactggggaggatccgcccccggcccgagacgcgcgcgcccgagcgacccctccctgtcgccgcccggcgccccgcccccccccgggtgcgggaagttggaccccgcccgcgccccctccacgcccccgcactgggctccccgcttttcgtgctccccaacaatgccgggcgtggggtgcaccagggggcgctcgcgggaggctccggcggggtgggagggggagcacctacgtccttccctgcccccaactgcgggggcggccgagccgccgatgccgcgcccctccccctcccgctccggctccccctcccccttcgcgctgccgcgcgcgccgccgccgcccccacccccacccccactacgacgcgggcccgggtcggcggaggggcggggaccgggcgggcgtggaaggcgagaggctgcgtgccccttccccgccgcgtgtgtgtcccgggtgtgcccgcgcgcgcgtgtgtgatggggcgcgggggcgggcgggggtgtgctttacggctgggcgctcctgcactcgcatctctccccgacacgcacgggcagtttccgcgaacttgtcctcgtctccggtcccctcccgcgtggggatctgggggaccctggggacggcagcctggtgctcctgcatcctccaaccccgctgcctcagcgagactcacccaggggcccccgaggagaagtgcaggccccttccccctgccagcagctgctccttcagccaggccagcagaagggccttcccctggaccctcagagcaagtggtttggtcgggaaggggtggacccttcagacattggggatggccaggcccttgtcccagggagggctggccgcacctcgaggtgccagcaggtgggggcaggtgcccaggctcctgactccccccagggcacccctccaggctggaagggtggttttgcttctgggaccactgctttgtgcaccagggagcttgagctcccaggtgtgcacctcagcacgcccgccaacaaggggcccctggtagtgggagagaccccttctccctccagacaaagaggccctgctccagggcgcaccctgagaccccagacccggagaggctgtggggcggctgtggcttcccacctgcgggtgagcagcagagaagcaggacctcccccgggtgggccacatcgtgcagggtgaagaagaggccctgcccagctggggcccggaaggacacacagcacctggggtgggccgaggaactggaaggcaggagtgtgggggcctggctggggtacaggtcctttcagcagcacctcctcctgtatacgggaactttcaagaaaaggaaaacattcagtctattttaatgcaactactcagcgatggagggccacagctggtgaattaggccttcaaaggtccaattaaggttccagccacagaggagcaggacctaggagagccccgtgctttggacacatccgtggagggaggctggagcaggtggggagacacaaacgctgaatcggagtccggtccagagggcacttggaacctctgatctttttatcaacaccctgctcgttaaaagttagggtgggccaggtgcagtggctcacgcctgtaatcccagcactttgggaggccgaggtgtgtggatcacttgaggtcaggagttcgagaccagcctgaccaacatggtgaaatcccgtctctactaaaatacaaaaattagccaggcatggtgacatatgcctgtaatccccgctactcgggatgctgagg

SEQ ID NO: 1242674 - DNA, 4001 bp, Homo sapiens
taccctgttactgattggcagtggaagttcatgacaatatctagttagagcaaactcaggagaaactgataagtctatgttgagaaataatgaaatagctcagaatgtgccagaccgggtcaggatctctctctctctctctctctctctctctctctctctctctctctctctctctctctctcccccctcacttctttcctcttgtcccttctcctcccttccctccccctcccttcgaaatccaatttaagcagggttaaagaccccatctcaagccagagatccaagcagttgacaatatgcctagggattttggatttgaagacttttctaaactgcagaagctgcctagagtgtgacaaaaatctcatctcatgaagcttatactaaaaacaatcaacaagacccaacccctttaacccacatggcgtcagtcttgctgttaacagagtctgggcacctgcacattctcagcaataatttgaacttctcttctttccttatcaccatttccatctcctccaaacacccaccagaatatcagaactggattattcagagctattgagaggaaattgtaaataccttctaggcagcaggtcctccacagccccgaatgggtcattacttcttcattcttcctgctggtttcattatcacttgtagatttagtcctgcacacacctctggaatataaccagtagtccgtgcccactgcaatggtcattaaactaaaagcggcaaaggctcctacagtggtgatcaacatctggatacctctgtcacacatcctcataattcttcatggtactctggacggctgggggttggagggggagagtcagtgccggaggggaaaatcactctgcagccgggtaacctagtacaggctcttccaaaaattcaggtctccttttgtcagcatccacagggactttgggaaagctgggatttcctttctggagctctctccagttccctgggtcgcctatggccctcggaagggtgcaggctccggggggttggtccgcatcactgctgccttctgagggtccctgggttcctttcattcctcaggagcgtggtaaagacgagggtccgtgcagggcatggctccggagcctggagctgccagctcggtttgagatgcgcctggcttctcacagccccgggagactcaaggcaaagaaacccagagaggtctctgtgtgagtgtgtgtgtgtgtgtgtgtgcgtgcgtgcgtgtgtgtgcgagcgcgtgtgctgggggtgagggcggatggcaaaaaatagcactgctgggaggcgagccgctgagaagagtgttcactgcttccacagcctcgcaggaaagctctccgcctgctcccgacacccccgctcaaactggagaaaagacagagtcctggggcgggggccggctggtttccctgggggcgccaaggtccgtggtgctgaagggacagctccccgcctgttgccccgcctccgtcgtcttaacgcctaggctttaaggtccgtggtgccgaagggacagctccctcatgcagctgcacaccgccgcccgggctagaaacccggggtgctaaagggtctttcttccctcaccccgcccttcccccgttccttcccgggtcagccagccggctcggctctgcccagtcaagcccactctccgcgcaaagtttctggagccgaggacagtcagcgccctggctcctgggcgctgcagcacgacccggttcctccgctctaggaagggttaaggaaaggggaaggggagcgaagcccgtagcgcactctggcgctccctcagcacccacccaacgcggcattcttcaatcctccctttcaccccatgagccaggcaagtttgccttttgctgcgggcaccactggagcccattggggaaaaagaagacccgaaagaccgagtcttcttaaaggcaccggcagctctggagacggctctatggctcgcttaggcgggcaaaaagtgttgtcacaatcacatctgtgtagagtctgtctcaatttggttccccagcaaacaaaccaatatgtctaccctcctttctctggagctctggtttacaccgaagacaacccgctcagatcagacccggaactgttcatatatacatgatcatgtattcctaaaagatggaagaagctaaatatacatagactctgtcatacacatattagggaccttgggcaaaagactataagattttggcctttgaatatgccttttatacattttaacatatctacatcgaagggggtgatggattcatggtgggagagtcactgaaaatgtcagattttgttcaaaggtctctgagatatcatttgttaacattgttatctaagtgagaccatgaagcaggtgaagttaggtctgctttgcttgttagtccaaagggcaaatggcattgcacacctgaaagctctcttccttggaaatagccagtattgcaaaggaccagcatttaaccagctttttattactatgtattccggcatatgcatgggcacacaccgagttgactagaaacagcccacagaaatgcccttattattttttttcttatggcatcctgggactgatatccagaggtcagatagttggaaatgaggttgcttgggttgtttccacagttcctgagatgtgtccgcaaccaactgtcatgtttgaatgttatttagctggacagaaatataacgggaggtaatcgcagacaaacatactcccctggtgccatctctggctgcctgggaacttctattcaggtgactgggtagcaggaatatattgaagggttcgcaaatgcagctcacaacttcttggtgactttgctactttcattttggtgttaagactgaagactttattcttggtgttagataaatactcatgtgcaggaggaagtttgaatatatagctgtggagtgattgtgtttgaatgctcacctgtgctatgttcagtttagttataaattctgaatgcctgtgaatccgtcatagaagtaaagcaagtatgtaaatgtatgtttgtacctgcagacagtgttatggaccatgtgaacatatttgctgcaaatgcctagcatttttgctatgcatatgcatacatatttgcacatgtatgtgtatgcatgcacgtgtgtaggtatagtatagatttgaatatgtaggtgtgtatacctatgagcatttagttgcatatgcatgtgtcgtggttcaaaaacactgatttatggacaggaggtagaaatactgaaatcttgccacataatccacaatggaatggataaacttggggccagcaccacagccgtactccagaagaatgacagaagatagtagggagaggatacacgagggcccctacaagtttcttagtgtcattttctttcctgaaatgaaaatttgcatcttaataaaaatatcctgccttgattgttattacctttcttttttaagggaaagccatatgtaacatggaggtgaggttggtatttcttgggagggattaattcagttagcaaaaatttctctccccactctcagaaaggtaaataagatgaaataattactaatgatcaaagcagtcatttcaggatctgtttgattcttctcttgcttggatagaagtgagaaaggtcttctttcaaagaaggaccatgttgatgaaaggtgagtgagcttcgggctaagggacagtatgccccaatctctccatttaccagacccacagtggaacagcagcatcttcatctccacccacttagctctacaacagaagcgcagacaagcagagtatggtgcccaggagcctagcagaaggatagttgggggaaaaggatcaggagctcaggtagatgaaggtaacaattatgggtcaggatgcacccagttttgctgaataagagaaagggatacatgtgataaaactggagctttgtcctgagcctctgacttggtgaggcag

SEQ ID NO: 1242675 - DNA, 4001 bp, Homo sapiens
acgtaaggatctgcgtggttatggacagtgctcttgcttgtccctctgagaatgggggaaagtagaactatagagtcctctgtttatagctgactcatctaccaggaagccagtggtgtaaccttggctgcttggtaactttccttgaatcatgcaagtctggtgcagataaactggcaggagcctccttagggaatgtgcatgtcatctggaatactaaaaggctgcacttctcttaggagagcactttgtaccaagggaattttatggcaggagctggggattggaaacacaatccctccttagccccattttacagatttaacaatctacccacttccatcagtaattcataggcagatcacagtcctaactcaggtattcaaatgcctagtcccctacccctctagctttctcagttggctccaaggaaacaaaatttcacccattagcatccccagacattaacccctgcctccccatagcactctgggcagaggatctctgcccagccacctccacaccctgccaaggcgaggaagggaggagggaagaatggagtgaggcacacctgatgcccctctgttttccatcccccttgctctcagaccccaggataaactccctgtcatcccacacagatctgggacaggggcctgaatgacaggtgtcagagcccacaaggctgagcctggccccctggggggctgtgcagtgcagtggttaagaacttgtcttctggagacagcatctgtcttagcctttcccgttggcctccctttggggtcagcccctccaggagccattagctacccgaggggagggtagctacagacaccacaaaatgtctgagatgccaggatattttggatgctcatcttagccaggtctgtgcgtagagagggaaatcagatcacttattttttcggagtaacagaaacagagtctctagtgatatcaaaagcctctaaaggaggaccaccctttatgcctgagtcagaccaccacagacacttggaatcccagtgctgggggctacctccaaaggtcatttggtctggcccttgctttttgggtgagtcagtgtcaagaccacacagagcagagggttagtcactgaggcacttagggtggtgcctccccctacccagagatgaagtcaccaagagtacccaggattatcactatgagggaacaggtctgggactggcaccccaacgctgcccgccaccacacccactgctgctgtattgggaaacctacatgcccacggcggctggaaaatggacaaaggaagcaggggggtgttcagggcccccaatgccattttccactcctgctcccagccaatcaagctggggaggccacgtttcccttcaggatcccctaatttatcccagcctccagcagggtaagggggctaacctagcattcaacaaaaggggaagaggaggaaagaaatgagtggtcttctgagacctgtggctggagcagctgaaggcaggggaggtgggggagatggcagggggaacctggaggccttcccagcccaggccacctctctgagaaagctcccacttgctcagaataaaggtgcaaatgcgggtgggctctgggtcatctatgttagggaagaaagttactgacagttgtgcccagagcagccggatgtctcccaaacccgggaccactaccccagcaggctctgcgaccagaccacctcctgagggcaaacgtacacctgcccgcattcagcgccgccccctgcccccttcaccgcaggtcccctgggtgccaatgggcacagaagttgggagctttactgaccgtctgcgtcaaagtgcttccatatttccaggaactgggacgccgtcagctcggccaggtgcaggtaagggggctgctgctgcgggccagccatggcgagccgctcggagacctcagcctgcaccgctcccgctccgcgccggctgggctctggcactcgcgctggggttgtgcgccacgctgcccttatatacgctctggagcctgcgcctgcgcccggccgccagaagggggcgcgcgcgctcagggaatccgaccggggcgcggcgcggcgggggcggcggcgcgagaggctcggcccggactcctagagggcccttacctctgcgctgagacccctcggcgcggggccagggacacccggaggattttcggtgaaaatgagggagaggctgcccttgccttccctcccgaccgtcttgagtacatccaccacttattattgctggcagtagcaataataataacagcagtaacaacactaatagtaatactaacacaaacttgacaaatatttagcactcgggcttcggagttcactaggtctctgtcgtgcctcctctcttctgatccttccacagcaggaagagctgggaccacttttctgatgaggtacttgtgacttcagatgattaagtgactggcccagcaaattagtggcagggctacaatttgaactcagcactctttccacgccgcacgtggctccttcatggggctcagtcttgcagagcagccaagagttctcaaggctttagtggggagcagctggaatcagcagtgccccgggaggattccgatggaagtggtgtggggtgggggtggggggcttccactgtctgtttgggtcttcgtatatccgtcccctcggagcctccctccacccctggtacctgcctcacgctggccatgctctggggggcttttagacatttggccagggggtggcagaactagatcaacccgtaccaggtcttaaccacgcccacctagggacatcgtgggaatgtgcctgctccagtggacagagaacaacgtccaactctgtcttggggatgttctgagctggtctcagagaaaatagacgcagctactgagcgcacatcctgagggcagcagacaggactccccagcagggagctgggccctctccccattctctcctgcggtctgagcccttaggggtctgtcctggccttgtggtgtggtaaggtaagacacattacccacagagtgacagcatcatccctcctttctcccctctcctgctacggagtgactgagacatgaattggcgatctttaacatgtgctaatgagtgttagctgaaccaccttccaagaggagagtgaaaggcaaggaggtaagtgagaatgaaaaggaggtcgctgggggagaggggaacccaggaggagacagagagagggttgtcccttggagagagggccaagcccagagcgagtctcaaaggggcaatagagaatgcaggttccaaaaccacttgttctttgcctagggtgaatgtgtttagagttacttgcaggaacagactggggggagaagtcatcaaaagctagctttagaggtacccatccaccttgctgagagattcaccaaagtccctagggaggcaggatgactcagtggttaagagtaggcactcaagaatcaggctgcttgggtgtgaatcccagaataagctgtgtgaccttgagcaaattatataacctgtctctgcctcagtttttctcttctgcaaaatgggcatgtgggcatacgccttttagaattgttggctgggtgccgtggctcatgcctgtaatcctagcactttgggaggccgaggtgggcagatcacgaggttaagagattgagatcatcctggccaacatggtgaaacccagtctctactaaaaaaaaaaaaaaaaaaaaaaaaaaaaaaattagccaggcgtggcggtgcatgcttgtaatcccagctacttgggaggctgaggcaggagaatcgcttgaacccgggaggcggaaaggttgcagtgagccaagatcgcaccactgcaccccagcctgggcgacagagcgagactctgtctctaataatagtaataataataataatataattgttctgaggattaaatgagttagggctcctgccgcccttcatggagcca

SEQ ID NO: 1242676 - DNA, 4001 bp, Homo sapiens
tcctgtcatttcagcctcacggtccagggccgagtggccacccaggacagacacagacctgacaagtcaccagccttcctgggtttctgtcactgtttttcaaagaccccaagctgttttgtttaatgatgtcgtcctccttctcagcacctgtccacgcctgttgccatgagtagaggcatcacaccgcgggccagagggctggaccaggggcaactcggccaccaacggccgagttcttcactgagcggctcaggcccatgaacaacacctgtggttccggaggattttccgggcagcagaatccttccctccaattgcctcgtgtgaactggtggaaccagcaggagggagagaccaggcgctcagcctccctcggcccctcccctgccatgaacagctgtctccagcttcggttcctcacctgtggcactggggttaccggagtgctgcccaaggccagggcaagaagcaagtgaggggtgcccggagagagagccagcagggcttgaggctgtcacacagatgcagcattacaggggaccagccacttcctgctctcagagaccacggtctgtggaggcccagacaagaggccctgcgcagttatgcagttactgagcctcgggctctcctggggactcagaggtcactggctcctctgccaatcaaggagctctggagagcctcagacacagacagaagcaggaaaaagaggggtgctcctcccgcaagcagaaggacctcggaggaggcaaggcacacccaacccaaggccaggccaagctggtttcctgcaggacctgcctcccccagacaggccagaaaaacaatttctcttgccccacttcacagttgagaagtcactcagaaccggaagggagaatcacccctatatccttgcccagccccagactctggaaacgcggaggcaattacggggcactcccacactgaactgtgactcacgtttccgcacccctcagacctgggcagaggaagagatccgggtttcccgaaggagaagcacacaactcttcagcacccaacggagtcccagtcttccccactggccccacacacccaggcctggcctcaggttctgggcctcaccattgctttccgggtcttgttacctgcagtccggtaacaaactccagagcagtaagggggccccgagagctcgcccggccagggccagctgaccacacaagagttcccccggtcaggactagaggggccccttctgcagccagcgggaggacagcagatttgcaacttcccagctggtgccgcagcagccccagaggaacacggaagagaacactggcatggctggcacagacggggctcccgccagcccctccacgccaggtggccgcccccaggccgttccccaagtgaggggagtgatgcccgcaccaagcacaacatccctaaggcggccaggaccgcacgatgggcccggatataagggcactcaagggcaggcagggccgaggccgcctccggtgtgcgcggcccccggggctggcctcaagtgacccacatggcccaggtccctgccgacttcccgccttcctctgggttcctctgcgaagcatcgcccagccctggcccccaccagcctggaggcgccagcgggcggcgggctgaccccactccgggggccctgccgtccctgccctggctcggagcccggcgcgcccggcccccgaggcctcctgcgccccgccgagcccgcgctccccgccgccctccgggcccgcgctccccgcccggggtccccggctgggcgcccggccgggcccggccgacgggactcacctccacagcccggcggcgccgcctcgtcctcgcggcccgggcagcgcggccccggcccccgggcccgctcgcccccgccggccgatccacaacttctgcctccggagagcggcggggcccctctcgccgccggccgcgctgcccggacggcctcccgctcctcagccgcggggcgccccgacccggctccggccccggcccctgcccgcgtccggcgcccgccttacgctgccttcgtagcgtagcgcccggcccgggccccgcggctacggcgcgcccggggcgcacgcggcgctgtgaatcgcgcgcccggactacggctcccacagggctgcgcggcgccgacggggcggaagctcggggcggtgcctgcgcgaggcaggccgggagttgtagtcctcgggtggcgccctcccagtccgccgaccgcccgggccacttctcctgccctcgctgctggagacggccgggcccgaggcctcggtccccgggaggcgccgcgctccaggattatcagggagtggggcggcccgaggaggagctggaactacaactcccagagggccttgcgaggggcacggaggggcggggcctgcagccgcggcgtctgcgcatcagcggcgtcacagacgcgtggggctcgcggggagccgggctggggccgtccgtgtcccgcggggctctgggcggccgctcgaccgaggacccacgactccgccccgaccccgccgtgttcgcgagacccggagaccccttcgcgccttccaggaccgcccctttcgcgacgctgcgtgctgtgcttggtcctggcggccaagagcggcggtggcaaggggaccgccctggcccgagacgcggcctggcctcgcagcgtcgcttgggcacagcctctctaggccccttcgtcctcggtcgcggagggacgccattaaacggccacgccgggctcaactgggacgcggcccacggcgcccaaccagggcctgggggagggaagccggggcgactcctgggtccttccaggacccttgcgcaggcctcattctctccccggaggtccccttcccgctgccctgaggccactctcctgccagcagctgctgggccggctctcgggagaatgccttggcgtcaagcttatcaggctgcagggcgggacgcgagtgctgagggcagccagactcccgctcttaggtgcacttgaggagcctgagaaggcagtggctctgcgggagagggagacacaggagcagggctggtccgccgagattccggagagacggttgtgggccgattctgtggcgagatttacaagtgggaggttgggtgacgattgctcctgggccagaaaatctaagccagtctcagcaagacctacaaggccagggccagtgctcctcagaggatattcatgctccaggaaagccaaggatgggcctccgtcatgctgagatgccgcagcagggacacctgtgtcccacgtggagctcggcttctagctgcagtcagtgcagaagctggcaggaggggtttatttctgtcctcggaagcttttggtaaggacacttcattcctgtgtcttggacacctccccctaggtctgctgccccctctgtggagacaggcagggcagctggatgtgccgtttgttcccagactatatccatgccaaagcatcccaagggcaggaaatgtgtccccgggggccagtgggggtctgggggcacagagggctgcagagtgagagctggctctcctctctgcaacttggacaaggctctgggaccctgtcctccccagcttcctcacctgcatggcaggatactggccaagtgtggctttcgaaccacaggagagggtgcagtcaaggcctcactcagggaccgcaggttctcttcccttcccagtccttccctggcactgcctaggtggctccctggccaggggccagtggtctagccagcaggccttataacctccccaccagagaggcagctgcagttgaacctgttgatctgatgctgagggccctgccagctcactgcagagtggccagttctggccagttttgctaggccaggcccatttggggtgaggagagggtgggagcaccccagctctccccagtagcctgtcatggtgaaggaggaagcccattcacccagaagagggcc

SEQ ID NO: 1242677 - DNA, 4001 bp, Homo sapiens
caaggctgtcaaccttggctgatcattagaatcacttggggagctttaaacatattcatctctgggccccacctctaaaaagtcttatttaacatatttggagactcaagtattagtattcctaaagagctctcccagtgattccaaattgcagccagggctgagaataattgcaatagtcagcaatatgtgttctctatattggtttacattccatttaactgattactgttcatgtgtttttctttttttgtttttctttgtttgctgcttatttcctgcctgtagttttcaaagatgaacaaaagaattttccttgctctaaggcaggacaagacacgacaagagctggctaacgtcaacagggcatgcctgattttgtatgaagtacgtgtaagagcaaacattttgattcattaaggcagctagagacatttttgaactatgagcatattgttttattcctcaatgtctttgactctctttacaaatgtatcaaaacaaaattgctagtgcttttttttactaaagaaacagaattaaagaactttagaattttagatagtagctccatcatttaaaaaaatgctacccttatataaaactgcttaatttcattgtctgaacctgtttctttatggttaaataagtttcctaaaaagcacttttcatttttttacataatgggaaaaccaggtataaaattacaagaaaaacagattttgaacctctctcctcaactttttaaaatggaaaatgtatctcctgagggctttcttgatttattctaggattaaaaaaattcattcttaacaacaataacaacaataataaagttcctactccttggaatttattcactaaataagcaacaccttttaaaatctactccattagaactctaccccacaacctccccaccatatatatgcaagtccatataaatccaaatctcaaaaagctgatatacaaaccactcagaacatttttcgtgaaatatctgttttaattcagcagtaaaaggcagcacatgatcagaaatatgtagggttgtgaaagagcttgccaggaaatgagagctgttgcacagggtatcagcaactgtgtacagcttggcaaggttttcagtcctgtcctccagggaggatcttgacttctcagttcccacttcaggaatacatggtcaactgcagccattctttgatagacacttgaatcaggccatctctatctctatccagagacttgaaggcacgaaacatggcatccaggcggaccaagcagctgatgaaattgttaaaatccatatctccatcttcattagcataccggcggacaatcatttggtaaagttgttcatttagctggaagcctgcggcctgcagagctccccgcagctgagaacttcccagagacccagaatggtccctgtcatactgcttataaacacactgccatttcttgatgttgttccacagatacttaaattcttcaaagcccagcttaccagtcgtgtcactgtccatgacagacacaatgctccggcaggtgtcaagactaaaaccgtcagtcttaagatctttgtgcttagaaaggactttgttgagaatattcatcagatcagtggcacccacctccatgtctggtccagccagctgtgtaaattgttgccgaaatcgcctaacttcctcactttctgaggcctccacactggtgaaatgctgctgagtgggaggcggttctggagtatactgagctgctgcagcctcactgataaaattcacaattcctccaactatccctccaatatttcttcctcctccttctcttctctgaccacctcctccaaagaggcctccaagagcttctccaagacctcgatctgctccttccaatagagcctttgcaagaaacatgctttcagtttaacaagcaaatgcggcagcaatcttagagatggtatgaaaaaagatgaaatggagttcaagtagtttacatgtggaagaactggcttttctttacctgcttacactgcaccacgccccatgatgtgatgtttcacatcctactgaagatacctgagttccatgaggtcctagcacctgccatattttacaaggcctcaataaaattgttttcactcttccagatacttataaattatagtatgtaggacaccttaggataatagttttaaagaaaaaatattaaagtatgcatttttatgtcattgatttcttagtcctctgtctcagcacctaaaaaatgatgtgcattttcctaacaggaaaaaggtaaatgatgcaaggaaatcaaaaatttattctctaagaaatatttattgttagaatagaattgaagaaatcttgggcattggaagaatatttaatcctcttcctttagcaaagattctcaaaatccagtagtcttaagaaaaatttagaagggagatttttaaaatgcaaggtcctgaatttccactcccagagattctgattccatagggctgctgtggtgtctgtgatcgacattgctaaaatcttttttgaaatgtaacattcatgtaaaaaatgtatcatataaatcacaaatggatagctcaaagaatttcacagactgcacacatctcagaggcctcttcatacttctttctagttacttccgtcttccaaggataaccactgtcctgacatctaacaccatagatttatttttgcaccttaaataaattaaatcagacagtacagactctttcatttattcctttttcattataaaaatgttaaatgttttaaaattgtgataaaatacacatgccataaaatatactattttaaccatttttaagtatagagttcagtggcattaagtatatttgcattgtgaaaccatcaccaccagctatcttcagaacttttttcatctggcaaaactgaaactgtacccattaaagaataactcccattctccccttcccccacccctggtaaccatctctctattttctagctctatgatttgactactctgcatgccttatataagtggaatcatacagtatttgttcttttgtgacttgcttatttcaatgagcataatttcttcaagattcatccatgttgtatcatgtgtcagaattcccttcctttctaatgatgaataatattgtattgcattaatatactcattttgtttttccattatcccattggtgaatacttgggttgcccttttggctattgggaataatgctgctatgaacatgggtatacaaatatttgtttgagtctttgctttcaattcttttgggtatataccaagaagtggaattgctgaatcatatgataattctatttttatctttttaaggaactaccatacgcttttccttattgactgtaccacttacatccccaccagcaatacacaagagttccaattactccatatgcttgcaaacacttgttattttctcttttgttttgttttctaataatagccatcctaatggctgtaaagtggtataacattgtagttttgatttgcattaccctaatgattaatgatgttgagcatcttttaatgtattaatacttactgaccaaagaagatctttggaaaaatgtctatttaaatcttttggccattttaaaatctggttatttgttgggtttcttgttgttgagttgcaggagttctttaaatattctagatattaatcccttatcagatatataatttgtaaatattttctttcattctgtaggttacctttccactctgttgttagtgtcctttgatgcacaaaagtttaaaatttgtatgtggtcatatttatctatttttctttggctgcctgtgcttttggcgtaatattcaagaaatcattgagaaatccagtgtcatgaagcttttcctctgttttcactgaagagttttatagtttcagctcttatgtttagatctttgatccattttgagttaacttttgtatatgtgta

SEQ ID NO: 1242678 - DNA, 4001 bp, Homo sapiens
tagcagagtagcgaagttaccttagtgcacctgggttcctcctttgtaaacagacagagacactgagctgacccatcccagtctccagcgcagctgagccccagcctgggagaactgccggcacgtgggccgagaggcggggcgggtcagctgagcccagatagaagggtccctggaagcgatagaggccgagaacgagccagaggttgacgcagcagcgtcaggctggcctagccacattcccctccattgttccggggagagcggggggtctggcgagggaggagcagagagagaggagggggagggacacgaagggatgggggttggagtgtccagggggagggacgggaggcaaaggggagggggcagccaggccggagtcagccctccgctggctaaggacctgaagccaacagtcacagagaagtgcaaacaggcgggcagggaaggtgcagcccggcgcctacgtctgcccagagccccctcccaggccccgccaagctgggaatagctcttccgccctcaggagcccctgagtgctgggaagaggccggaaacccgaggagtgtaccgggaacccaagggggcctccaacattgccattgcctgtgcccccattagcacccctggacggcctcgaccggacgggcgaccccacccagcagggagacggtcaccccaccgccaccacccacctgggaccctgcgcccgccccagttctcagcctggactgcccctcctgcgggaagcccaagccctccttctcaacaagaaccctactctacacgcctcccccactcaatccctccatccttccctccattctcggggggctttggctcagacctgagattgagccctgactggtccccactccctctgtgacccctgccaggcgatttcaccgccccacccgagtttcctcatctgtcaaaggggacaggagcggtgctgcgtcgcagggctcggacgctgtgcagatggtgccgcgaaaatgccaagcgcacggcgggctcagtccacaatagtgcggctgatggtggaagtgtcaggcacgggcccatctgaaatcaccttccctcccattcctgcccctgctgatggaacacaaaccaaatgcgctggctttgccactcggtggaacaaagaccgatcccctacctaggggacccaccgtcaaccaccctcaaccccaccccatggccccacgccaggcctagctcagctcattgaaaacatctactcccagccgggctctgcgcctctttcttgccctgaagggaccagcatcgagaactcacggtcatcaccgaggccacccagggagtgcagagggcggtggggtctccaaggaggaccccgagcccagaggagggccaaaggcccgaagggagggagaacagaggcagagagaggctggagaaggtagtggcggaagataacaggaagccctgctgagaagttggggacttagacgacaatgggacttcggtggacgattttcagcgtggggtagatctaagcggattgtttttctaagttccctctggcttcagagtggcagcaaatgacaggggcaagcaagactgggcacagagagactgagaaatatcaaaacagcaagttaaaaaacagtagcttacgtgtctcccggcacggggctagctgcctccttttactctcacacaccctctcatgccagaagaagtcagagcccagtctgcagatggggaaactgaggctccgagaggcctcctatttggcagagatttccccacctattaagacccaaggccctgcctggagcgggacgtctccgcctcccccagcacacacatccactccaaccccagaaaaccatagggccggaggcttcctttttaaaaatcaaaaaagaacatttcacttccggcctgcaaacctgaaccgccagcgcagcctgcggaaagggggcctgtgggcgcgggtgaagtttttctccagcgcctaaggcacccccacccccatccgggcgcaaacacccgggcccagcgcgcccggcggctcctcctcccccagatgcggctaatcgcgcggcgccaggacggctccccacctcccccgccgggcctggccgccgtcccaacctcgagccacagctggcgcggccaggcccggcggggggtggctctgcttcccgcgtgcgacgccccccgcgcctcgccccaccgcccggcgagtcccccgtccagggctcccgcccaaaggcaaaagcagcggggagggcgggaagagcttcccctgcacgcagagaacaggtggccaggcgggaagtactacccgacgtccgcctagaatccttgccgctgttgccacacccaccccttcccctggggaggagcaacccgcgttccccaaacaggccccgagaaacccagcccggagccctcctctgccgagctagaagaccctgcaggatgggggacgatggaggcagaggaggccgaggccccacccctgcggctcccggggccgcgggccaggggcgcctatcctggggtccccgagaagagctccctaccctgcaatccgttctgctccgccagccgcttcgctccgactgagagcgcggagctggggagggggcgtggcccgagggggggtggggcgccgatccccgcccccaggagctcccggccaatggggctgcgggagggagcccgggacggtgggggcgggcggggcgggagtggcccggacaggacctttgtgtccgcgccttagactggcgggagagcggaacgcagagcgcgggacgtaggggccggggcggggcggggcggggcggagctgggctgcacccaccagcagaaaacgcccctgcaaagtgggggaactgtgtccctgcgcccgtgcagttccttcccctcgccacgcgcgccaggtgcggctcccacctgcctttggctctaaaatctgtataatcccggagggtgtcacttttagcagaaaggaaataaaggaatgaaaagagagacggaagaaaacaagcaaaaaacagaaaggaggaaaagggaaagaaaaaatacacacgcacacacacaccagaaaaacagggttttgttttctcgttggggattttgattttgttctcttctcttgtttcatttctagccttccttgagtcctctgtttttggaggtaaaaaatgttacctctgttttgcaggagaggaaactgaggcacagagaggcgaccagcccatgggcacggccagtcgagagcagcccctgaaggcgagcctagatcccgggaccagggtcagcttggtatttgaggggcgcggggaaggagagaggtccccggagctcgcccgggacaacagggcccccggaggcggcggtgaggactgtgcctgcctcactctgcagcccctattggggccactggggaaaaggcccagcagcgaaaccaactagtccaagccaggcaaggaaccgtcctagacggctggtgggaacaaccgcgcagctgctgtggaaaaagcccggcggttcctcaaaccacgagccctggagtctccataaaacccatcaactccactcctaggtgtctgcgcgcccaagagaaataaaaatgtttgtccacacaaaaatttacttgaggccgggtgcggtggctcacgcctgtaattccagctctttgggaggccgaggcaggaggatcacttgagctcaggagttggagaccagcctggccaacatggcgaaaccccgtgtctatgaaaaatacaaaaatttgccgggcttggtggcgggtgcctgtaatcccagttacttgggagactgaggcaggagaatcacttgaacccgggaggtggaggttgcagtgagccaggatcatgccactgcactccagcctgggcgacagcgagtctccgtctcgggggggaaaaaaagttaaaaataaataaataggccgggcgcggtggctcacgcctgtaatcccagcactttgg

SEQ ID NO: 1242679 - DNA, 4001 bp, Homo sapiens
gtgcccccattagcacccctggacggcctcgaccggacgggcgaccccacccagcagggagacggtcaccccaccgccaccacccacctgggaccctgcgcccgccccagttctcagcctggactgcccctcctgcgggaagcccaagccctccttctcaacaagaaccctactctacacgcctcccccactcaatccctccatccttccctccattctcggggggctttggctcagacctgagattgagccctgactggtccccactccctctgtgacccctgccaggcgatttcaccgccccacccgagtttcctcatctgtcaaaggggacaggagcggtgctgcgtcgcagggctcggacgctgtgcagatggtgccgcgaaaatgccaagcgcacggcgggctcagtccacaatagtgcggctgatggtggaagtgtcaggcacgggcccatctgaaatcaccttccctcccattcctgcccctgctgatggaacacaaaccaaatgcgctggctttgccactcggtggaacaaagaccgatcccctacctaggggacccaccgtcaaccaccctcaaccccaccccatggccccacgccaggcctagctcagctcattgaaaacatctactcccagccgggctctgcgcctctttcttgccctgaagggaccagcatcgagaactcacggtcatcaccgaggccacccagggagtgcagagggcggtggggtctccaaggaggaccccgagcccagaggagggccaaaggcccgaagggagggagaacagaggcagagagaggctggagaaggtagtggcggaagataacaggaagccctgctgagaagttggggacttagacgacaatgggacttcggtggacgattttcagcgtggggtagatctaagcggattgtttttctaagttccctctggcttcagagtggcagcaaatgacaggggcaagcaagactgggcacagagagactgagaaatatcaaaacagcaagttaaaaaacagtagcttacgtgtctcccggcacggggctagctgcctccttttactctcacacaccctctcatgccagaagaagtcagagcccagtctgcagatggggaaactgaggctccgagaggcctcctatttggcagagatttccccacctattaagacccaaggccctgcctggagcgggacgtctccgcctcccccagcacacacatccactccaaccccagaaaaccatagggccggaggcttcctttttaaaaatcaaaaaagaacatttcacttccggcctgcaaacctgaaccgccagcgcagcctgcggaaagggggcctgtgggcgcgggtgaagtttttctccagcgcctaaggcacccccacccccatccgggcgcaaacacccgggcccagcgcgcccggcggctcctcctcccccagatgcggctaatcgcgcggcgccaggacggctccccacctcccccgccgggcctggccgccgtcccaacctcgagccacagctggcgcggccaggcccggcggggggtggctctgcttcccgcgtgcgacgccccccgcgcctcgccccaccgcccggcgagtcccccgtccagggctcccgcccaaaggcaaaagcagcggggagggcgggaagagcttcccctgcacgcagagaacaggtggccaggcgggaagtactacccgacgtccgcctagaatccttgccgctgttgccacacccaccccttcccctggggaggagcaacccgcgttccccaaacaggccccgagaaacccagcccggagccctcctctgccgagctagaagaccctgcaggatgggggacgatggaggcagaggaggccgaggccccacccctgcggctcccggggccgcgggccaggggcgcctatcctggggtccccgagaagagctccctaccctgcaatccgttctgctccgccagccgcttcgctccgactgagagcgcggagctggggagggggcgtggcccgagggggggtggggcgccgatccccgcccccaggagctcccggccaatggggctgcgggagggagcccgggacggtgggggcgggcggggcgggagtggcccggacaggacctttgtgtccgcgccttagactggcgggagagcggaacgcagagcgcgggacgtaggggccggggcggggcggggcggggcggagctgggctgcacccaccagcagaaaacgcccctgcaaagtgggggaactgtgtccctgcgcccgtgcagttccttcccctcgccacgcgcgccaggtgcggctcccacctgcctttggctctaaaatctgtataatcccggagggtgtcacttttagcagaaaggaaataaaggaatgaaaagagagacggaagaaaacaagcaaaaaacagaaaggaggaaaagggaaagaaaaaatacacacgcacacacacaccagaaaaacagggttttgttttctcgttggggattttgattttgttctcttctcttgtttcatttctagccttccttgagtcctctgtttttggaggtaaaaaatgttacctctgttttgcaggagaggaaactgaggcacagagaggcgaccagcccatgggcacggccagtcgagagcagcccctgaaggcgagcctagatcccgggaccagggtcagcttggtatttgaggggcgcggggaaggagagaggtccccggagctcgcccgggacaacagggcccccggaggcggcggtgaggactgtgcctgcctcactctgcagcccctattggggccactggggaaaaggcccagcagcgaaaccaactagtccaagccaggcaaggaaccgtcctagacggctggtgggaacaaccgcgcagctgctgtggaaaaagcccggcggttcctcaaaccacgagccctggagtctccataaaacccatcaactccactcctaggtgtctgcgcgcccaagagaaataaaaatgtttgtccacacaaaaatttacttgaggccgggtgcggtggctcacgcctgtaattccagctctttgggaggccgaggcaggaggatcacttgagctcaggagttggagaccagcctggccaacatggcgaaaccccgtgtctatgaaaaatacaaaaatttgccgggcttggtggcgggtgcctgtaatcccagttacttgggagactgaggcaggagaatcacttgaacccgggaggtggaggttgcagtgagccaggatcatgccactgcactccagcctgggcgacagcgagtctccgtctcgggggggaaaaaaagttaaaaataaataaataggccgggcgcggtggctcacgcctgtaatcccagcactttgggaggccgaggcgggcggatcacgaggtcaggagaacgagaccacggggaaaccccgtctctattaaaaatattaaaaattagccgggcgcggtggcgggcccctgtagtcccagctactcgggaggctgaggcaggagaatggcgtgaacccgggaggcggagcttgcaatgagccgagatagtgccactgcactccagcctgcctgggcgacagagcaagactccatctcaaaaataaataaatagataaataatgatttacttgttgggctgggcgtggtggctcacgcctgtaatcccagcactttgggagaccgagacaggaggatctcttaagcccaggagtttatgaccagcctggacaacatagtaagaccccttctttaccaaaaaaaaaaaagttttaattagccaggagtagtagcacccacctgtagtcccagctactggggaggctgaggtgggaggatcccttgagcccaggagatcgaggctgctgtgatccgtgactgcactgctgcactccagcctgggtgacagagtaagatttatagcagtattactcatagtagccaaaagggagaaacagctcagatgtccatcaagtgat

SEQ ID NO: 1242680 - DNA, 4001 bp, Homo sapiens
gatgggggttggagtgtccagggggagggacgggaggcaaaggggagggggcagccaggccggagtcagccctccgctggctaaggacctgaagccaacagtcacagagaagtgcaaacaggcgggcagggaaggtgcagcccggcgcctacgtctgcccagagccccctcccaggccccgccaagctgggaatagctcttccgccctcaggagcccctgagtgctgggaagaggccggaaacccgaggagtgtaccgggaacccaagggggcctccaacattgccattgcctgtgcccccattagcacccctggacggcctcgaccggacgggcgaccccacccagcagggagacggtcaccccaccgccaccacccacctgggaccctgcgcccgccccagttctcagcctggactgcccctcctgcgggaagcccaagccctccttctcaacaagaaccctactctacacgcctcccccactcaatccctccatccttccctccattctcggggggctttggctcagacctgagattgagccctgactggtccccactccctctgtgacccctgccaggcgatttcaccgccccacccgagtttcctcatctgtcaaaggggacaggagcggtgctgcgtcgcagggctcggacgctgtgcagatggtgccgcgaaaatgccaagcgcacggcgggctcagtccacaatagtgcggctgatggtggaagtgtcaggcacgggcccatctgaaatcaccttccctcccattcctgcccctgctgatggaacacaaaccaaatgcgctggctttgccactcggtggaacaaagaccgatcccctacctaggggacccaccgtcaaccaccctcaaccccaccccatggccccacgccaggcctagctcagctcattgaaaacatctactcccagccgggctctgcgcctctttcttgccctgaagggaccagcatcgagaactcacggtcatcaccgaggccacccagggagtgcagagggcggtggggtctccaaggaggaccccgagcccagaggagggccaaaggcccgaagggagggagaacagaggcagagagaggctggagaaggtagtggcggaagataacaggaagccctgctgagaagttggggacttagacgacaatgggacttcggtggacgattttcagcgtggggtagatctaagcggattgtttttctaagttccctctggcttcagagtggcagcaaatgacaggggcaagcaagactgggcacagagagactgagaaatatcaaaacagcaagttaaaaaacagtagcttacgtgtctcccggcacggggctagctgcctccttttactctcacacaccctctcatgccagaagaagtcagagcccagtctgcagatggggaaactgaggctccgagaggcctcctatttggcagagatttccccacctattaagacccaaggccctgcctggagcgggacgtctccgcctcccccagcacacacatccactccaaccccagaaaaccatagggccggaggcttcctttttaaaaatcaaaaaagaacatttcacttccggcctgcaaacctgaaccgccagcgcagcctgcggaaagggggcctgtgggcgcgggtgaagtttttctccagcgcctaaggcacccccacccccatccgggcgcaaacacccgggcccagcgcgcccggcggctcctcctcccccagatgcggctaatcgcgcggcgccaggacggctccccacctcccccgccgggcctggccgccgtcccaacctcgagccacagctggcgcggccaggcccggcggggggtggctctgcttcccgcgtgcgacgccccccgcgcctcgccccaccgcccggcgagtcccccgtccagggctcccgcccaaaggcaaaagcagcggggagggcgggaagagcttcccctgcacgcagagaacaggtggccaggcgggaagtactacccgacgtccgcctagaatccttgccgctgttgccacacccaccccttcccctggggaggagcaacccgcgttccccaaacaggccccgagaaacccagcccggagccctcctctgccgagctagaagaccctgcaggatgggggacgatggaggcagaggaggccgaggccccacccctgcggctcccggggccgcgggccaggggcgcctatcctggggtccccgagaagagctccctaccctgcaatccgttctgctccgccagccgcttcgctccgactgagagcgcggagctggggagggggcgtggcccgagggggggtggggcgccgatccccgcccccaggagctcccggccaatggggctgcgggagggagcccgggacggtgggggcgggcggggcgggagtggcccggacaggacctttgtgtccgcgccttagactggcgggagagcggaacgcagagcgcgggacgtaggggccggggcggggcggggcggggcggagctgggctgcacccaccagcagaaaacgcccctgcaaagtgggggaactgtgtccctgcgcccgtgcagttccttcccctcgccacgcgcgccaggtgcggctcccacctgcctttggctctaaaatctgtataatcccggagggtgtcacttttagcagaaaggaaataaaggaatgaaaagagagacggaagaaaacaagcaaaaaacagaaaggaggaaaagggaaagaaaaaatacacacgcacacacacaccagaaaaacagggttttgttttctcgttggggattttgattttgttctcttctcttgtttcatttctagccttccttgagtcctctgtttttggaggtaaaaaatgttacctctgttttgcaggagaggaaactgaggcacagagaggcgaccagcccatgggcacggccagtcgagagcagcccctgaaggcgagcctagatcccgggaccagggtcagcttggtatttgaggggcgcggggaaggagagaggtccccggagctcgcccgggacaacagggcccccggaggcggcggtgaggactgtgcctgcctcactctgcagcccctattggggccactggggaaaaggcccagcagcgaaaccaactagtccaagccaggcaaggaaccgtcctagacggctggtgggaacaaccgcgcagctgctgtggaaaaagcccggcggttcctcaaaccacgagccctggagtctccataaaacccatcaactccactcctaggtgtctgcgcgcccaagagaaataaaaatgtttgtccacacaaaaatttacttgaggccgggtgcggtggctcacgcctgtaattccagctctttgggaggccgaggcaggaggatcacttgagctcaggagttggagaccagcctggccaacatggcgaaaccccgtgtctatgaaaaatacaaaaatttgccgggcttggtggcgggtgcctgtaatcccagttacttgggagactgaggcaggagaatcacttgaacccgggaggtggaggttgcagtgagccaggatcatgccactgcactccagcctgggcgacagcgagtctccgtctcgggggggaaaaaaagttaaaaataaataaataggccgggcgcggtggctcacgcctgtaatcccagcactttgggaggccgaggcgggcggatcacgaggtcaggagaacgagaccacggggaaaccccgtctctattaaaaatattaaaaattagccgggcgcggtggcgggcccctgtagtcccagctactcgggaggctgaggcaggagaatggcgtgaacccgggaggcggagcttgcaatgagccgagatagtgccactgcactccagcctgcctgggcgacagagcaagactccatctcaaaaataaataaatagataaataatgatttacttgttgggctgggcgtggtggctcacgcctgtaatcccagcactttgggagaccg

SEQ ID NO: 1242681 - DNA, 4001 bp, Homo sapiens
ctaatacgaatacaaaaattagctgggcatggtggcaggcacctgtaatcccatctacttgaaggctgaggcatgagaattgcttgaacctgggaggcggaggttccagtgagctgagatcgcaccactgcactccagcctgggctacagagcaagactctgtctcaaaaaagaaaacccaaagccagggagattttaatgccaaccacctagatccaaactcagccactccacggaccctccctgacgctgctgggagccagacaccacagggaagcaggggcaaaaactgaccctcacgcagtgtccgcctccagggaactgtggaacacgtcgcagagagctcaagcgccacgtttggatccctgagcagctgtcacaagcctgcacccaggactggggggcctgctgcgagagcccaaagggaaagggagaatttccaaggctgcatccagctccatcaggcccagtgaatttccacacagcccgggtcaccacgctgttatgaaatcaaattccttctgtgacccctagtatgtaccggtaaatccagctggagggcgggaattccctagctgctgctgtgcttttgacaatttttcaagagcaggacactcgctgtacacaataatcactgaacattgaatatgaaggtgtcggctctaacgtggcctcagctcgaggttcaggggaaagagaaacagtccagcagtcagaggcccttgggtaagtcctttcccatctctgggctcagtttccgaatctgcaaagtggggcagctgggtgggcatcacttggcacctgcgcagggctggtgatgggggtacgagatgaagtagggagaagcctaactaactcaggacgccactcaacaccacacagccgggagggacagcagcagccctggatcggtttgactcaggtcccatggggttttcaaatttagatttgaagcatgggccaggtgcggtggctcacacctgtaatcccagcactttgagaggcagaggcaggtggatcacctgaggtcaggagttggagaccagcctggccaacatggtgaaaaccagtctctactaaaaatacaaaattagctgggcgtggtggtgggtgcctgtaatcccagctactcgggaggccaaagctggagaattgcttgaaccagggagctgtgggttgcaatgagccgagatcacaccacagcactccagcctgggtgacagagtgagactccgtctcaaaaaaaaataaataacttttatttttttgagacagtgtctcactgtcacccaggctggagggcagtggcataatcacagttcactgtagccttgacctccatgcctaatttttttttttttttttttttttttttttttttttttttttatagagacagggtatcactatgttgcccaggctgatctcaaactcctgggctcaacggattctcccacctcttcctctcaaagtgctaggattacaggcatgaaccaccatgcccggcctgaactatcttaaacatcccagggggtttcctcaaaatccaggtttccagctgctcatggaaagaaatgaagctctcacaaccttcaacctcagtttgcccccccagtcccctcatttataggagtcttcaacctacatcacccaaaaatcccaccgcaccccccgaaccgccttcaagcatagccacccaagaaccaggcccgactgctcagaggagaagggatgccccatccctgaaatgtcagaacccctccccagacattgctgcactctcccgttgggcctcagttctgtcgggctgggaagctggtggctggcttgccttctggaggaggtggcatcctacctcctgtcccttctctcagctacagccgcggccaaggaggaactcctgagtccggggagcccccacctcaaaaaggccccagctgctggcctgggggccagggcccccgcatgacctaccagcacaggtcatagagtcctagaatgttcaacgcccagagttccaggaaagaggctggccctgggaggggagggccctgtccaggcctcccaggacagcagatgggagcagtggcctcgcaactccacagttagagacactgccctgccttgttctatccaaagtctccctccctcctttctcctggagtcaagcatagctgacttttttttttttttttttttttttttttaatttgagatggagtcctgctgtcgcccaggctggagtgcaatggcacaatctcggctcactgcaacctccaccttctgggttcaagtgattctcctgcctcagcctcccaagtagcaggggttacaggtgcccgccatcacgcccggctaatgaagcatagctgacttctaatcctaccccttgcctgctgtgtggtcttgtacaagttacttaatctctctgggcctcagtttccacatctggaaaatgggaattataatagtcccgatttcacaccatcaggctgaactgaaaacaaaataatacacactaagcactgggcacactgtccgcccaggtccagtgagcagtaattgtcagctacgactgttgttataattgtcatcataaaggcactcaacagacacgtgcccaataccgagccctgttcaaggccccagagacaaagggctgaacttgaagccagagaataaacagttaaataaacataaaccagatcattacagatcccaaaagggctgtaaagaaacagacagaaggggatagggggagaagggtgggaatacacacgctaatcagggtgcctgcaggaccctgaacagcaagaaaggggtagccatttgcaaaacggagggaggctgttccaggtatagggaacagcctgtgcaaaggccctgagggcccgggtgggactgaggccagtggggaaaccatgtgatgggtgggggactaggaatgggaggcaggaaaggcggtggaaagggtagggcccgctcaggaatcatgccgcgtcatcatcatcatcactgtcattgtcaccatcgtcgtcctccttgcatcttccatttgtcacacccattttcccctgggtgaatggcacagacccaaaatgggggcccccttctttctccacccaagccccctcaacaccccaagtgcacccaatccttcagagatgccactggaagctcatggcctgtaggggtgaggagtctgagggcagcacagggcccctctgtgtcccaagggcccagcacaggcactggcacagagcagggtctccagacggtccaggaatggccacaaggatggctttttttttttttttttttttttttcagataggatctcacttggtcacctaggctggaatgcagtggcgcgatcatggctcactgaagcctctcaacctcctgggctcaggtgatccgcccaccccagcctcctgggttgtgggactacggccacgtgccaccacaaccagctcattttttgtagagacagggtttcaatatgttgcccaggctggtcttaaactcctgggctcaagcgatcggcgcaccttggcttcccaaagtgctgggattacaggcgtgagccaccacacccagcttccaagcctcattctttgccagcattaggacccaaagccccagctggctgccactgcattggtgtgcactcagcaccatgcccagcccagcaggaggtggctacattcctgctcacctgatagtggaagaaactgaggcacggagcagacgtgactaggggcgggggcagtgccaactgggagacccaggagctttatccagcctctcatggcccatctgggctgaagccaagctggggtggccagagtaggcctggccaagggccactcactccccagtaggcccagcagagaggagtgaatggcctcagtgcgggggagggccgggcaaagtccagctggaaagaaaacaactggggggcgggtaaccaggcacccagaagccagctctgaggccct

SEQ ID NO: 1242682 - DNA, 4001 bp, Homo sapiens
gaggtggaagggaaatggcgcagggatcggggtgagactctagcagagtagcgaagttaccttagtgcacctgggttcctcctttgtaaacagacagagacactgagctgacccatcccagtctccagcgcagctgagccccagcctgggagaactgccggcacgtgggccgagaggcggggcgggtcagctgagcccagatagaagggtccctggaagcgatagaggccgagaacgagccagaggttgacgcagcagcgtcaggctggcctagccacattcccctccattgttccggggagagcggggggtctggcgagggaggagcagagagagaggagggggagggacacgaagggatgggggttggagtgtccagggggagggacgggaggcaaaggggagggggcagccaggccggagtcagccctccgctggctaaggacctgaagccaacagtcacagagaagtgcaaacaggcgggcagggaaggtgcagcccggcgcctacgtctgcccagagccccctcccaggccccgccaagctgggaatagctcttccgccctcaggagcccctgagtgctgggaagaggccggaaacccgaggagtgtaccgggaacccaagggggcctccaacattgccattgcctgtgcccccattagcacccctggacggcctcgaccggacgggcgaccccacccagcagggagacggtcaccccaccgccaccacccacctgggaccctgcgcccgccccagttctcagcctggactgcccctcctgcgggaagcccaagccctccttctcaacaagaaccctactctacacgcctcccccactcaatccctccatccttccctccattctcggggggctttggctcagacctgagattgagccctgactggtccccactccctctgtgacccctgccaggcgatttcaccgccccacccgagtttcctcatctgtcaaaggggacaggagcggtgctgcgtcgcagggctcggacgctgtgcagatggtgccgcgaaaatgccaagcgcacggcgggctcagtccacaatagtgcggctgatggtggaagtgtcaggcacgggcccatctgaaatcaccttccctcccattcctgcccctgctgatggaacacaaaccaaatgcgctggctttgccactcggtggaacaaagaccgatcccctacctaggggacccaccgtcaaccaccctcaaccccaccccatggccccacgccaggcctagctcagctcattgaaaacatctactcccagccgggctctgcgcctctttcttgccctgaagggaccagcatcgagaactcacggtcatcaccgaggccacccagggagtgcagagggcggtggggtctccaaggaggaccccgagcccagaggagggccaaaggcccgaagggagggagaacagaggcagagagaggctggagaaggtagtggcggaagataacaggaagccctgctgagaagttggggacttagacgacaatgggacttcggtggacgattttcagcgtggggtagatctaagcggattgtttttctaagttccctctggcttcagagtggcagcaaatgacaggggcaagcaagactgggcacagagagactgagaaatatcaaaacagcaagttaaaaaacagtagcttacgtgtctcccggcacggggctagctgcctccttttactctcacacaccctctcatgccagaagaagtcagagcccagtctgcagatggggaaactgaggctccgagaggcctcctatttggcagagatttccccacctattaagacccaaggccctgcctggagcgggacgtctccgcctcccccagcacacacatccactccaaccccagaaaaccatagggccggaggcttcctttttaaaaatcaaaaaagaacatttcacttccggcctgcaaacctgaaccgccagcgcagcctgcggaaagggggcctgtgggcgcgggtgaagtttttctccagcgcctaaggcacccccacccccatccgggcgcaaacacccgggcccagcgcgcccggcggctcctcctcccccagatgcggctaatcgcgcggcgccaggacggctccccacctcccccgccgggcctggccgccgtcccaacctcgagccacagctggcgcggccaggcccggcggggggtggctctgcttcccgcgtgcgacgccccccgcgcctcgccccaccgcccggcgagtcccccgtccagggctcccgcccaaaggcaaaagcagcggggagggcgggaagagcttcccctgcacgcagagaacaggtggccaggcgggaagtactacccgacgtccgcctagaatccttgccgctgttgccacacccaccccttcccctggggaggagcaacccgcgttccccaaacaggccccgagaaacccagcccggagccctcctctgccgagctagaagaccctgcaggatgggggacgatggaggcagaggaggccgaggccccacccctgcggctcccggggccgcgggccaggggcgcctatcctggggtccccgagaagagctccctaccctgcaatccgttctgctccgccagccgcttcgctccgactgagagcgcggagctggggagggggcgtggcccgagggggggtggggcgccgatccccgcccccaggagctcccggccaatggggctgcgggagggagcccgggacggtgggggcgggcggggcgggagtggcccggacaggacctttgtgtccgcgccttagactggcgggagagcggaacgcagagcgcgggacgtaggggccggggcggggcggggcggggcggagctgggctgcacccaccagcagaaaacgcccctgcaaagtgggggaactgtgtccctgcgcccgtgcagttccttcccctcgccacgcgcgccaggtgcggctcccacctgcctttggctctaaaatctgtataatcccggagggtgtcacttttagcagaaaggaaataaaggaatgaaaagagagacggaagaaaacaagcaaaaaacagaaaggaggaaaagggaaagaaaaaatacacacgcacacacacaccagaaaaacagggttttgttttctcgttggggattttgattttgttctcttctcttgtttcatttctagccttccttgagtcctctgtttttggaggtaaaaaatgttacctctgttttgcaggagaggaaactgaggcacagagaggcgaccagcccatgggcacggccagtcgagagcagcccctgaaggcgagcctagatcccgggaccagggtcagcttggtatttgaggggcgcggggaaggagagaggtccccggagctcgcccgggacaacagggcccccggaggcggcggtgaggactgtgcctgcctcactctgcagcccctattggggccactggggaaaaggcccagcagcgaaaccaactagtccaagccaggcaaggaaccgtcctagacggctggtgggaacaaccgcgcagctgctgtggaaaaagcccggcggttcctcaaaccacgagccctggagtctccataaaacccatcaactccactcctaggtgtctgcgcgcccaagagaaataaaaatgtttgtccacacaaaaatttacttgaggccgggtgcggtggctcacgcctgtaattccagctctttgggaggccgaggcaggaggatcacttgagctcaggagttggagaccagcctggccaacatggcgaaaccccgtgtctatgaaaaatacaaaaatttgccgggcttggtggcgggtgcctgtaatcccagttacttgggagactgaggcaggagaatcacttgaacccgggaggtggaggttgcagtgagccaggatcatgccactgcactccagcctgggcgacagcgagtctccgtctcgggggggaaaaaaagttaaaaataaataaatagg

SEQ ID NO: 1242683 - DNA, 4001 bp, Homo sapiens
gcttcagcccctttattgaagacaggatgatagaaggcagggggataagagttcaagtcagacacctcactcttggcaaagcgagaacctctccaagcctgctctgcaaaatgagggtgtcttgagccttccatgggatgctggctggggaaggccagggttgggcatggtgttggggcagcttccagcccggagccagcccactgctggcaggtgtggtgggtagtggcccgcactatggggatggggcaggctgtagtgctttcatacaccctacagccactgtccacagacttctgcgtcaggccctgttgggggattacaaacatcaactacatgcacgtaaacatcgacccaacaggggaggcacttttagcagccctgttttacagatgaggaaactaaggcacagagttaagccagtgattctacttcctactttaatgcagtcaggaatctctggggatcttgttcaaatgcagattgccattcagcaggtgtggggtggggcctgagattcttcatttcttttttattttttttgagacagggtcttgctttgttacccaggctggagtttggtggcacaatcatggctcactgcagcctcaacctcctgggctcaagggatcctctcacttcagcctcccaagtagctgggactacaggcgtgtgctaccacacccagctaatttttttattttttgtagagacaaggtctcactgtgttgtccaggctggtctcgacctcccaggctcaagagattctcccaccccggcctcccaaagtgctgggattacaggctccagattcctggccaagattctacatttctaaggcgctcccagtgaggcagctgtccctgacccagggaacacggcagtagccgggctacactggcccatctcacagcccaaggcttaacagtgcaggaggtggaagggaaatggcgcagggatcggggtgagactctagcagagtagcgaagttaccttagtgcacctgggttcctcctttgtaaacagacagagacactgagctgacccatcccagtctccagcgcagctgagccccagcctgggagaactgccggcacgtgggccgagaggcggggcgggtcagctgagcccagatagaagggtccctggaagcgatagaggccgagaacgagccagaggttgacgcagcagcgtcaggctggcctagccacattcccctccattgttccggggagagcggggggtctggcgagggaggagcagagagagaggagggggagggacacgaagggatgggggttggagtgtccagggggagggacgggaggcaaaggggagggggcagccaggccggagtcagccctccgctggctaaggacctgaagccaacagtcacagagaagtgcaaacaggcgggcagggaaggtgcagcccggcgcctacgtctgcccagagccccctcccaggccccgccaagctgggaatagctcttccgccctcaggagcccctgagtgctgggaagaggccggaaacccgaggagtgtaccgggaacccaagggggcctccaacattgccattgcctgtgcccccattagcacccctggacggcctcgaccggacgggcgaccccacccagcagggagacggtcaccccaccgccaccacccacctgggaccctgcgcccgccccagttctcagcctggactgcccctcctgcgggaagcccaagccctccttctcaacaagaaccctactctacacgcctcccccactcaatccctccatccttccctccattctcggggggctttggctcagacctgagattgagccctgactggtccccactccctctgtgacccctgccaggcgatttcaccgccccacccgagtttcctcatctgtcaaaggggacaggagcggtgctgcgtcgcagggctcggacgctgtgcagatggtgccgcgaaaatgccaagcgcacggcgggctcagtccacaatagtgcggctgatggtggaagtgtcaggcacgggcccatctgaaatcaccttccctcccattcctgcccctgctgatggaacacaaaccaaatgcgctggctttgccactcggtggaacaaagaccgatcccctacctaggggacccaccgtcaaccaccctcaaccccaccccatggccccacgccaggcctagctcagctcattgaaaacatctactcccagccgggctctgcgcctctttcttgccctgaagggaccagcatcgagaactcacggtcatcaccgaggccacccagggagtgcagagggcggtggggtctccaaggaggaccccgagcccagaggagggccaaaggcccgaagggagggagaacagaggcagagagaggctggagaaggtagtggcggaagataacaggaagccctgctgagaagttggggacttagacgacaatgggacttcggtggacgattttcagcgtggggtagatctaagcggattgtttttctaagttccctctggcttcagagtggcagcaaatgacaggggcaagcaagactgggcacagagagactgagaaatatcaaaacagcaagttaaaaaacagtagcttacgtgtctcccggcacggggctagctgcctccttttactctcacacaccctctcatgccagaagaagtcagagcccagtctgcagatggggaaactgaggctccgagaggcctcctatttggcagagatttccccacctattaagacccaaggccctgcctggagcgggacgtctccgcctcccccagcacacacatccactccaaccccagaaaaccatagggccggaggcttcctttttaaaaatcaaaaaagaacatttcacttccggcctgcaaacctgaaccgccagcgcagcctgcggaaagggggcctgtgggcgcgggtgaagtttttctccagcgcctaaggcacccccacccccatccgggcgcaaacacccgggcccagcgcgcccggcggctcctcctcccccagatgcggctaatcgcgcggcgccaggacggctccccacctcccccgccgggcctggccgccgtcccaacctcgagccacagctggcgcggccaggcccggcggggggtggctctgcttcccgcgtgcgacgccccccgcgcctcgccccaccgcccggcgagtcccccgtccagggctcccgcccaaaggcaaaagcagcggggagggcgggaagagcttcccctgcacgcagagaacaggtggccaggcgggaagtactacccgacgtccgcctagaatccttgccgctgttgccacacccaccccttcccctggggaggagcaacccgcgttccccaaacaggccccgagaaacccagcccggagccctcctctgccgagctagaagaccctgcaggatgggggacgatggaggcagaggaggccgaggccccacccctgcggctcccggggccgcgggccaggggcgcctatcctggggtccccgagaagagctccctaccctgcaatccgttctgctccgccagccgcttcgctccgactgagagcgcggagctggggagggggcgtggcccgagggggggtggggcgccgatccccgcccccaggagctcccggccaatggggctgcgggagggagcccgggacggtgggggcgggcggggcgggagtggcccggacaggacctttgtgtccgcgccttagactggcgggagagcggaacgcagagcgcgggacgtaggggccggggcggggcggggcggggcggagctgggctgcacccaccagcagaaaacgcccctgcaaagtgggggaactgtgtccctgcgcccgtgcagttccttcccctcgccacgcgcgccaggtgcggctcccacctgcctttggctctaaaatctgtataatcccggagggtgtcacttttagcagaaaggaaataaaggaatgaaaagagagacggaagaa

SEQ ID NO: 1242684 - DNA, 4001 bp, Homo sapiens
aaccagaggggaccatggaagcaaagctcatggggacagccctgggctcacggggccctggaggatactgctggacaccccccacctcgtggcccaaactcagctgtactttactgaatcaaaatacatcttactccaaagcaggccagcgttgccatgacgacggagctaattcatggagggatttctcctctgatttattacacccgcccctgtgagtcagagagcaggagccggggccagggcaggtgtctctcctgtcccagaggccaggcaagacaggcagagacccaggtgagagtggaagcccccacacctccccagaatggccacaatagaagggaggaggaacctccccagagctgaagcccccacttccccagcccctggccctgggccgtccaagactgcggtcattgctggcatttactgagcacttactgaatgcctgggctgcaagtgcccaggctcactggtcttaggaccccaccgtgaggctgacatcccatcctacagacgaggagactgaggtccactgagctggagttgtctgtgtccaaggtcatgcggccactaggtggaaacctttaccttgccttccctcaatccctacacctgctctccaggctcagctgaggctgcctctgcccacaagctctccctttctgagcccccggacctgaaatcagctcggggccagcctgcaaggcaccggtgccccctctctcttactgcacagagtggacaggagctagccagtcatgggctgctggtgaagtacgggggagggggtcctcctgggactcctaggtgcccccaacaatctcccagaagccagtcccagttctcggcatccccctggaggaaggggagggggactctctggcttacagtctgtgggggtggagggaggagggaggacgcccagaccccacgtgccgacctgcagagccctgtccgtgcccgcacaggtgccctgacacactgacacggctatacgtgcgcagccgcacacgcggctggtccacacgcccatccatccatctccggcggcccccagggaggctacgcgctgagccaggatgagtgctgggaccagggctccaagctcccagccctttcctggggccggccatagggcaagctggggatggccagtggtggtcccccactccctcatggcctcctttcccagcagggaagctggagacccggctctgctggagcctgcctgagcagggccccaagcccttgcgcccaggccggccctgcctggagtccagcctgccctgggctgggcgaccttgggcctctgctctcccatcagtaaatggcaccccaccggccatgccagggcagccacacccccagcgtggtcctgcccccaccttccctgcaaagcgtgttattaaacgtggggcgggagggggtctgctagggactgtcacctcccgggtcgcccctcgccgcaggggccccctccctgtcttcccggtgcgtgtggtgggtggggggggcatccgcctcgccctttgaaggccccagcagagacctccagctgtcagcccgcagcctgggaagggagggggacagaggtagagagagagggatgcgaacgcccgcggcccgggaggcgggtgccgccaggtgcccgctgcggggctcacggtggcggccggctctcggggccgccccatctccagtgctgggggcagcgggtggagggcacggaccaagggtctgggcgctgctggccccgccccgcccccggggacccgacaacgtcccctccccgcccggcgccgggtggggggctccgcgccggggaggggcccccggggctcccacccgcgccccgcgcccccggcactcactggccttcccgggccgcggcctctgcagcagcctctgcgcggtccctacgtcctccgccttcaccgcctgcaccagctcctgctccttccccatggcgcggccggggccgcagcgacgcggctgcgctcgtgagctcggcgcggctcagaggcggcggcggccccgcggcaccggccgcctcccccgccgcctcccccgccgcctcctcgccgcccgccgccccttcgccctcctcgggctccggcttgggctcgggctcccggcgcggagggggcggggagcgcgtcacgggcggggggcggcccgggggcgggggcgcgcggcgggcgcggggcgggggcgcggcacctggcgccgcctcccggacgccggggtccgctcccgggccgccgacctccgtcagcccgcgccggccgcgcgcccgggcccgtggctccgccctccccgcgcccgccccgggacgccccctccccacgtgcgcgcagcgcgctcaggccaggcctctgcggacgcgggcggcctggggctgctagccgggctggggacgcggccgccgggggtgcactgggagccccgacgcggcggcggcgcggggctgagcccagagaggcttccagaggctgcgggacccgcgggggacggttccgaggcagcgggcgggcggggaccgggcgccgagagacccgggcgccagtgcccctggagccggcccgccaggctgtcaggcgttcctggcccagggttcccgtgggaggtgtcgagggattgtgaagaggaatctcccaataatgaattcggtgtcagggaacccgcacccccaacccccaagcatcctcctgctcctctccgcaaataatgcgggcgccacagcttcccccagcctcagtccgaagcctgaccccaaggtagcccccaccacccccactgagggagctcaactccccactccccgcaccgactgggggtcgcctccatctccatccacaggggctggaacctcccgccggcaccaaccgacccccggcccacgtctgcccactctccagcctgcagcccaggcaggcgagtcctgcttcctgggtgctggaggccccgacttgtgaccctctgagctcctggctgaaggcttgggccaccctgcgcctcaggccctctcccgtcaggcctgcagcattctagaggcagatcagtgggggtctgagtcccgactcaggctccgtttccctcatcacccaagcgggcaaggccgtttggagaatttggggagggtcgcacccattctatgaggcatggcctggcaccccactctgtgtggccccagaccattgagcaggtccagggggacagaggaggtcagacagcagggacagggaaggtgacaggcaccggggtcccggcatcctgtgggcagctggccgttcccgttccctccgtggggtctcctgttaggttcaggtagcagcccttggtcttccagcactcctgggaggggtccccaaatgctagggcctttcctcttgccctttccaatgaccagttgagtacccgctgggtcaggcactgtgctggtcacctcctagatgaggttggactcactgtccccattttacagatgaagaaactgaggctcagagaagccaaggggctcacctggggtcccagagtcttgaggttgtaagtctgggctttgcacccgcacctctggatgtgtcctattccccctcttagtggtttgtgaccatgagctggtcactttgtcattcttttttctgagacagggtctcgctctgtcgtccaggctggggtgcagtgacgccatcatagctcactgcagcctcaacatcccaggctcaagcagtcctcccgcctcagcctcctgagtagcgcccggctaattttttttgatttttaatagagatgaggtctcagtatgttacctagactggtctcgaactcctggcctcaagcagtcctcccacctcaacctcccaaagtgctgggattgcagacgtgagctaccacacccagcccactgcctaagtgtctgtgcccctctgtaaaatgaggatatgcatgctacctccccttaggttactggaggataaattgtgatactatccacaaag

SEQ ID NO: 1242685 - DNA, 4001 bp, Homo sapiens
tactctgtgttagaggccaccctggccctctgctcctgacctgcagccatgtcagaggtccaccctgaccctctctgctccacatctttagccatgtcagaggtccaccctgaccctctgctcctcacctgcagccatgtcagaggcccgccctgaccctctgtttcatgcctctagccagcagcccctcgcatgactcaggcacggggccacctcttggccctaacctccttccacggtagacacccccgtccttccacagtagacgcccccatcctaacaaagcggcggctctccatgcgcctcagagcccgtctctctccgcgccggtgagaacctgctctcacgcggggagcaggtcggaagggtctgaaccatgaggaaactgaggcccagggaggaagcacccggcccaaggccactcagcgccaggggatagacagggccgctccagagaggacgggatggcagatgccagggccagtgggctggtgctgccttgaaggtggctctgagtcacccattcgggagaaacgaacagtagcactggctgtggtgaggtccggcctttgcattccgggcacccggggttgggaagttcctgctcacatctggggcccttgtgggggatggccctggggccccacgggcagctgcaggtgggaacagcctcaggcagccgccgccaggacctgctcagggaatgtggtctccagagatggggacacccctcggtcccgggttctgtgtgtgagtgtcaggggtgcagtcagaccttggacctgacggcctcagtgagagccccgcgagacgggagactgtgagctcctgaaggttccgacggctgctgggagtgtggccacgagggccactgggaatcggggccaccagcctgcagctgcagcccccagcgtccggggatccttgtcctgggacttcgcaggctcgggtggggggtatcagcaatagctggcgtcctgctggactggacccctccccagagcccgaagcccccagaagggcaggcccaggttccccgtaaacccccactgccctggctggaatcgttcctcggacaggggcccagggttgggtccatttcctcctcaccggggtcttgggccagtgccctcccctctggcctcagtttcctcatccaacctgctgtgaggtgtcacacccggagggcatcccaggaggaggagggctctctttctaggacccccccatcacttcccggctgcggccctcccacccccaggagaacacagcccaccctcctagacggggctgagcagcccggcctccagcatctgcctctgggtggggctggggcacctggctggcacctgccaaaccctcaccagcccacctgccccagctgtgcaggacctgcctgtggggtggccctgttgatatctgaggtgagtcaacacggccatccgtgccggcactgtcaactaagctgggcaggccccgcgaagctctaaggagtcacagccccggcaccggctgccgctctctgcccccaccccaccaccttcccctcgagcctcttacctgggccgcccttcctgggaccccggggtgcggagcagccggcagatgccaggaggccgctctccagcacagggtgcgtctgggacatggagccacaggtggatcccgaggctgaactggctgccctgtccctcagtcttgaagccggcatgaggagggccaccctcaggggccaacctggagcccaggacaggcctctaccaggactgcctttcccgacctcctgcagccttgagggaaagaggaggggctgggccagctggggcgtcctggagttgggcctctgtccctggaaagccgaggccctcccggccaccaactgggtgtcctctgccctggggagggggtgggagccctggggctcatgtgacgcggggcgggcctggggctgcaggctggggaaggtctccctgcagcctgcgggtgaggcagccagctgtgtccccgtgataatgccggggccggaggcctgcagctgcgcccgccacttccctgacaggaaccatctggggccctgccctgcgcggccttccctcgggccattccggtttgaccttccaacaacttcctcctcccaggcagctctggtgacgtcccacccaccctgagccctacagcgtggccactgggcatgtgtttcctcggccccagggcaggtgtgcaggcctgagggcagctccatcctggcccagagcccttggcctgtcccgcccacccatcttccccccagggcttggcccttccttcagcctggggtatctgggggtgtcctccctctccgctagccctcagtcagccgagctttccccagcaccccttttagtttgcccccgctccaggggccaccctgcccgtgttcctgtgtctgctgactgtgcccttgagcaaggcggggcctctgaccagcctctcctcagcccctgctccggggttcttgggcacctgacctgtcctcaaagtacctcccgcctgctgggaaggaaaccctctctctctgcttggcctcgtgcacagggctcctggccctctgtggagacagcagggctcccccactctccgggggtgcctcagaaagaccctcaccccacgccccagcggccgcctccggtgagcagcctggagtttgcgggggtcgggggtaggtggcttctccagtctgggaaattccagaagccacctcagagcactcttgggactacttagaccctagggagagtcctaggacccctttctagcggccgttgggctgagagagtgaggcacatcccagatgctgggaaaaaaagccactttctaaagctccctgacaactgtcagagggcaggagcttcctgggaggggacagtgacccttcggccctgcagccctggttcggtggcttttctgatgccatggctggaggtttcccggcctcagacaggccagaggtgtggagcccgcagacccagggccggctcacgggcatctgtgctattttgatttgatttgatttgagttttaggtcacgtttgcacgcagttaataattcaagccgtgcaggagtaaaagccgactccttccccgcagggtctccaggtgtcccgggtctccctgtcccaatagtcgagtgtctttctcgagttggtgacaacaagctgcatgccagcgtgtgtgtccagcttacagtggggatgtgtttgttcctgctggggaacttcccagacgccaggcccacccggggcctcccctgccctgggtggtcggccgttctgcccccaggactgaggctggaggggacattcctgccagcccggggcccatcccctggtgccatcattcggtccccacgtcccctgctgttccctgtgctctggctcagggtgggattcacagtgagggtcctgggggccctgaccctcctggtttcctcatttgtgcagggtgcacgatcctaacggcgtcagctcctacagcgtttccgggagtggagacagcagaggctctgagccgccacatgggccggggccaccgtgagcatgtggctggggttggtctgtgtcagtgcctattccccagctgtgtgcagtgagagtctcagagtcggggaactgagggtctcagggggcacagcccccactccgtgaggcagcaggacagcaccctgggtgagggtggtggctccccccacccggggtaggagacaggcagccctgcccccagccctgaggcagatgttcgaggcctgcacctgcgccccccacagatgggacacttccactttcgcaatgaggccctgagctccccgcctggccccgtcttgcctggtgtctaatcagggggtctgacggaggtggggttggaaagagaagagaagaaagttgcccacaagttgggggcaggagctgccccccaactttggcggccacctgggggtgtgggcaccactccccacctccccacta

SEQ ID NO: 1242686 - DNA, 4001 bp, Homo sapiens
tcgggcggctggtgtgtggcttcgtagccccagagggttctggaaggcgatgtctggggaaagccctcccactcaccagccctggcttcacaggtggtgacagcacggccccagcaccacgaaccactcatgtgaacttcccttctcccctgtcactagaggatcccagcacatcccaggagagatggagcctgccggaagactgatcctgatgcgacactctcttccctccctgagccccaatctcgggtggaggccacatctgttcctcctgctctgggcgcttcttcctttctgtttccctttcagtgtggaagagtggccgcttgcccagcaggacggtcccaaatagcatggcttttccaggcacggtgctgtcggccgcacagaacaggaccctcccggcagctccggcttgcacagcatccgcctgtctggcccctgtggaagtatctgactcccaacgcccagactggagcgggggcaaaggacacagcccgaccccagaggcacacagagccagccctccacggaagaacgtgcccaggaactgtgggctgggccttcctgcctcctcccctgccgcgaaagcgatgccaggggcaggtgagggtcggacgcgctcaggcccagccctcgccccttcaggtctgggggacacagtggagtcccagcctcaagaagtttccccaacctctcagaaacttgaagggcaatgccaggtaccgaaaaaccggcccccgccccttatccccggccgacccgtccgccgaggtggctgccctgggaacctcctgttcctcgtccaggagaggaaacgcacacccgggccggacgcacagaagccgcaccctggctggggccacaagcctgacagctaccgacaagcccccacccacaggagcacgcgacgtgctctcttttcaagggaaaggtttttcttcctgggccctggaatgggcctgaagtcagccggcctcagcccacagggtgaatgaggggtgggcacagcccggccgcggccccagcacacacgggcggacgcaggggcgggggagcgccagccccgcagtgtgttcggagcccagcggctctgagtcgccgccaccagcctggccgccttctgctccacgtaagtgaagtcagccgtctagggctgcgtttccagccatctgtccctccacagaggctcacacctccctccccgctgttcccacagcctggctcggggcctgcccaacacagatggacgcttcccaaaggctgtgcgcgccatcgctgccacccggctgtgccgaggcccgcggccgtcaggaccccagggaccgcatgccaggcagggtccaggacccccagcgcggaccacctttagcctgcggggcagcgccggggacccgggcaggagggagaggagcaggagggagctctggacccccctccccagaccggccgccgccacctctgcctctcccagggccgccctcggcctccccactcccgggtctccgtcacgcgggccgcggggcctttgttaggaaaaccgggcggccccaggggagcccgcgagactcccagcgcccgggcgcgtcgttcccctcgaagtttcgccgcagcccccgcaggtcaggctctgctcacggggggctgcgctcagcccggatgggtgggcgctgggcgggttggctccaccctgccgtgggcaccaactttgaaaacggcccgtgcgctcggcgcggctgcggcgcagatccgggaacggcagccgcgggcggagtcggggtagagcggcggcggcgcgcggggcggacacggcacttacggtcggggggtccgggggatccggcgggcggcggacggcgcacactcgcgactcggtccgggagtcgctgctccttccagcttggtccccgcctccacgactcaggggcggctgcgcgctgtcttctggcgccgcaccgggctcaggcgcgcggcggggctggggcgcgcggggcggccgcctgggccatgccggggactcggctccggccaccccgcgcgggaacaaagcgcgcaccccgcccggggcggtctccggcctccgcggcccgcgccgggtccagccgccgcgcctgtggctccaacgccgcgcgctcgcccgagagtctcacggggccccgcggcccccgccccgcgcgctccgcctccgcctcctgccccccgccgccgccgctgcgccacctgcctcccgcccggcgcccatggcgctcagctccgccccggggcgccggcctggagaggggctccccgccgccgagagccgcccccaacgcctccgccaccggggcggcgccctaagaactggccgtgggggccggggctgtgcggagcgccgggagcagggagaggggagaggggcgcggggagggggcgacgggcgcgccgcctcctgcggggggcggcgcggggaggcgcaggcgggggcgagcgaagaggttgaggggtgcgggcgccgtggagggggcgcggctctggggggcggcccccgcctgcgcccaccctctccccctccgcaggccgcgcacacccacctcgcagcagtcggcggccgcgggcctcgcagctttagaaccgcggcttctggcggccgcgcgggaggctgaacgggagttggggggtgtggggggggtggggaggtggggagttgggggggaggtcgctccttcggccgccgcccccgccccctgccccgcgctcgcccccagcgcggcgcctggcccggcccggggccacctccgtgcgtggccggcaggggtcgcgctccccccgctcagcctcccgggcgggtccgatgcgaagccctcgcttcccgcgggtcccggggccaggtcatttgcatacactttgcattcatttgcatatcgtgcgtttcatgtccacctgcagaaacgccccgagccgctgctctgccctctccgcactttctctgccggcaggccccctcccccgcccgctttgcctttccctaaagtactttgtggcgtgtctggcgcatttgcctgcttagtacattttagtaaaattggcgccttttccctgtttcctgccccaacgcacacgtgctcttactttagacacaagcggctggggggcccaggggtcaccattaggagacacaagaggccagaccttcagagcagcagggccttggtttgcctctcatttcgcataaattttgcatgtgaaggtccgaggtccccaatccccaatataaaaatatggcaacgtgcgaaacatggcccattccagctttgtgccgcgggccttttccccccacccctcgtccctctcatggacttggctctacccacctgagctggcagaggaaggggacggaaacccagaacgggggctccgtgagggggaggacagcaccatgtcctcctgcagcccctgggcagcggtctggtcagctgggtcactaaccgcagtgtggcccagccagttcctccagctcctggctgtgggaagtgctgtctgaagccagccagactccgtgaaaattgtgacacaaacgccaagcaccttcattctcctggttttcagactgtgcgtaacatggtgcttgcccatgtggctcagcccagtccttgtggaatggaggttttcagactgtgcgtaacatggtgcttgcccatgtggctcagcccagtccttgtggaatggagggggagttctgagcccaccccacagtacagtgcgagtccccatgcggtgggtgtgttgcctaaggttaccgattttatgctcgaaatttatccatcctggctccctggcttcatggactctgaggcacagtggattttaagatgcaccattattttgtgtgccactaagaaaggaaaacattctgccggtgataatcctaaaacgcccccaggtttcagagattttacaaagcaacataaacgtgggagtgggggcaggtgggagaattcagcagcgaaccaccctgaagtcag

SEQ ID NO: 1242687 - DNA, 4001 bp, Homo sapiens
aatattctttaaaaataaatttgagttcagtgatgtaaagggagaattttatgacatatgaattatatctgaataaaaataaactggttttataaagggggtgggagaagtaaatttccaatgtcttcctactgttaacccaaattcaaatcgcacctagcttcaagcctctaacaatgcagtgagtccaagtcaccgagcagagagtaacagcattccattagacagtgcttcaactttttaaaaaataatcaggccagacgcagtggctcacgcctgtaatcccagcactctgggaggtcgaggagggcggatcacttgaggtcaggaggccagcttggccaacaaggtgaaaccccgtctctactaaaaatgcaaaaattagccgggcgtggtggcaggcacctgtaatcctagctactcaggaggctgaggcaggaaaatcgcttgaacccaggaggcgaaggttgcagtgacccgagatcgagccactgtactccagcctgggcaacagagcaagactctacctcaaaaaaatagtaataatcaacctcttttcttggtttcttcctaccactccctcctcatcagcacctccaacaaggcaaaccaaaaagatgagaggaactaggacccttggattttttttttcaacccaaggtctggtgaagacgcactaaatctgcctcctaaaacaaggacctcgagatcaaccgtgggttttgcccatctgtgcagtttttaggaacagcagccctactcaggacatggggataatggtttctttctgattctcctgaagcttaacattctaagaaaatgacatttttagggccttttcccccccctcccctctctattagaataaataactggaggaaagatttctactcggcgatctggtagtgagaccgcttgacacagagaattaccgacagatctaccttctaagaaacaaactatcgccgaccttgaatgaagctccacttctttttccgaatgggggtttgcttgctacaaataccctgaacccttcttcggtgtcgccgcctaaacaatgcccttcgcttgtttagtctggctcgggttcgagctccactcgcggtgctccgttggccgacacgcgccaccgcggcgagccccaggaaaagcgtctccccgcgagtaccggcccgcggcatctggtttcgcattttgaatcccgagtaggaagtgagacggcgcccactcagttccgggagccgcagcagccgcgccgccgtccggaaccggcctgggccgccgcggccccgcgcaacaagtgacccgcgcgcgccccgggccagccgacttacgatttccgagcggccgtcgcggcaggcgttctggaagcgtgcctggcgttcctcgtggggccggtccctgaagcccgtgtacttaatctgcaaggcaagacggcccgaaatcaggagccaaatccgcggcgccgcccgcgcgcccgccctcccagcgcagcgccgataagggcaagcagaggctgcgggcgatggccgccccggcgagattgcccctccgcgggcgcaccgaccgggactcccggggaccgtgccgcccaaacttttctccgcccgggcccactcggggcgcgctgcggcctcctagccgcccgcccgcctgcctcacctcacactcgcggctcagcttcctaaaaaactcctcgttctcgaacttgcttctctggtcgggcacgacgcgcggcatcttcccgccctgaggccgcgccggccggccgcgctcggggcttgcgcgggcacccgctggctggctccgcgctgaccgactgaccgcccacccgcggcgcccggacgcccgcttccctttgtttcaggcgcccgcccgcgtgggctcccgttccggggagtctgaggcgccgccgcccgctcgagcccaacccacgccgccgccgccgccgccgccgcctcagccgttgcctgccgcccgcgcagccccagcgctcaccgcccccggccgccgccgccgccgccgccgccacttcctctcaccgcccaccccgcccccgccggccccacccctcctcctcgcgcgcccgcccgcctccaactccggcaaacaagacgcaccattcacaactccgcggcccacgccgcgcatgcgccacccgcccgctggcggagcggcctggctgtggcgccccggggctccttccgcatcagggcccttttccccctgctcgcccgcggccactcggcgtggagctgtcgttgggggatccgcctggcctttagcagacgggagtagccagcgcaggccttttctaccgcccttcctcggtcatctggaacttctgggttccccaggtgcgcggagtaaccccagattgtcacttgaacgcgaggaaacctaagtccttggggacttttcgtccctaaaccgaccggcaggggtgtaggctctgcacgttgaagactgaggtggaaacggaccaaagaatccaaccgagtcatggtggaaaggtcgtggcttttggagtcagatgggtcttagatgggatcccactcagctacactacctgctggctggggccttagataagaattggaccactaaacctcagtttccttatttccaaaatgcagacactcctaggtttgcagtgttagcgtgagaacctttatgtgggtctagcacacagtgggagcccaataaatttaagtttctaaagaagaacaagctgagttaagaatgtaaccgattgccagtccatatacttactcaatgtgcaatcagctgcaaaaaataagatccataaattctagggaagttgtttagcccaaactggagaaagtctgacatgggatttatggcagagtttgattcaaagttagtcctgtggccgggcactgtagctcatacccgtaatcccagccctcttttttttttttttttttttttttttttaaacagagcctcgctctgtcgcccaggctggagtgcaatggcgcgatctcggctcactgcaacctccgcctcctgggttcaagtgattcttctgcctctgtctcccgagtatttggaattacaggcacccaccaccacgcccagctaatttttttgtatttttagtagagacggggtttcgccatgttggtcaggctggtctcgaactcctgacctcaggtgatctgcccgcctcggcctcccaaagtactgggattacaggcatgagccactgcgcctggcctaatcccagcactttgggaggccgaggcaggctgatcacctgagatcaggagctcgaggccggtctggtcaacatggcaaaaccccatctctactaaagtacaaaaattagcggggtgtggtggcacacgcctgtagtctcagctactcgggaggctgaggcaggagaatcgcttgaacctgggaggcggaggttgtagtgagccaagacggtgccactgcactgcagcctgggccacagagcaagactccgtctcaaacagctactcggaagctgaggcaggagaattggttgaacctgggaggcagaggttgcggtgagccaagatcgtgccattgcaccccagcctggggaacaagagcataactccgtctcggggggaaaaaaaatccatgaggaagcactcttgctccacaatgggtccaaggagggctcacagacctccaagttgatcttggccaaagactctagcaataattgtttctgccatgggaaatgtggaataaataaaaattgaaagatctctagaatggccttgatggccatgagcttaggcaaggaaaaggtcagggtcaagggagctagacctggaggggtgggagtgcagagcagggcagggcgctctcattgtcagcctcaaggaggggaggaacgatgtcctaagggaaagggacagcaaagcctgccaagcagacccagaacagcagccccacagacagccttgggcaactccaggccacagggtaacccacactcgtcg

SEQ ID NO: 1242688 - DNA, 4001 bp, Homo sapiens
ggagttgctcttattccagtttctcaaatgagcgcgccaagcgaatctcgactgtgctctgtgatccaatttaataaacccatgaggtggctctagcgccctgagacctttgacctctctcccgtttcccctcagcctcaaaaaacaaacaacaaacaaaaaaaacccagcaactcaggctccttctggcgctaccggaaaaacaaaaacgaacaaacaaaaagcccctgatccctcctggacccagctgccaggacacagtggagaagccactgtgatttgtgattagaagtctcgcaccgagcggcacaatgtatttcctccccaaaccacgggctcaattccctcccccatccagccgcgcccgccaccgcctggttttgcccctgtggtggcaccgtcagccaagggcctcgcgccctctccccagctgtgcgtcccacctctctcggcgcccaagggaaacctggacatctttggggacccggagagccggcgagtgattgctgggacacggctggagccgggagagagtagcactacgccccctccctccctcctctctctacccctcaccctccggggctaaatgctgctagctcaaaaacccacagtccgcacggggtggggattggggacaagtgggagaaaacgggggccccgtccgtggtgctgaagacaagcacgcaagccgcatcgcaggcttctgagccggggcaaggggtagggtgtactgtcgcggtgcttcctggggagtccgggaaggcttcccaagcggcagctgtctggggcgctaacaacagccgttacaaggaagtccctgaaatccagggaacccttcggagaggcccggaaggcagaagcagaaaattctgtctctcgggggatggggctggatcccaagagccagagacagggaaagcagaggacagttgaagccacagaactgagaggccccgctatctgtccctccaagcagcccgaagtacatgcagccgccacttctgcctaccacctccggacagcccgagcacccctgaggccagtaacccccctacggggccagggcccggcacgaggcgtcggctgacctgtatggtttgtctgttgtagacttttaccacgtggaagttaaaactgtagatccctttgcgcggggcgatgaaagtgctgcgttctgaatcaaagttgttcccaatgttcactagtacctataacgagacgggaacgaaggggagtgggcaggaatcggtcccggactgtcgtccccgcgcctccgcagagcccttggagaggaccgggcatcggtcttccatccatccctccttcaccagcccaatctgcacgccgcgggaggaaggaacactcacctggtcgaagtagatgatcatggtgcgattactcatctcggacggctcgtggttggtgctcctgatggcagagaaagccaccttggcgctgccagagcgcacagagatgcccagggcagtgcccgtggggtcggacgtggggttggagtcgcacaccaccaggcacttgccctccagcacgatgggctccgtctcattctgcccgcgggccgggcccgccagccacgcagcccccagcagcagcagctccaggacgcccagcatcgcgccgccggcgcccaccccgccccccacccccagggctgctcgcgccagccgccccccccgtcccagtcccgctccgaagccccctcctcagctccgtgcgcagctccgccgccgccgctctggacactacacctcttcctcgcactccgggactagcgtcccctccgcgactagcgtcccctccgcgctgtgttcccggagcccctcccgggcctcaggggtgccgcggctgcccagccgcacttggatgcatagccgctgctgctcggtcccgctgctgccgccgcctcctgcccgcacccgccgctgccgccgccgccgccgctctgaattattgatgcagccggcgctgcagccggagcgggcggagagcgcgcgccgggcacaaaggcgcggacctcggcctggccccgcccccgccgcctcccggcccgcctccctccgaggccctgcccccgccccggccgaggccacgccccccagccaatcctgacgcgccgcgctccccaccgagccaatggcggcgctgtccgcgctcggccacctgaccccgggcgccgttgttattaggcgcggcgaggcgggtggcgcgcggcagcagggttgggctctcgccgtgagtcgacgaagggagcgcgggcgcgcgcccgcgtccgcgcactgagagtcgcctcggccgctcgctttctcgactcccgcctcgcgcctcgatcctgttccgcctccctcggccctcctgcccgcccccactcgtcggccctcaggtaggaggcggcgcgccccggggtcgggagtggaatcgctggaggctgcgagtcgcctgcccgcctgtgggcgcgcccgttgggaggggagcgccccccagcgggcgcgggcgcgagggcagccggcgcgctgggcgagcctggctcagggtcccggcggccggggtgcagggcgcgtgcgcgcgcggcggggcggggcctgcgcggctctggcgggcgcacgtggtgcccgggagctgctgggcgggcactcaccgcggggactcggtgcggagccggggcgccgagtgtctccgtgtccctctgccccagccggcggccgcgatggtggagcttggcctctcgctctctcccgcctctccagcgactgctctgccggccgcggaggtcggatcgagcggtcattcattcatttgttaattcgttcacttattcaggggagatcattgaacccctacggagtaccgggtactgggccgggcgctgaggacgcggggctgagcaaaagcagccgaggcccaccttcgtgccccttaaaacccagcgtgcggggcggcaacgagtactgcttttctgttttgcacttaaaatttacattttgcatccgtactttttatttactgtgcacccttacggcatgctttacgcacccgtacctgcacctcctagccttgagtgtagacaccagatcctgagatgggcgatttttcgagaataatttttaccctaagtggattttcgtgccacgcatggacttggaactacacacacgtagtccaaaacgtgaaagtcaaaatgcagctttgccaagtggcagggagaaaggagagctgagaagatgaggagaggaagggcgcgctccaggctttccagcccgggtgcggtagacgtagccctgaaggatgaacccaggctggtagtagggcggcgggagggcggggggacctgtcagtcaagtccaaagcagaaacgcggcgccggatcccagtcagaggccggctggaacgcttcccacaggctcctggcgctccggtccccaccaggcgaccttgatcctggcgtgctcagcggagccagcgcagcgtcgggagctggagagacgcggggcgccggctgagcgctcctgccctctgcctctgggctagcctctggcccggcctcccggcctcccccagggtacgctctcccccaagagcgaacaccagctttgggatcgccagcagccacgtctctgcttctagatctcttttttttttctttgagacttagttgatagctgtttaaggaattatgtggaggaaatctcacctccgacccccgcccccgttgagcacggccggccagggtcgctgggtgggccaggaggaaagaaaggggcggggaagaagcagcaattttactttaaattaaaatgacacaaaaatattttttcaactcagatctttctgagacatccccagaaagcgttgcaagctgtgattacacctaatgtgagagcatgaactaatttaagaggtgagagctgcataatgaggctgcctcccgtgtagcagccaagactggcagctctggcggcgcgctggaggggaccgggaggggc

SEQ ID NO: 1242689 - DNA, 4001 bp, Homo sapiens
tgctcttcctctgaattccaagttgtgtcacgacttcagcatattcaatagtaaaagagatcacaaaagtggaagctgccaacccaccattaggctattatgacaacactcaaagtatcaccagtaaaatgatgattgaggcaactgaaaaacaaagctagggaaatgtgatggttaactttatgtgtcaaactgattgggctaggggattcccagatagctggtgaaacactttagagtgtgtctgtgagtttcctgagggtttgctttcctgggcttccagcttgcagatggcaaatctcgggacttctcagcctctataatagtgtcacccaatccatcacaataaatctcttttaaaatagctatacagttgaccctcaaacaatgcaggttttaattgtgcaggtccacttatatgtggattttcttccacctctagaactcttttttgagacagggtcttgctctgtcacccaggctagagtgcagtggcacgatcttggctcactgcagcatccacctcctgggtttaagtgattattgtgcctcagcctcccaagtagctgggattacaggcgtgcaccaccacgcccggctaattttttaatttttttttttttttttagaagagactggatttcaccacgttgctcgggctggtctcaaacccctgagctcaggcagtctgcccacctcggcctcccaaagtgctaggattacacgcatgagccaccgcgcctggccagtatttacatttaaaatgtgaaactgggattgcggtggctcatgcctgtaattccagcatttggggaggctttggttaggaggactgcttaagcccaagagtttgaggctgcagtgagctgtaataacaccactgttctccagtctgagcaacagagaacgtgtctctaataaaaacaaaaatgtgagatgatgcctaggttagaatcagcagaggagaagccagagagagcagaggcaaaggaagagaacgttcagcaagccaaatgaaaacagtgtttcaaggaggggcagtgatccacagcatcaaatgctgaacaggactgagacctaacttaacaatgcatttggccacctagagatcactggtggctttgacaagaagcctttttagtggagtggtggagaccaaagcctgactagaggctcaagggttcaagacttggaggagaaaaggcattagtgagggtagactaaggcctttggctgcaaaccggagccgaggaggaggtaactggaggatagcgagggtgaaggaggctgttttgttgttcttaagacgggcattttttggccgggcgcgggggctcacgcctatactccccacactttgggaggccgaggcgggaggttgagcctcctgggcaaacgacgagctgttagtgtatcttgttaagaactatatatatatacaaaatttttgtgcaaatcataaaataagtgctggagttcggggcccatcctctgtccgcatcttcgtgacccgggtccgagtaccccacctggaagctgcgtccgtgccgagcccagcgtgtcgctgtttcccaccctcgccggggatggaagcacgcaagcgcagacctcgagcggccgggcgcagggcccgccctccccgagccccggccccgccctcctctcccgcccccacccccacgagccccgcccccctcccgcccagagcgcgtgcgcaccgcccctagagcgccgcctcagggaggtcgggagccgcggcgcggagggaggactcagcccttcgctcccgcgtttcgccggaggtctcaggccacggcccgtcgccacctaccgagtccgggacaaaacaagctcgtcgggctggaaactgcgacgaggggagcaggcgcgttcctcgaaccctttttcggagtctgcggatgatcacagacctgcgttcgaagattggcggcacgtcgagaaccgcacacgcttttttttccttttatgagcgtagtcgcgcgcggaggaccttgcacgcatgcgtagtcgttcctctgtgacgtgacccgctgccccgtgggaaatgtagttttcacttggcacaccgctccggctcttggcggaaccctaatttaaccaaccaaagtgcttgtgcgttttcagcgttttctcccatttccccagactctatttaaaacaaaatgcaataaataaataaataaataaaacttgaaagcgaacagattgctgcttgctggaggtgggtgggcgcaggggtaatatgaaaactgtactttctgctcaattttgttgtgaacctaaaaatgccctaaaaaataaaagtctgttgttaaaaaattaattaaaaacaggccgggcgcggtggctcacgcctgtaatcccaacactgggacgctaaggcgggcggatcacctgagttcaggagtttgaaaccaacccggccaacatggtgaaaccccgtctctactaaaaaatacaaaaatcagccgggcgtggtggcgggtgcctgtaatcccaggtactggggaggctgaggctggagaatcgcttgaattcaggaggcggaggttgtagtgactggagattgtaccattgcactccagcctgggtgacaagagggaaactccatctcaaaaaaacaaacaaacaaaaaacaagcagatctttagacccagaaatcgcacttctagggaatcttctcaggaaagtactaaggatatggacgtgcaatggacatgtagcctcaatggtattttatcgaaagccatcctggtatcttaaagtttcttacataacctacaaatgtctgtaattatttgttgattatttgataaacttgcaagtcctatgagattgggatcatcttgtgttcacctgtgtattcctagtacctagcacagtgcctggccatcacatgtttctttttttttctctttgagacagggtctcgctctgttgtccaggttggagtgcagtggtgccatcagggctcctgagtagctaggactacaagcacacaccagcacattctgctgatttttaaattttttttggtagagatgggggtcttgctatgttgcataggctggtcttgagttcctgggctcaagcgatcctcctgcctcagcctcccaaagtgctgggattacaggcatgagccaccaacctcagccccgtcagtatttttctgtttattagagaatctcaggcgttagcactgaaactatgttaaccccaaaattaatgcatcattttcttccatcacacttgcagttctttctgtgggcgtcaggtcagtgaatgacatgcccatccacccagctgcagttctacttactgccttttatgaaggttatgctttgagggattttgcaaattttgcatttgtaaaggtctcaggggctctttttcctgattgttaaatatcagccctagctaggccaggcgtggtgactcacgcctgtaatcccagcactttgggaggccgaggtgggcagatcacgaggtcaggagtttgagaccagcctagccaatatgatgaaaccatgtctctactaaaaatacaaaaattagctgggcatggtggcacgcacctgtagtcccagctactctggaggctgaagcaggaaagaaccacttgaacccaggaggcggaggttgcagtgagccaagattgcgccactgcactccagtctgggcaacagagcaagactctgtctcaaaaaataaataaataaaataaatttaaaaaatcaaccctagtcactgatcaggagagatgtagagcttacagttgttttttaaattattttggtctctgccctgttttaaaattttatcgttaatttctgatttttctacaataaacatgtatttattaactttttaaaaagtgttttagagtgttgtccacatgtaaggaattgctctgtcttctccacatccacatttctcaaaagaatcatctatactcagttttcatgtcccacctcctactt

SEQ ID NO: 1242690 - DNA, 4001 bp, Homo sapiens
caggcacctccgtgttctacagcaaaggccttactttgaagtccacgagcgagggcatcagcacagggcccagcatacagcagatgcgtgatggatggaaggtacccctaagaaggtggtaccactcttaggggtacccttgtgaccatgcagagtttgggaaggttgagtcatcctaaagatcaggagtcagtcggtggccaggctctgagacaggtaggtatctgagcctgtctggccagggttggaataagaggtcatctcacggccaagtcggctgtcccaccttttacctggggaagcctaattgacccactgggaacagcgttgtgttttgtcctcagcatgtttggatgggtctctccatatcagtgagaggaatgagcaatgccaaggcctggacaggggccagctgaagggatggggagcccagtgccccaaccccttccccggctctgaaaccctgtagatcctcccagagcctttcaggtagggccctgggacaagcccatggccacaggcctggctgtggacagaaagcagagcccagtgggaaaccacagaggacagcctgattgaataagtgcagggcccaaggctggtcagcccacagactgcgggcacctgtccctgtgacctgctgcccaggatccagctgcaggacctctggggggagctggctggcgggaaaggaagggatggcggctaggcctccaggctggacctaagcccaggggtaggcacccctggcctattcccaggtagccccatcttagactgaggagccacagagacagcctggatcattgatttgaactcctttctttacatatggaccaactgaggcccagagggacagctacgtgtctgtgtccacaccgcggaccagcagcaaggccagagtagggagctggtgatgggatgcctcctcttctggatcttagccacctgaggggcacaatgcccccgagagcacctacacgatggggtctgcaggcaccaggccaagtggatacgcacagctggaatggtggggtgaaccttcatggggacccagccccaccccgaccccagccccacccctctcggcaacaccgtgaactcttcactcttgtacagcagacatcccgctagtcccagctccatcactgatatgctgtgtgatatctgcaagtccctgccctctctgggcctcagtttccttacctacaggatggggagaggcactaaaaagattcctgaacgctctaacaggtgggcagacctcccgaacccaaaccaatccaacccccacaagagccctgggagagcgggggtgggaaggtggacaccacccccacctaaggtactgaaactgaagccccagccctgcgtcgccttagtcctcacttagtcgacccctcccaagccgctggccctgcgaaccgccccgctccacctagcgacgggcggagggtggagggggttcccggcccgcgccgcgcggtcccgcccaccccaccgcatggcccccattggcagtcgccgcggctctgggcagggcgccgtgctctgattggccagcgccgcccgtccatcccgcattcgccatggcgaccacgttgggtcccccgggagagtcccaaattccgtccccgcccgccgccccctcccgtccggcccgggccgcggcattccggaggcgcctcccctcccccatcaccccgcggcccctccccaccggagacctggggttccgggggctgagggaggccggggaggcgtctagaaagttctgctctgagttcgggggttgccgcgggcgccccgactgtgtctgctcctccagcacgccccacaacttaaccccttccttcccgcggaaggcgcgcggcctggagcaagttcccgggccgccttggcctgccgccccccggcctgccgcccccgctcacctcgggccgggacttgcgggctccgtacgtcccagccgctgcggcggggtagagcgggcaccgtgcagctgcgaccgccgccggaggggccgagggagggccgcggagtctcctcctccctcccggggggaggggaagcagggggagcggcggggcccccgaagcggtcgcaggctgcggccccgctgtgaccccggcccaccgagctgctggggtgggggctccagcctaacttcggggcgaggggtgcgggccggggcggtgggctctgctgcagagcgggccgtaccccaacggaggccccacccccgtgaggggccgagagttgcgggggggctcggctttcttggttcaggtttcctcagcgccaactacgtactaggcgcccccagcagaaacggccaccgcgggtcccagctcggcacgtggagcgagcttaccaagtcttcactgttgttacctgcatttttccctgggccagctctgccaccgagtggaagtgggccaacaagtctgtgcccatcgggcctcagtttctctttctgtacaacagaagggttgacgaaagcaaccttgcgcttgttaagaggtggggggcgcggggagcactcggcccggcgggcggagacttttctctgcattgcgatggtggttggcaggccctggggaattacggtacttcgccttcggggacgcccagctgttttggggctttctctctattgggggtaggatgtttgtggtcttgactggaaagccgggacaggcgtctggaggactccccactacatcctgtaccctggaaggcccccgaggtgaatctatttaaaagaagaccaacaattcaccaagatggtggggaaaacctggcctgattgggattttacctagaaaaagaagctaaatattacgaagataaattagttttaccccgtgattaacggagtttagattatgattgcaaccacgcacgccttaaaatgaaccaagaatgaatcagatgttaacactggaagtcttgctttttcttgtaatagttgagtatgtagcatccttcccttctgaactggtttttgcagtaagagattcatttttgcaaaaatatttgagagcttcctcaaactcaaggatcactctgaatcctttgatagtccagtgccttttttcgggtctgggtcacttcccttgcagacgttccctttctctgtgggcagcggctgttccatttctcctgctttgcttccaccaacttcatgaaatcccatacgttgcaagactggcagtttcacttgtcgattcatttgctttgtatttgttatgcgtggctgaatgttgaaagcgtctgttcaccagccagagatagataggagatgtatgtggggtttgagtactcagaggacaagggcatccacattttacagctgaggaaatgaaggctcagagaggctcttggctcagacttgcacaaggtcctacagccagtaacagccttggatcaagagcccagaggtcttgcccagagtttttggaggtggaaatggggctggggaaggtggtggagactgagttgatggtgcacctgaactccagctataacctcatcactatcaggccttctctccttaggaagaagcagtaaatattgtcctgaggatgtcttttgcaggggctagggtggggtgacgtgacccacccgatcgtagaaccaaagtaggtgctggccacaggttttggcagctcgcatgatgttatcttagttacctaggggctgggtgttattaccaccctctcataatgagaaaagtgaagatcagaaatgactggactgggcacggcggctcacacttgtaatcccagtgctttgggaagccaaagcgggaggatcgcctgaggccgggagttcaagaccagcgtgggaacatagggacactctgtctctacaaaaagataaaaagtttagacaggtgtgatggtacgctcctgtagccccagctaacttgggaggcagaggccagaggatcgtctcgagtaactggcccggggtcaccctatgagatgtcagatccc

SEQ ID NO: 1242691 - DNA, 4001 bp, Homo sapiens
ggaagagataacatacctagtttatcctgtatatgccaaggttataacctttttaacttcttaacttctcatacgtgtgtatgtgtgtgtgtgttacacacacatatgtatgtatatgtatatgagagagagaacagctttgatgttttcatgtgttattaatctattaggttggtacaaaagtaattgcagtttttgctattacttttaataattcctgtttggctgaattttaagactagtggggccaggtgtggtggctcacacctgtaatcccagcactttgggaagccgaggcaggtggatcacctgaggtcaggagttcgagaccagcctgatcaacattgtgaaaccccatctctactaaaagtacaagaattagctgggtgtggtggcaggtgcctgtaatcccagctattcaggggtctgaggcaggagaatcacttgaacctgggaagcagaggttgcagtgagccgagatcatgccattgtacttcagcctgggcgacagagcgagtgagattccgtatcaaaaacaaaacaaaacaaaacaaactagtggaaaaagctgaatggaaaacacaatctatcaaagtagcttgctttttcagcatagagcatgctccaggtgtatgtagtctgtggagtcacacctgagtttgaatcccagcactaccactgactgtgtgaacttagggaagtgacttcacctctgcgtctttgtttccttacccacttcctagggttgcagtgtcatcatataagatcatatatgtaaatgcatggtacatagaaacactcaaaaatgagagctgttagtaataatacctcagttctgacctaaagtatttgtagatgtatagaagtaacatctattcagctgctagagctaggatattctgtgcaagaccagtaagttgtacaactaatcttaactacatcatggaatctttatatccaatttacttgctatagtagaatatataaagcagactgcaaaataaaataaaacaaaataaacgcagactatcgggccattctttactgtccatctccatgcttatatccaggttcaggcacacattgcctcatactaaaaccatctcaatagcttgctttctattctgctgccgtgttagttttatcatataattttttttttttttttttttgagacttagtccctctctgttgcccaggctggggtgcagtggcacaatctcggctcactgcaacctccgcctcccaagttcaagtgattctcctgcctcagcctccagagtagatgggattacaggcacgcgccaccacgcctggctaatttttgtatctttagtagatacggggtttcaccatgttggccaggctggtctcgaactcctgacctcaagcgatccgtccgcctcggcctcctaaagtgctgagattacaggcgtgagccaccgcgcccagccttatcatagaatcttagcatcagaaaagggcttagaagtcacctggtccaaattgctgctgtagaattgtggatcggctaagcacaccgtctggcatgagagagactcctccggctgaaaccctcacttccccaattaccctctgggcttctcaccaccggccccatcccctcgccctaccaccccgttctagctccaccaacagcttgttggctcagtggtggtggagtaaggagtaaagaggaaaagtctccccagtgctcagtgagggcttggatcttctccatgctggtccccaagtccgaggccgcccggagaggagggcctaggaggaagaggggcggcccccaggcgcgggcggcggtacctgagctcctccaccagcccgcacagctggataacaggcagctccagctccgacccttcatgggagtcggagaggacgctctcggactcatcatcagtcatcactctgccgaagcggcccctgccaatgccgtgtgcccaggagctccgggtgccggcggccacgcgtcactccggctgcgacgcggtggcgcgttgcccgggcgaccggacgcgaggaaaggggtggggcttccggtggcccctccccgcgctgccccgcctgtctccgtgcggacccagccaggttgctggctttgagcgcacacctaagcgcgttcagtttcacttctttaacaataactcttaaattgatagtaataatagcagctgctgtttctcagcccttactgtgtccttggcagcgtgttaagcatagtttatgaaaaccttcgccacaaccttgtaatggtatctatcaatctctccattctcccaataaggaaactggggcctagaaaattaacacgatttatcatagtgtccttcttcccctgtcccactgggaggcccctgctctgttcaccacctggtgcttcctacatgctaacagcagctcctctcagatattaacatcctgcatttctggaaggaaaaaaacgtggctgataaaaatgggtatacattcaagagacatccctaaatagttactgaatatctactgtgtccttagtatcctagggggaatgtctggaaaagaccattctgatcttcaaggagcttccaattaaatgagtgaaacagcctctaaacaagccgctggaacctggggtgatgacagcaacatcatgcgtcacactgtgcatcgtagtcatctccttaaatcctcaaaacaatctggtacagttggtattattgccgtcatcttacagatcagaaaaccaaggaatggagtagcttaggttccattccactcaagaatggaatcaagctccggtggaacccaaagtccatgctgttaacttctacgctgatgtgggacatggtaaggatcagggaggcaacacaggagctctctctctgctccccatggggatgaaagaggacagagggcaggacggggagacttctcctagggagggtgaactctggatgtgcttagaaagcaagctgtgatgaagtgcttggggagcgggtcagcccccttcccctgcaaggggcatgcattagcattgacaggcactccctggatctgagggagggtttttgttttgctgctcagggtgcacaaggttggggccagaatagaatcactggagatgacagcagagagctggagccctaccaccttctctctggtggtaggcctctttaggttctagggacaatgcagaccacatttagcaatacttaatatgtccatatacaaggtgacacaaatggatgctatccccaggtgacataaatagatgccagctccaagtgaacccagagcaagaatgggctctgtagcaattcgaggctatgatgcaaacagccctgccaactgggctgtgtgatacaacagactctatggcattgggggtgtcagtggtgaaaaaagatgcagcaggaatcttaaagcaagacccagcaggagaatcacaataaaggacccaggattctgaaacaagaccatacaatccacagcagagaattacgtgtcttttgagaaataactcctggcctgttactataccctggtagagacagaacgctggatatatggggtaccaagtgaccatgcatccagtcctgccctctaccagctgagttattaagcaggacaggcccagcctcagtccattgcaaatggaaatggttaatccagcattgggctccagcaggaccagaaagcatgagtaagctgcatgagcaggtagcccagaccaacatggcacccaccacatttgcaccaggatccctcccccagctcaaatttatcactatatttgcaggggcttggggagttcatgaccacctggaagagaaggcaaaggcttgagctcagtttacagatgggctggcttggaagccaaaaatggacagtggctgcattacaaccacttcacgaaaggtagtgaaagacagtagagagggaaagcttcccaactggcagagttgtgagtggtggtgtggctggtcatctattttgtgtggaga

SEQ ID NO: 1242692 - DNA, 4001 bp, Homo sapiens
ctgctcctcctgctgcagcaagtcggtcagcttggccagtctagagaagtcggctgtggtcacaccagcccagctggccggagggcccagcagggtgaggctgacccacaggctggccaggcaggaggtgtacgacccccgccccctgccccaccagaaaacagaggaatgggaaacacagcaccggtggcagggaagggctgctgcgagtctcttccccacagagggtccgcagcgggcccaggcttcccagcacgcttggcaccgagggcggtgccccgccgggttactggggacacacggcagggggacccgtgtcttggctcagccagggactctcaaatgaccccacgcaagctccggagccagccacgggcggtgggcgcccacctgaggccggcctcttgctcggcgccccttctctccgcctcctgttgcacctgcctcctcctgagccgggtcaaggcttcccggacctccaccagcctgggacacaacaagccattcccgagaggcccaggcgggctgagcagcctcggcgggctgggggtctggccaaggggcccctgtggccacctcccatggctttcctgggcctctgaaggccgcccaggcacgtacaaacccggccttttctagctggacctggatgtgtatcccccactccagcgacacccagcgggagatgtggaccccccaccacacctgccgctgctttctcgccaccacctccccgccctgggcctgtgcccctaggtgtgtggggggtaccttttgtccagggcctgcatctggttctggagaccagagaactgcgaggaggaagaggaggctgtgggctggacctaggcccgggtctggcacctgcccctggagtccacccagctccggcaccactggcccctgggagctctgggcctgggcagcaggggtgagctgggctccaggcccagaagcagctgcccccaacacccaggaaaggggcagctcgacctgtgggtgggggagccgctcacctccggcgcctccttttcgggggcctgggctgccggccgcgcctcctgctgcaactgcctcagctctgagccctgcagctgcacgcgggcccgcacctggagcagctcccgcagcaggctccgcgtggcgcgctcacagcgctgcttgtgctcccgcaggcaggccacctcggcctgcagctccaccaccctggccggggcgagagtgggcgagtctggcggtgcccgccgtggaggcggaggcggcggcgacgtggtcctcccccgccagcaccccctgcagggctcaccactgctccagctggttccagtgcttggcggtgtcctgctcggggacagaggccgtggatgtcggatggctggactcatacctctccgagagctcctccaggctcaagggctcggggctggccaggcctcctgccaggaggagccccaggtcttccagggtgacggctctcagctgggaaggggccgatgcccctgagggtccactgtcagccaactctacaaggaggcatcttgggagcttgccccttggggcccggcccccactggagcttacgggaacaaggccccaaacccccgcaggaccctcgcccaccacccagagctcaacgcgtctccttgggtcacacaggatccagacgggcttggctcagacaagtccagggccctgcctgaagacacacagcactgggcggcaggaacaagcgagctggagggagcccggggtcagaagcagagcggtccccaccctcacacctgtggcaagcccctccctgggccccgctcctccgctctggtcacctgacatggctgctgggctgcaccggccaccctgccctcggctgtagcttgggccttggggcctctgaggttgcccagagctgggcacaggccaggggggtcaggagccagaggaagtcccgtgagagctctgggccttgagggacgagctgctgccctcgtctggctgccttctcagggtccccagggaggcaggtgtggggcagcggggccgttccagaaccttccttctctccccagaacctcacggcttcacagcccaactgccaatggaactctagccctcagctctcccactcccgcagggccccccaactgcctgcttctggatggatctgaggggccccactcccgagagggcgcagacacgtgtcctctggcaaaggggacttcttcagctgccgagggaggggaaggaggccctgacgaggcctgggcacgccgggagggacgctgggagcagggaggccgagagccccaggacaccccggacacagccaggcccacgtccgagcggagcccgaggcctgggcagcgccatcggggtgaggggcacagccgggctccacgggaacccatcttgctcagcagccccattaaaaggcaagaagcagcgatgtgaatcctaaccgctgattttatttaaccgaatatatccaaaatatgatcacttccaggtcctcagtacacaaccaccacgagggaaacccagacctaggtttccggcgccgactctgaggcccgggagttttcttcttgcgtcaccccagcgtgggcaccccggcccgcccccctccacctggagcgcctctgccttgcccccagacccaccagccaggagccagaggagggaggctgaggggcggggacgaggaagaggatgtggctggtgccctgggtggccgcagccgctgtctttcacgcctttctcactccacacggtgccccgaccccagggtcccgaaagtcccaggctgttggacgtggtctgggtggggtgggagggacgacgctggcaaaggcgggctgagaggatttctttatttcgcgttcagacccaacacactcggacaccttggggccctgtgagggctaagcagggtggtggcgtcagctcccggggaggccccactccctggggaggaaatacacggcagggggccgcacccagccccccacggagggacccgtgttgctctaacagggacactgaagttgcctctgccgccccgtgaggggcctgtggcggccccagacccagcccagccaggccagaggagcctcccaggggccctcaggtggtgaggtgggggcttcccggccccggtgcccaccggcccttctagctgcctgtgctgggccaggtgtcctctgaggccggcaggagtctggcccccgctgcacctgcgcttggtggctggcaggggcggggtagggaggtcaccctcgaggccggggtccccatgtgctaggggaagacctgccttcccagccagtgtccacagggcagcaattccacgctctgaggctcagggaccaaggcagggctgggtgtggggcccagactccaagctctgggggttgggggaccaaggcagggctgggcatggggctcagggccttggaggtttttctcagctctcaacatcacagcacagggcccgtgagtcaccccagtcctctgggcctgtgtacccaagccggatgcaggccggggagtgcacgtggggctcctctgtggcgccagtgtgaagctgctctccggggcggtcgcagcctccaaaccctggtgctacgagtccgtgcctcaggcccagggaccacaggccgtctgctcatggctgaaaatgaggccaagcagctcccaagtctcgaagactccactggtgtggaggcagaggggcccttccagggcagggcagccctcggggcagcagcaggggcaagggctctgtctcacgcacacgggcacaggcacgcaggtgccggccctgccgctggctcccaagaggccgatagcccggtagggaggtcacacacacacagctgatccctggaggtaaagaaacctagacgaggagagtggaggctgggcctgcgcaaggaggcgccaaggggggagaccactgcccacaacagggtcagtcccgcgagagggtcagttccgcgcctgcc

SEQ ID NO: 1242693 - DNA, 4001 bp, Homo sapiens
aggctgaggcaggcagtttggttgagcccaggagtttgagaccagcctgggcaacatggtgagacctcatctctacaaaaaatgcaaaaattagccaggtatggtggtgcatgtgtgcctgtagtcccaactactcaggaggctgagatgggaggattgcttgagctcgtgaagttgaggttccagtgagctatgattgcaccactgcacactatagcctgggtgacagagggagaccctgtctccaaaaaaagaaaaaaaaaatagagaaagagtccaaggaggtgcacaggctctggtcctcaaggttgggaaggcgaggatggggacagcaggtgatgggggcatggaatcgagtgcgtggaatcaagtgccacttgtgttgagatgcccactaggtggcctggtggagagggttagctacccaggtcaggctcagggcagtggttggggccgacgcagcagataaaggagggtgttcaggagaccagatgtgagccccagagcaagaagtgggccaaaaatagaacctgggcagagggaactgttcctacctcattgggctgggcaagaatcaatggagagtcatggaaagcactcagcccagtgccaggcaaggagtggacacccatgactgtcgcctggtgttccgctatactgctgaggagctggacccaagatccagagagggccagcagctgacccagggtcacacagctggacgagggtctgaacccagtttgtttttgttttttgagatgcagtctcgctctgtcacccaggctggagtgcagtggcatgatcttggctcatagcaacctctgcctcccaggttcaagtgattctcctgcctcagtctcccaattagctgggactacaggcacaccccatcatgcctggctaattttttttgtatttttagtagagacggggtttcaccatgttggccaggctggtcttgaagtcccgacctcaagtgatccagccacctcagcctcccaaagtgctgggattacaggtgtgagccaccatgcctggcctgaatccaggtcttaatcctcagagttcatgccttttttcctttcctttcctttcctttttttcttttctttctctctccttccttccttccttccttccttccttccttccccttccttccttccttccttttttttttttcaggatctcactctgttgctcaagctgtagtgcagtggatcatagaatcatagcttactgcagcctcaaactctaaaattcctgggctcaattgatccccctgcctcggcctcctgagtagctgagactacaggtgccaccaccacatccagctaattttcttattttttgtagagacagagtctcactacgttgcccaggctgttctccaacactgggctagtgatcttcctgccttggcctcccaaagtgctgggattacaggtgtgaggtactgtgcccggcacccagagttcatgttctttgccactgggcaacactgccagggggactgggcccagctctgacctgttccaaagtgcccccctcgcccggctgtcctccccagctcctctctccttcccttgcctgactcccttcccttgtcctctccaggcccacccgtcctcccctgcccacccacccacccaccccgtccagtgctagctcacttcctcacgctccaagtgctgggcgctcagcgtctccagctgccgccgcagctcttcatttcgctccagaagcatcttgccgagctccgcggccaacagcaggtctttctccttctgctgcagctgcaaggctaggtcctcgggctcctcaggccctgggccccctcccaggaatgagtcccgccgctccagcacaaaggggaagaagccctcgtcgccgctgggagaggcgccccctgagagcggcccggacgggaagctgggcccatctggagagctcatgtcacctgcagcatctgcggggacaggtggctgcgggacactctactctgcagcctgacaggggctcaccctccgcccagcacctggccctccaggaattctccacctgctgccagcctgcccggtcctgcagccagggcttcctgggccacaaagggttaatgacctgtgttttggctacccagttccgttaatgtccctggggtaaactgaggcaggaagcagaaggaaatgacctgcccagcctttggcctctgccagacaatctctgtccccaggaaagctcattccagtgctccagggccacaggccacctctgctccctgtcccctctcttcccagaacccagcagtttggcttgtagcccctcgccatctgagacagttcccagaacccaggttctcagggactcagcagttggagttgggcccagcctcttctctcaggaatgcaggaccctaaggcttgggaactgaggtatcttcgcccccaggaatccagctccttcccctgccagaagcccagatcccagcccctgacctcccgggtctctcgccctcattctcctgctacctcctgagcaggtgctttgactccaccctccagactcagaggtccccacctccaatgtcccccaccaaggattcccaccccagtccccattttccacgggactcaggcattcatgcccccacccctccggactcaggagccctgaccctcagccccccagtttcccagggccctggcgtggggcccaggacagggcgaggtaacaggttgtgccggccgcccggccgcagcgcggctcggagtttctgtttacttcccggtccgcccctggggacgggagccctgggctcccctagggcggctcaggggctggggttcaggggctcgggtcagagggcccgacacaacagctttaccagccccagccctccgggggctcaccacccactaggcacacacacccgtgctctccctcctcctctcgcccggtgtccatgtgcagccctgctcgcaggacgtgagtgtcacggtggtcccagcccagccgcccccaggccgctcccggggacctccctgacttggccctcgcgggccccgctcccccgcccccctccacgcgagagacagggacctggagaccgctccccctccccttccgcacctagctgcccaggtgttggggcctccagccccaggcgtcggaagcccagagaagcggctgggctcacccccgacggctgagttcctgccggcgcccccggttccccggcgatcccggttcccctgcccccgccccggctcccccaccttctccgccgacgcggccggaccaggccctccccaggctcgaggggcccggccctcggcgtcccccaggctctcacccgaagccgccgggctccctccgaggtccccgcggtctccggtcccctcttccggaggcggctccaggtgtgcggccaacacaggtgaaggggcggggccgcgggaggggccggggcgctccctggctgcctgaatggccgggcggggtcgagggagagtcgcttccacctgggtggggggcactggcccaacctgctgtggttgcaaatggcccggccagttaactgagcatctactgtttgcagatcctacattgaggtagcctccgctcctttcccgtcacgactgccttgccctgtggggcaggaaattattagcaatgacaacaacaccgaatctgacatcttaagcattctgctaagtaaactcttttttattttttagagatgggattttgctctgtcacgcaggctggagtgcagtggcaccatcactgcagtctcgtcctcccaggctcaagcgatcctcccaccacagcctcccccgtagctgggactgcaggtacatgccaccatgcccagctaatttttgtactttttgtaggggtggggtttcaccatgttgcccaggctggtctcaaacttctggattcaagcaatcctcccgcttcggcctcccaaagtgctgggattacaggcatgagcctct

SEQ ID NO: 1242694 - DNA, 4001 bp, Homo sapiens
ggtggctggcgcttggcctgcaccatctgcgtgctcctggaggcggcgggctgggtccgcatggggcccaccccccatcttttccaaccatccccccaccccagcaggctgagcagtgccggggccctggggtctccctgaagctatccagcacacccaggccaggcttgggctccctaggcctcagggtgctcctgcagggctcaccactgcctgccaggcgcagtgttgcagccgtaggacgtactcatccttcagtttcttgagctgcagctgcagccgggcattttcagcctctgcctgacggagctggccttggcagctgcacagcacctggggtggaagcagccctccacctgtgccctgagagtggaccccggctgagcttctggggcccccaccctccaggtctccaagcagtcagggcagagcctcaccacagcctgtgtggccagtcgctgcccggctgccctggcctcctctcgggctccctgcagctgccggcccagggttgccctgaagacacgggggtgaggctcagcaggcccacgatcaggggttctctctgctccaggatggggccccaggtgagatggccactcacacacgcgtcaccagtgcctgctgccgggcctcctgatgctccagcgcccacttcacttccccctgcagctgtggggcacacagggctggctggatgagaccctaggcttggggtctctggtgctgccctctcccctgagctaggtggctgcacactcacgccgctccccagcctgtgctgctcattctcggggttcatggtgttcttgggctgcacctgaatggaagggagggcagggaaagctaaggggtgggtgagccccagtttcactgaggcccctgctgaggcttccctctggcctttcccagccaggctctccatatgctcatggtaacctggaatctgtggtcatcagagtgtccaggcacctgggctttgtgtctgagctcttgggctgctgcccggggatgcctggggtcagactccactgggactgcacagccctggctggtgccatctcctcgcagctccagctccagtacccggctctccagccgaaggatctgtgggacaactggcatgagcaggtgcacctgcccgcgggccacctggggtaggtgaacattcacccggtgcacgctcaggggcgcgcagcactcagaggcaggctgagacccacagatgccatgtgcgtgtgcatgcccatgcagggcacgtgtcctgggcctgcaccccccgtcccccatgcactgaggctggttcacacggctgctcacctcactcttcagctggaagatttcagcctcatgctgctcatgtaggtggtgggttgtgatctgaatgtcgaccagctccttggagatctgtgggtggccaggtgagaggtggcgtctgtgggccctgctggcaccctccctcctcacgagcacgctggggccccacacccacctgcagctgctgctccttattgagcgctagatctggtgggacctctgcttccaagctggtggcccacactgcggtgcccccaggagctcctggcagccagtccttggctcgtagcacaacctggggaggtaccgccacccattccccaggtgggtcccaggctgggctgtggccccactcccatgcagtcaccagtcccgcctccctgcctggctgagctgtaaaagtccctctcctggctgaaattaggcccagggtgcaggaacctgcaccctcctggcctttgggggaacgggcagacttcaaccccatggcaggagcggcaagtcccagaggactcacattctccacccgccgagagggaggtccaggcctggggcctgtggtggctgcgtgctccataggctagggaaccctggccagctccgagcccggtgctgcctccacgcccggcttccccatggctgctgctgccactggcactgctaagtgcgttgccaaggcctctgttggtcccaggtgactcccagggcaccgcccacaggggccggccagaccggtggttgctgaggagggaggatagctcttcctctctccatgcctccgtttccccatctggggaatgcggcccagcgccccctgcacataccctgtgcagatggaaccaggtgcgtgaaagcgcccagcctgggcgcagcggacgagcacgcggaacggagcggcagcccgcccgcaggatgccctgagctacactcgctggacaccttctgtgtacctagcagtgctggctgagccccgggacgggggaagtatatctctgcacctctggcctgagaagaggggcgcagacgtccccatcaggggccggagaactcggaaacgactggctcagccggggcgtcgggagggcttcctggaggaggtgccagcgccgggcgcggcggggtcggagcgtgcgcgtggcgccccaccgggcacgcgcaccgccggcgggccttgtggtctcatcgcgcgcaggatccgggccgggcgggggcgggggcggggcgcgtccgcggaggggggcggttggcggctcccgagcccagcgccgcgctcagtccggaccccgtgaccggcggccgaggccccgcctccgtcagtctgtccttcgggtcctcagcacagccgtgccggtgaggcgggcggcgggggaacgcggctgtcccgggtcaggggtcttgcggcggcagggcggggggccgaggggcggggcctgggaggaaggcgtggcctttggggactggggctcggactgggggcggagccggggctggttggggaccggccgggttccgctcctgctggagcccggtgcgtggaattccacgcgagtgccggggagttcctggggagccgggcttctcttttggcccccagcgtgttgaccgagcccgcttcgcacagcccttcctagggtgtggagagcgggccccgccctgaaggggcaccgtgggctggggggcctgttttggagcaggcaccggtggccgagctccgtgaccatgaaggtcaaggtcatccccgtgctcgaggacaactacatgtacctggtcatcgaggagctcacgcgcgaggcggtggccgtggacgtggctgtgcccaagagggtgagggcaggccgcgggccgcagggacccggccgtgtcccccgagagcctccccgacccccctggtaggagcgagcccccacgtgctctgctctccggaagtcattggcggctggggttccttgtttatcttggggctccctgaagttacggcacctctggcctccgccctttcgctgctgcctggcggtccctgcacgcgctgggcgcagtcaccgcccgctgggtccccgctccccggcgctccccggggctctggccggcctggggcagtgagcgcggcggatcccgatatggagggagtgggccaccgggaccgtctgtgttaccgtcactcccgtccctttcagctgctggagatcgtgggccgggagggggtgtctctgaccgctgtgctgaccacccaccatcactggtgagcgccggcggggcgcggggaggcacgaggacgccgccttgtcccaacccgacctaacccggcccccgcccgcccgcccgcagggaccacgcgcggggaaacccggagctggcgcggcttcgtcccgggctggcggtgctgggcgcggacgagcgcatcttctcgctgacgcgcaggctggcgcacggcgaggagctgcgggtgagcgcgcgctcccgggaggggcggggagggcgccccgggtccacccgccctcacaggtccgcctgctcctccgccgcagttcggggccatccacgtgcgttgcctcctgacgcccggccacaccgccggccacatgagctacttcctgtgggaggacgattgcccggacccacccgccctgttctcgggtacccgcagcgcggagcgcgcccaccccgcctcccgccggccccgcccc

SEQ ID NO: 1242695 - DNA, 4001 bp, Homo sapiens
cttataaatggttactttgcacaaaaagagtttgccaagtacttggtagcattaacacaagtcatctatttacttgagaagtgcttacaaacacccatagcaaaggataagttataactttcaagggattgataatcagaaaattatatttaaaattataaaacaagtatattctcaagaacaaaagcatctgccatataaagcagattatgaagtgcttttagtaatttagtgaatatatgtactgccacaaacaaggagatttcaaaattctttactgtattctcacaggaaaaaaggatttttttctggatgacagagagaacctctcccacttacacgtttcactcaacccactccccaaaacagtagtgttaactcaaattcaaatttcagcaagaaaagtagctgaatattacttgtttacctgatttagaaaatgtatacaaaagcttttggggggccgggcgtggtagctcgcgcctgtaatcccagcactttgggaggccgaggtgggcggaagacttcaggccaggagttggagaccagcctggccaacatggtgaaaccccgtctctaccaaagaaaagtacaaaaattagctgggcgtggtcacgcacctgtaatcccagttacttgggaggctgaggtgggaagatcccttgagcccaggagatggaggttgcagtgagccaagaccgcgccactgcacgccaacctggatgatggagggagaccctgtctcaaaataaataaataaaaataaagaaagttttttttttttttttttgagacagtctggctctgtcgcccaggctggagtgcagtggcgccatcttggctcactgcaacctccgcctcccgggttcaagcgactctcctgcctcagcctccccagtagctgggattacaggcgcccaccacaccaaggccaagaaagctttttgaaatcgaaatattatcccagtatatcagaaagataaatggcatctttttgtgtaaggctggcagggctgataatcccaccactaaattgttttttgtcagcggatatccagcttgtaattatatatagcgaaaataccctctaaagaagacgcaagaagagagaaggggcaaatttgttttcgatcgtttaaacggtcaagaaataacagtcattcaggtcccagaaaacgcactgtgggtaccagaagtcagctggctctgcaatatgaacacccccccactccagcccagagcataaatcctcagggcctcctcccaggttccacaggtaacagacacgtaacctttccaaggcgggggcgctcaccccgcccggcttcctgcccattcagcctgcggcccgctcacctacagagttggatgaattccttgtgcagagcttaggtggcccctccaggctcctctctgaccagggctcgcaagtcctgcgtgggagcaggacactggttagccgcgcgggccactcgtgagccatcagcaccctcagcaggccctccccgctcaggtgctgtgtgacatgcggcccggccctggccctgggaaacgacctcaccggtgggtcccaccctctccacacatcaaagtcacctggggaggcgcctggggagtcagaagtgaaataggggggaatactgccaggctttacacgtctctaaatggtgcatcacgtgatgactgtctcttcccgccaagggctgtggggactacagccggggcctggcacctgctcataaaggccccgtccccccaactcgacccttctcacgtgggctaagggcctgacggggcggtaagacatcctggccggcccaacccgccttacacaggcgccaacatacagagtttccaagcgcggtaaggcaggacaacaacgcgcgggagcggaggccgtggcgtctaccctcaagcgggagcttccgccctttcttcatcaccgctcacctgccacgacgcacgacagggtttcccgcccagccgaccaggctcacgtccgtgggcgggacttccggccggcagccccgccgcccctgcaaggtgtcttacgcttccgcgggtgccctaggttgccaagggcaatggggtggtcggtgtcccggccgcaagattttttaaaaagctacaatttgaaagagaaatctcaccgcccccggtttttagggtttttacctcagacgagcattagccccaaaattaggggactgtgcacgcggttgacgaggcctggctatgggacggtggccgcgaagcacaggacggcgaagccccaacctcccctccacctggcatctgtgctgtgtgttctcccttttgttgggcacctcgctaatcgtcaccacagccccacaggggcagccaggcctccacctcaccagggggcttccggagttcagtccaggaggacttctccgcgcctggaccaaaggatcagagtggggccaaggcctgtcccttgccgcctctgccgtaaaatgcagcccatgggactgctaggcgatgaaggcgaggggaaggtccccgatacagtgaagaacagccaaagaatggctgacacattagcgtctggaaaaccaagtccctgtgaggtaccctagcaaatctaacaggttctcacttaagagacgctggcctcagagacagttgcagcagattaggggccttagctactaagagtcatgcaccacggaccacgttcctcagccctaagtattaatacatcaagcccaaaaccgggaactgcccccacttctggattctggatttccactctgtttgcatctactacttcctttttttttttgccctctaatatgctggtgaatgctattagtcccatgtgattaaatttaagagtatatataatatgagtagaatgaccccataaaatttcaagaagtaggttaggcagccaaaactcaagttaattaagataatactacatacaaggggatggtcttgttttctgggaaaactacatatccagaaatatctttttaaattctattcattttaacaaatgatgatggtcctaaaatgtccatagctaacatctgcacatggcttaaattcattattgaagatggtaagaaaaaaaatttttaattatctctaataaaacacaaggataatctatgacaagtaactttgaaatagcaagccaatattgatgctcagtgagaaatggataggattcattttctaggaaaatgactgtctcctttcccctccccacaaagaacaagactacattattacaaatgagaaaaatgtttattaagaaaacaatttagcagctctcctttagaattttacagactaaagcacaacccgaaggcaattacagtttcaatcattaacacactacttaaggtgcttgcttactctacaactggaaagttgctgaagtttgtgacatgccactgtaaatgtaagtattattaaaaattacaaattgtttggtgattattttgatgacctcttgagcagcagctcctgaaaggaaaaaggagaaaagcaaatctttgaaagagtaaacttcaagagttacatactcaattctgtaaagaaacttttccttttcaaaagcaaaggtgttttaaagtgacccaaaacagatgcagttagcttactgagtcatatcaacataaaagcctataattctttttgttattaaaggaaatctaaacagtagtgtggttgaccaaactttaaaggatacacacaggcataaaagattctcaaaggacaccctactgctgcatttgaattttaccttgtatctgttttataataaaaaaggagaaaggtatatttgttctgaatgcatttgtaatttaggaaggatctatattaaatatcgccagaccgctatatttactcaaaacaaaaaaactactaagaaaaaaacttgtgcatcttctataacctgaagattcctctttcccaaatattcatggactggatagaatttttttttttttttagactagagtctc

SEQ ID NO: 1242696 - DNA, 4001 bp, Homo sapiens
taagacactccctcatggtatgacctggaaaactaactgagatgaagtctataaagttcctagtctccagctggctcagggaatcgccttgtcatccctgggaacctaccatccttcttgatgctcctcccactgggatttgggacatggttcttccctgagctccctgtgagctcctcttctcagaaatgtccctgagctctcactataggctggggtgggtgttggggcaggggaatctcagcagttaagtctattagtttactttgtcctcacaacagcttcagggagtaagaactattagtttctacagatgagaaaattaggaactgaccagagtagtttaagcaactggtccactgtaatcccagcactttgggaggctgaggtgggaagatcgcttgagcccaggagtctgagaccagcctgggcaacatagtgagactctgtctctacaaaaaaaataaaatgaaaattagccaatcatggtggtgcacgactgagccatgactgtggcactgcgctccagcctgggcaaaagagcaagattccatttcaacaacaacaaaataaatctgcttcatgggcacagagctagctggtggcaggagcaagcctgggcttctgtcctagactttgtttttgcctcaagcaaccttcccttcctccctgacatcatctaccccagatcttttacctctggataaagacttcttttttttttttgagacggagtcttgctctttcgcccaggctggactgcagcagcgctatctcggcttactgcaagctccacctcccgggttcacgccattctcctgcctcagcctcccaagtagctgggactacaggcgcccgccaccatgcccggctaatttttttttttttttgtatttttagtagagacggggtttcaccgtgttagccaggatggtctcgatctcctgatctcgtgatccacctgcctcggcctcccaaagtgctgggattacaggcgtgagccaccgcacctggcctgataaatacttcttaaatctctgtctccagccctgaccagtaactaatcagacacacccacctggacactcctccttccggcccatctttctgtggcacccctcagctctctctgccttgcagcctggccagctctgtgcagttctgtcccccacactaacctgtgagctgctgggaagcagaagtctgtcctgctatggttcactcagccccaggtaccagaagggcaaaaccgagttccctctcacaccagcctcctttttttctgttcaagccagcattgtttcccatctccccatctgcccccaagtctgaaactttgcccttgactcattcctcgcctccatcccccacattacatcaggcagagactctgcccagcgctgtcttcagtgggagcttggcttccttgcttccttctcatctccactggctcagccctcatccttcacacccagagagtctcaaaaacttctgggcctatttcttcctctctggtctctcctgacacctccctcatcagctgcatgcccacatgtggtggatctttcacaagggctgccctgaccatgtaatgcccccttcctccaaaaccgtcaatggctccctgcttccttccccatccagtcaaaacttttcaggccaatcttgaagctgtaccttccatctagcccctccttcctattcagtctcatctccctgctccccaacattgagctttcttgagggccagtgcgtcccctcactttgtgacttggtttgctgcttccaaactcctgtccccttcttgtatggattatcttcccttgatccaaagtccatccaccgctcatctaacacatgccctgaaagatccagcgagggggtcacctcacagtggaggggttaggagcaaagactctaggtcaggtcacctggttttgaattcagctctcccatcagcaggcggtgacactgtgagctcaaagtcacttctctctgagcctcagtttctacagctgcaaaatgaaaataataacaataattacattagaaggctttggtttgcatcaactgccttactgcttatatctggcaaatagtacacgtttctgactttaaatatcatctatatgccaaccactcccaagtttctctcgcaaactccagcctccttctacgtccagctgcctactcgccataccaaataggcagctccaaccccccaagtctgaagctgaatttctgattcccacccacccctacacctgctctctcctccttctctgccagccccttccttccggttactagggccagaaacctgggcgctatccctgacgcctcttcctctcgcccccaacttcccatctgttgggtgagctcatgtctctgctttccaaatacacccagaaaccagcatcaatccctggcttcctacaactgccttctgggtgctctccctgtctccatccttgccccctacagtgtattctcagcacagcagcagagggaccatgaatctcccgtgttcagaacgtccccgtggctctccacctcacgcagaggacaagtccaagaccctccagcagccacgaggccccgcgagttctgtgccctgctctctgcccacctgtatctcctggttccctggttcactctgccccagccaccctggcctcctccctatgcctcaaaccaaccagacagacatgctccttcctgaggaggtttgcacggactgttctttcagcctggaatgttgtccccagatacctgcaggactcactccttcacctttttcaaacttttttaggccgggcgtggtggctcacgcctgtaatcccagcactttgggaggccgaggcaggtggatcacttgaagtcaggggttcgagaccagcctggccaacatggtgaaatcccatctctactaaaaatacaaaaatcagctgagcgtggtggcaggtgcctgtagtcccaggtacttgggaggctgaggcaggagaatcacttgaacccaggaggcagaggttgcagtgagccaagatcacaccactacactccagcctgggcaacagagcaagactctatctcaaaaaatatatatatatatatattatatatatttataatatatataatatatattataaatatatattatatatattataaatatatattatatatattataaatatatattatatatatataaaatatatatttataatatatataacatatatataatataatatatatattataatatatatattattatataatatatataatataatatatattataatataatatatatattataatatatattataatataatatatatattataatatatatattatatataatatatgttatatatattataatatatatattatatatattatagataataatatatattatatatattatagataataatatatattatatatattatagataataatatatattatatatattatagataataatatatattatatatattatagataataatatatattatatatattatagataataatatatattatatatattatagataataatatatattatatatattatagataataatatatattatatatattataaatatatatatgtatttgtttagattacatctttcagtgaagtcaaattgcatgccatccccatctcttcctctgctcttttttttttttttttttgctgaaatgcttatatcctctgacatgctaggccattcgcttacttatgtctgctgtttactatctgtctcccacctgtacccccacccccatcctactgggatgtaagttgcatgggacagaggtttctgtttcttttctttaatggaatatatctcggcacatggtaggccttcaatacatagtttttggattaagtgagtgaatggataaatggctggtgttgttcctgaagcagaatgcagaaacccttc

SEQ ID NO: 1242697 - DNA, 4001 bp, Homo sapiens
taagcgcctgaggatattggctaaacgatcacattatttttgtttgtagtccacccaagcctgaactgagccatctcttccagccaagccatcctggcaggcatctggtagccctgccacattcctctcatccctgggtgtgtcccacccaccagcacctgggccatcccaggctgtacccgtcaggcccaccaaggccctgtggccccagctccctactcacaccacgccaggcctcgggcaggagtctgaggtccagtagaagtgtttcaccacgcgcaggggcagacggtaacggacgtaatcacggcagcagacgctgtcttccatgttggcgccgtaggggcctaggggaggggtccccagtgaattcacaagctggagcccagagaggtcaccctcggccccagcccctgatctcggcctctccaggctccaggaaagagatgcagtttttctgttctcatgtggaaggatggtgaccagaggattctgagccctccaagaccctacccttggagcttctgagaagccacttagggtccaatgtctacactctgggacagtcagctctaggagcggggattcagaacaactaagcatcagctgtagcctgaggcccaatttcctcctctgaccaaaggggtaataacagtaccagcttcagagggtctttaatgcatgaaaagcactcagaaagcccagcagctgggagcaattcttgtttatagctgcctgaccccactccagtgctcactcctccacccaacacagcaaaagtatagagtggggtggagaagaggagtcaggaatccatgctgaggacaggttctggacaaaaatggatagtgagcccagagcagtggctcacgcctgtaatcctaacacttagggaggccaagatgggagtttcacttgaggtcaggagttcgagacaagaccggtcagcatggtgaaaccccatctttactaaaaatacaaaaattagccgggcatggtggcaggtgcctgtaatcccagctactcaggaggctgaggcaggagaatcactttaactccagaggtggaggttgcagtgagctgagattgcgccactgcactccagcctgggcaacagagactccatctcaaaaaataaataaataaaatgaaataaaaaataaatttaggctagacgcagtggctcatgcctgtaatcccagcactttgggaggctgaggtgggaggatcatctgaggtcaggagtttgagaccagcctggccaacatggtgaaaccctgtctccactaaaaatacaaaaattagccaggtgtggtggtgcatgcctgtaatcccagctactcaggaggctgaggcaggagaatcgcttgaacctgggaggtagaggttgcagtgggccaagattgccccactgcactccatcctgggcaacaagagtgaaactgtgtctcaaaaaataaaataaaataaaataaaaaataataataataacattttaaaaaatggatggtgggagggcagcaccagctttccaagggagaaccccttgccccagccctgccttcccccactcagacctgacccttagaagctcctcacccacacccctagggccctatgcttgagttttctggggcaggagatcccgaggctatgcccaccacaacccccaacccaggtgagacagatcctagactccaagtcttcaagactgcccattcaacagacttgtaaactgaggcccagagaagcactgcaactagccgaaggccgcaagagccaacagcagactgaggtcttctgctcttggtccagtgcttgtccaagacatgaggaagacaccccaccgtctgccctggcctctgtagggggtcttcctgctccccagcctcacctgcctcagttgcttgaagcgccacagcaaggaggacgaggacaaccaggagtgcagtctgtaggcgatccatgctctgtcctgtatgtctcagcccaggtgtctgcaaagggacataggaagacctgctatttaaggtgctggctccacccacaagcctcacttacttacctcttagtcaccggggtgcccagagtcacttgacattcacatctcaaaagaagaactacctcccacttcctccaaagtggagaaattctctttggcggggaaccactcagaggggaccccccctcaactctgtcctcgcctctggtttcagacagacttgtaaaatccccctcttagaggcttgtgctccccagggtctctgcactgtgtggccttggccatgtctgggtgtctctgggacttggtttccccatctggaaatgggggagatggtttcacagctctgttgacttcactggttgtaaatcaagtgagaacgtggaccaaccctcacctagaattgaggcctgtcttgtacccttaatgacggcattactggtctctcttcaatgggagaggcctatggacccattgacccatctggggcttctcgtgaagtccacatttgggccaggtcgtggatttctcaacggtttatggaaagcatctacccacacttctgtcctgcctgatcttccttcccagtggctgccgggctctccctcccccactcctgtctcagtccctcaccatgtccatgtcccgttgattctgcttcctaaatctctctcagatctgctccttctctccaaccccactgttcctgcccagtccaggccacctccacctcaggctgggatgctggcctcctcaatgccatccccaccctgcagcagccagcgtgagtggtccagagctacacactctctctcctgcttcagaaccctgccgtggctccccattcacctaaaggcaggtcccgggctcctgtctgtggccttcaaggccccgtttccggacaggcctttccccactggtctccttcccctgagggatcacaccacactcctcacacttcctcaaaagggactgcggcctgtccctggcctttaatgtcactttccacatctctaccacataaactcctacttatgcgtcaaagctgtttgaaatgtcatgtccttggtaagcacaccctctcaggacttcaaagccttctaggggacctggaatgtggccctgagcagactgggtcaggttttctctttctcaagcccctccctagaagtcagactccaagctctaggaggctggggtctcccttcatttttcttggcattcccagggccctctgaggatcaggcacatgttgggtgctcagaacacatgggctgggtgcagtgattcatgactgtaatcccagcactttggaaggcccaggcaggtggatcacctgaggtcaggagttcaagaccagcctggccaacatggagaaaccccatctctaccaaaaatacaaaaattggccgggtgtgatggcatgcgcctgtaatcccagctacttggggggctgagaggcaggagaatcgcttgaatccggtgagaggcagaggttgcagtgagccaagattgcgccactgcactctagcctgggtgagagaatgagagtccatctcaaaaaaaaaaaaaaaaaaaaaaagaaagaaagaaagaaaaaaaagaacacatctaatgaaggaggaaactgaggttcagagagagaggacttgcccagttcacacagccacacagaggctacgccaggcctggaactcagaacttgggactccatgtataaagggacccatccattcatccaattccttcattcagcaaacatttattgaacgctgtggtaaacagaataatggcccccctaaatgtccacattctaatccccaaaacctatgaatatgttaccttacatggtaaaaaggactttgcagatgtgactgtttagggtttaggatttttgttgttgttgtcgttgttttagaggcaggatctcactctgtcacacaggccggagtgcagtggtgcaatcacagctcactgcagccttgacctcctgggctca

SEQ ID NO: 1242698 - DNA, 4001 bp, Homo sapiens
tgccccaacctcttttttagccaaagttttgttctgacagttaagaacacaaggcctgatggtataatcaacaatgctagggctcatagtgttttcatgcagggacttacagctcggacggccaggatgtcctctacagaaagccatttcaggatgtgaaagagcacatcttcggggagactcaagatggtcaggtttcggggcctcctccttattcttcgctttgtaggataacagaaacacttggcacacctacagtggaccactgaaggaaaaaaagacagaagccttgataagatgaaaaattattctatatacacacccttgaagggaaaaaaaaaggataaaagttacatctgaagatgatctaatggttactattccctgtgccacaaaagatggaactatgcttcttgtcccaaacaaagattatgtaaaggagtggcattgcacaaattacagaagagatcattcattttcaaatattcaacaaatatttatggcaaatagcgcatgtcatgtaacttggctattgggaaactttctgatccagagcccacatgacaggcaggaaggggaaaaagctgccgaagctgaggacggttttccttctatttcactctcaggaaaactcctggggcctttgctggatagctttgctttttgcacacgtgaccaaggtgcataatgttcaataaagatctgtgggcttgaagagtctggttttcaagtccaaattagaagggtcggccctggagagaagccacagacttggaggccggggcagtgtgcgtccaagtctcagctctgcagagtctcagtgtgccctctattgtagaatgcggagttgacagctacgcagtaaggttgttgctcaggtcccaacacaaacctagacctgtaggtttgtgtacagatgcaatcattaaaggtgagacgggcattccacccaccaggcaggcagcccggacatgcttctcagatgtgctctctcctcttcccacagccggattttccaactcctactccagcaaccccttcctcactctaagcagatgaccttagcccttatttcacagggaaacagaagccctcagacaggaacctcaggatcctgcctccccatctacaaatctacctttctatccatccttccttccagtcctgaaaggaagcgccactcccctctgtgggcccaaatccctccccgccttgctaggacttcctagcgattgctcccggctcccctctcttgaccggggtcttcctgttagcaattaaatcagctgcaaaagccaaacgtattccagggcgacgaattctcaaagattctatagacctctccataaaatattcctcattctccggctccaggacagatactatgataatagctgaaaccacagttcgtgtttcctgtgcctcaacgcgcgcggggccgaacgctgctttccacagagctaggtccacggccccgctggactgaggctcggtcagggcccggccgggctgcgggatcgcttcgcccccacgcgctccgcagccctttccccgaccaggaggcgctggtgtttggctccccgagacccgatcgccgccccgggacccgatcgccggatcgctgccccgggacccgatcgttgccccaggaaagggccggaaaacgtcgccgcgggggaaggctccgaggggctcgggcgcccgccgggcatttaaaccgcgcgcccggccgccggggctccctgcgcgggacgcgacatccgccccgggttaaagagctcgagccagccctcttcaggccgccagggcctcccctcccgcgggacccaccgtccgccccgcagggcaggcagaaggggtgtggggcagaaaccagcggacatcgccccgcactcaccgccgccgctccccatcgccgcgctcgcgtcgctgccgccggagcccgcctgagagcgcgcccgcgccccggccggagcgcgcgtagccctcgcgcaggcgcagaccccgccccgccgcccaccccagttttcaaacgcacccggccctcccattggcctgcccgggggggccgccgccggccccgcccatgtcccgccctgtgctcgcctcatttaccgccctccacgccctccccgcctgctccgggacccgccattggccgcgccaggacgcgaattcgaacattggccgctgattggtggaacccgcgtggccgccccgcctccccaacggggctggggtcccgtaggagcgcttcccggccggcgggcaggggtttgtgggcgtcccctcccggccgcatgggttcgggcttcgccgctgaccccggcgaccggcatctgcggtgccagatgggctgcgaaggcgcacgcctgcggccaggggaaagaggactccttggcgtccctcgcagtcgcggccgtgatccagcctgggacagcctcgacgtggcgcttctaagacgaggccgtgccctgcccgggtcccggggtcgctcctgggcccgcgaccctcacccccagcttgcacggccttcccttccgccgcctgcttcaggtggagacccttgggtttgtggctgagccgctgctgggcggggatgctggccgggatcgtggtagagaaagaggaggtcggagctgacgctgggaagtctcccccgcggaacgctgaccccttcttcccgcgaaacgtggcgcaccctggacgcctcagtgctccagccccggggcaagccctccccatcactttggccagatgctgccccctgtctggcctcctcggctgctacctggagctgctcgccgcgggaagtgtcgtatctgctcactcttgtcttgggcagtgcccatctgagctgtccttcaggagtcagccacaccgcaccccttttacggcacaggctgtcaaggggaagactcgcagcctcctgactgtctggtggaggacagagggggcttttcctggggaaggcaggggcctgggccaaggctgcccacccctccctcacgcttccctcagtctgcacccttccatccttccgggtccccatagaactccttcaagtactgggcctgccctgggcacacagacaggagccctggcgtgcaggcttcagccggcctggggcaagagacagagtaaacaggtgatcacagcacagggtacagaagagtccgtggccccagagagggtctggaagttgggaatattccctgtcccggaatcaggaagcgggtgaaggagggtgaagagaggacaggctgagcgagtttggggcctgctccccagatgtcccatgttctcagcccccagatttattatccccttatctcacttttgtcctcctgggttactgtttcctactttgtcactgttacctgtctccccctagggcagaggtgcactttcagggttagcttccatagcatcttgaagggattaatcaactagagccagccatgagcacattagccacaccagctgcctctagaatctagaacagcatccttggtccctaggttgttgtttagctctatcctgtgctttgtgtcctgatcactctcctttcaacatggacaggcaaatttctttttcagggagcaggagttgtcttgactgcagccatgcctgctctcgccccacaccctgcactggcagtgggagcctccagggctgccctggggtgataagtggctcctccagggtgtgggcccgtttcccactgggcttcaggaaggtgagaccttgttggaaaagtctaaactgttaggagctcagggaaattcctggtggaatgaggtgtcggttgaaaacgttatgggtagtgaggggcaggggagagaagggaaagtgaagtagcttgggagcctgagaaatcccacattcagagaagaagatgggccttcagtggaggcagagaggggcatgggaggaatgagagctggatatgggagcccagggagtggctttcatcacagggagcagtcacctgaaacgag

SEQ ID NO: 1242699 - DNA, 4001 bp, Homo sapiens
atctgaaattatcgtgtttatttccttgatttttgtctgtcttcctccaccaaaatgtaagcgccataagtacaggtaccttttcagtcttgttcactgaatccccattacacagaacagtatcagcacacagcaggcacttgataaaagtattgaataaatgaataagaataataataagctcaaacaataatgtaaaccagaagaaaaaaagaaggcggactatacaccgaagctagcaaggaagagtggaatttagagaatggaaatttcaccatggctctagtcccagagaaactggtacctcttaaactgcaaaggtaaccatttaagaagtgagcagtctgtatcccatgattaagcaagaggacactatgcctttcacactacaattaccactgtcagcaaggttttattttaagggagccctgactacaaggctaccccagccacaaatctactgctctatatcttgccatcaggcatcactggtccacttccagtaataatttgtcagctacagcaggttcagacatgccgtcttctccatttataccacagagaaccactgacccttgtgcaaatgagcctctttgcaaaccccgtagactcatggtcctatctgctccttacccgtgctctgccagacatgtcactgaaaagagtggtaaaagtaacacagaacagatcctgctttttttttgcagaacctagtgtttctttgcccatcagttccgccaaagacgcaaacttcttgtaaaagcggtaaaggggaagatttcttattcagatgcgtactagctgcaagttcttggcaagccagttaccatccccacacctgtttcgtcctctgtaaaagagggatgatcacggtatccgtctcaaaggaatgttgtaagaattcaatgagctaatgcatgtagggcaattaacgtagtgcagaacacgcagaaagcaacaaataatggggactgcttttcttattaagaggataatgatgatgacgatttttagcagtagagtatgaattcctggagggcagcgacagtgcttggttccccgtaggtttcaaatgaaactgaaaaatatagaaaaggggacaacggcttcctcatttccctgtccctagacctctccccgtcaaatcaatctcgagatggctgccatttgcctaaactgggggtagggagcttggatcgtaaccagaatagaatcaaagggtgggaaccatctagcagctccaggggcaatcgattactttattatcctcaagtttatgccccagagtggcaaaggcgaagtaagcagcgctcctagggccttggttgtggaaacaggggctcataaatggccaatgcacaccccggggaagcctccctctccagcaccgtgggagggagaagaaaaacggcccaaacaatttgatcaccacgatggggttctccggctctggcccgagttttattcaccagggacggccccctgccctctccccagcgccccatgcccacctcctccagctcctccgatttaagactccaaaccgagggccctccaggcggggccagcatcggagcatcacctcagcgcccggtgctggctgcccccggggtcccgcctcccaacagccggcgcctttccagggggctcgaggcccgggagcccagcacagagcccgccctcagcttctcagggcgccaatttcgcctcgccagaccacctctcagcccggacccgtcaaggctcaagccccctcctcatgcacacacctgatcccccacggccccttcagctcctctcccctcgccacgggccttgtcaggaagcgaatggctcaaatggtactgacagagcgcagctcggtccgccgccgccttctcctcctcctccccgccatattacggatctcaggctgcaacgcgggctcctggcaaccgccgccgctgccaccccgactccacctctcagggccggcacttccggtggttgattcccgggctgttaaaaccgttgggccaccagaacactaccatccccgaggtgcattgcgcgcccgcgatggaggacgtaatgcttacggccagcacgctgcacgccgggaaacgtagtcttccttgcaagctagagactagaatttattaataaatttacttatttagtagaataggaacacccctcagggtctgaagccccctgaagtgttccttgaagttgccatttttttcttatctgtataaagataacccctttctatgcagccgttagaaaacatgtaacattcaccaaaatattttcttgtaggtaaaaacttgctgaacccaccgggcgtgatggcttacgcctataattccaacattttggaagccgaggcggaaggatcgcttgagcccaggagttcgagatcagcctgggcaacaaagggagacggcatctctacaaaaattttaaacgttagccgggtggggtggcgcgagcctgtgatcccagctactcgggaggctgaggtcggaagatcgcttgagcccaggaggtcgacgttgcagtgagccatgattgcaccactgcattccaacctgggcgatagagtgagactgtctgaaagaaaaaaaaaaaaaggctgaatcctagatgccaactggaaggcttaagacatctatccccttttgcaaatcagtgggaaaatgcactaaaggaaaaaaaggtaacagaaaaatccctgaatatttttgcaaagttctctacataaaaatgttaccagccctccaaaatatgtccaggggccccttttcactccctaactcggcttcatggtctatctctcttaccctccttccagtgcctgtttttgcatatgtaaaatgggggttttaaaagtgcctatcacaagggtggttgtgaggcacagttgaggtaactcctgtacagtgcctggtacaaaagcccttagcagaagtaagattagggggaggaggagtgaaaatgtcacaaatcactggggaggcctttatgtcagtccccaccctgccattaactgcttaattcacctatcctcagtttccgcatctatgaaataagggaatccttaaaaccccttccagttttataatccgattgtgccttctttgctaggctcttccagtcccccagaatctggaaaataaagtcgattgaaatcagtctcctgatagtaactgttaggctgtattgagaatgagataagcatataaagtgtttgctcgtcaagtacctgggacatggtaagtgctctgtaaacgttaggtgtacttgctaacttttatttcctcccacaagaatgtgaatcccataagagcaaaaaccctgtaggtcctgttcaactgtgtccggagcacctggaccggtatttggcacatcttgaattgaactgaactgaactgaattgaattgaattgaattgatagtctaagcatcctgcctctccaggttccctggaattcagtttcctcaagggcagataaaggagtcactaaaatcccttccagtcctacagctttaggatggttcttatccctccttttctcgcctaggagtctgaacgcccaggttgaagttcagacctcggaaaaccctaacccaccttagatttggaacgtgagcctggggcctggggcctgggccctcccccgttgccatggagcggctccgcccactggcgctgcgaatcccgatccctgattggctgggcggccgactccctctctggatgtgtctgctgccgccattgtgcggcgctggtcccctcagagggttcctgctgctgccggtgccttggaccctccccctcgcttctcgttctactgccccaggagcccggcgggtccgggactcccgtccgtgccggtgcgggcgccggcatgtggctgtgggaggaccagggcggcctcctgggccctttctccttcctgctgctagtgctgctgctggtgacgcggagcccggtcaatgcctgcctcctcaccggc

SEQ ID NO: 1242700 - DNA, 4001 bp, Homo sapiens
gaggctgaggcaggagaatcacttgaacctggaaggtggaggttgcagtgagctgagatcgtgccactgcactccagcctgggtgacagtgcaagactccgtctcaaaaaaaaaaaaaaaattagccaggcgtggtggtgggcacctgtaatcccagctactcaggaggctgaggcaggggaatcacttgaacctgggaggcggaggttgcagtgagccaagacaagatggcaccactgcactccagcctaggcaacagagcgagactctgtcaaaaaaaagaaagacttggagtcagtgttctgtgtggaagttggggtttggggtgaggctgggagtagccctcgggttgggggaatctaagattgactggcttccacttcttcccagtacccccacacagatgcctcccagttgagagaaactctacctggccgagcagtgatctccaggtggaatgacatggtcaggttgccacggtgacaataatactttccagcgtcttgagctgtggcccggggcaacaacagacccgtctccattacccacatatctctggccgggcgatcgtccttcagctctaggctcagcaatgacttaggccccttggggtgcacatgggtccaggagagggggcccctggacacagagtcagggggtaccccacaggacagccagagtgtggagccaggggccatggtgaggtctgggacagggagagataagacaaggaaagcctgatcctcagggtttcacctcttcagtttcccctcccctctgtctctggacccccgcttcccggcatctccccagtcatcaccataccctggctgaggctctggttcaggctgtccctcggtgggagacacggaggctctccctcccagatctcagggcggtctttggcccacacatacagcttggggctcatgagcttcccggaaggggagctggggccctctgaggacctgttcttcaggccacagcccaggccacctaggtccgaaacattccaccggaacagctcccctgggaagagacccagaaccaaatgcagagacacccaggagagggagagagatagagactcaaagacagagataaatagagacaaagacccgcagagagagagaagacagtgagaggtagagggacaggaagcagctcatactgaagccacgaagccccaggagtctgcccacctagctccgagtttcgccctcaatccctccagcccctctctccagctccattgtggccgcggacctcttctgtccatggtggcctcccttctctcctcctgcccctgccccagcccggccctcaccgctgccctccacattgactgtccagccaggctgccaggccttctcagaggggggccccggctggcacaggtagaagccccccatctgttgagagacgttgaagatgaaaagccagatggccaggggcctcatgtggattcccaggcctggcagccccaggctgagttttaagaagggtttaagcggggactcccgagaccaggtcagctgctgagtggggccatctgaggtccccttgaggcactgcagcacagcgttatctccctctgtggagagagagggagagaggtgtgggcatgggtgggggggacctccaagccccccgactcctcacaccaggttatagagcagaggactccaaaagctgggagtggaggagccggcagagtccttccaaccctttcctgaattttacaaataagaaaatggaggctcagagagggtaagttactcagccaaggacacccagccacaactcaagtttccagcctcaatcccttccctttctgccctttggacataccttccaccttcaccactagaggttcctcgggcctgacttccatgggggtgaggaagaggaggaagaagaggaggcgaggaggtggcatggtggtcagactctccggggcacccagcttcgcgcaggggatgctggggcaggcaggggcctggagggcactcaaccatgggtgtctgcgggggcggcaggcagtccccccagagaggaaggcggtggtcacgcctcaggccccattctccaggaaccctccagactcacaacacttgcctcctccctgccacgctgttttattttcatcccagctctcactaccacgggaaatgatcttgtgtgtttatttgttcatttctgttttctgcacaagaatgtgagccccttggagtagagaccgtgttgttcaccactaattgcaagtgctctagaacaatgctgggcacatagactccttctcaaaaaaaaaaaaaaaaattagccgggcatggtggcgcacacctgtaatcccagctacttaggaggctgaggcaggagaatcactggaaaccaggaggcggaggttgcagtgagccgagatcacaccactgcactccagcctgggcaccagagtgagactctgtttcaaaaaaaaaaaagaaaagaaaacagtcctatacaaatattgtttgtgaagattaaaaatgacaatatgttcagcactattagcccagtgtccagcacatcataagccctcagttaatgagatacagcttcaattaatgcctaagagctcaagtcatactgcctcagtttaaaaccaggcaaaagccaggcacagtggtacacgcctatggtcccaggtccttgggaggctgaggtagaaggatcgcttgagcccaggagttcaaggctgcagtgcaccatgattatgcctgggaatagccactgtgctccagtccgggcaacacaacaagaccctgtctctaaaagaaaaattgttttaaaagaacccaggagttctaactcctaaatctgttcttattctgccccatgcctctcctctctgtctctctctttctctgtcactctctatgtgcctctgtgtctttttcactgctgcagggactcagaaaaagaattcagggacccaagagacccactttctcagtggctgattcccaggcccatctcaccaggctgtgacttcctgtttgctgtgggcaagccccaggggaccctccctacaggtggcagggcctccacttccctttggccagttgaggcggctgggaggcggaagaatgaggcatgaatgaaggggaatgaagggggcgagtagcaggactcaatctgcctttcattcaacaaaatctctctaatcccctcattagctacccagctgcccagactggctttcactagagcatgtcattcccctgcttaaaacatgtcagttacagccaggcacagaggctcatgcctgtaatcccaatactttaggaggccgaggcgagaggatcctttgaggacaggaatttgagaccagcctgtgcaacacagcgagaacccatctctatagaaattttttaaaaaacaaaaaatgtcagttgcttttcatctagctaaaataaaaactccaacccaaggcctagtaggccgagtgttgctgacctacctacattttccacctcgtgcctccaccactctccttgccaagtgcttccctgcctcagggcccttgcacttgcagccctttttcctggatctctgctgggggctctggttctttgctggactggttcttttcatcacttaggtctcagttcaaatggtacttcttcaaagaggccttccctgtgccccccagtgcttcaaaaatctatatattattatttaaaaaaatatatctcaggccaggcgaggtgactcacacctcccagcactttgtggggccaaggcaggcagattgcttgtgctcaggagttggagaccagcctgggcaatatggcaaaacccatctctaccaaaaatacaaaaaattagctgggtgtggtggcacatgcctgtggtcccagctacttgggaggctgaggcgggaggatcagggggatggaggttgcagtgagccaagatggcaccactgcactccagcctgggcaacaagagcctgctctctt

SEQ ID NO: 1242701 - DNA, 4001 bp, Homo sapiens
tccacaaagtccaggaaagaagggcccaccaaactgggcccccagcaggctcaggtgtagaggtcaaagtcaatgcgtttggagttgtagaactgaccaccaggggggtccagcttccggcaataaacaccgtccgggaagtagccttcactcacccaggtctgcaaggagagggcagagctggggaacaactgacaggagtgggggaagcagggacaaggcaggaggagggagaaagcagctcacctgcatctgggcgctggtgaagggcccatacagctcggcatcccccgtgttctcccacttatattcccacatcacatccaccagaccatctccccgcgactctgcttctaaaataacaggcaaagccatttggcctccagtgtctcacttcctacccactgccccctcctctgtcctccaagctcacctcctctctgggtaggggttggggtctccagttcctcctccgccaactcctcagcgaacatgtccagggagggtgggggtgtgggattgtggggtcctagggtctgacaccccaaacccttcagacgcatagccaaccgttcccttgtttcctggtacacaccaaggttgccccgggccaccatctggtcggccaacccggagagccggtccaggcgctgaggggaactgggttgcccaggcccctttctccctttgcctcctcctcgggcccccagacgcctcagtgccccagccactgtctctctaggcaataggagctccaaaagtccctccaagagggcttgggcactcattgaggtctggcccaagctgtcctcctcctccgagtctgaggcctggcgctggccaggtggccgctcccggatcttcacctgtaatgggaagatggagtgatttcccaccaactgccacgggagcaggcccagcatctgccactcccaggccccagccacgccagcccctgggccgcacccagtcaatgttgtccagccagctgtctcggatctgagcatcccggttcaggaagtagttgccatcggcatcaaagtggccttcctccatctcctcctgcaggttaaagggtgtgatccgaacacccccctcgctggggagtgtggctgcctcctgacctgcaccaaagacacaggtgcccttttccaggcatggaaaaaagagaccggagcctccctcgctccacaccaccagaggcccctacttgtttttccagcagagtgtattcttgggtacagcttaccttctacatcctctgaggccaagatgtcatatttgctggaccccccatcatcatcatcctcctcctcatcgctatccaaagagtgtttgcctttaaagcggctcccaggaccccctgacccagccacagggtccaccagctgtgagcaggagccagaaagttgagaaatgcaggttactggctacctccccaaatacttccggatctggacccaaatattccccaaatatttcaggatctcgactacttccccaaatatttcaggagccacactaaagacgctcccaacccattcctcagagaacctgaaaaaactaggcttttctctgcctgcccgccccgcccctctcccgccagctttcttcctcttcaggcttctagctcctctttcccccacacaaagcagtctggccccctcaccttcttcttggggacaatgatttcatcctcatcctcctcatctcccacgccttggaaggtcactttcctctttggcatgacggggcaaagaggtgtttctcaagctgaggaaaggatgcagaggaagggaaccgggtgaggaggggactcgccaacagacgcagcacagcaaacatttttcctggtctgtgacaggtacagtttgggagcggagggagcacaaaagcaggggccgaaaggaagctggcagccaggaggcctccaggacttgggtctagcatccgcgagttaaacggggcggggacggaggagcggaccctctggatcccccgaccctggctgaaaggagacaggcttcaccacgtgaccgcccccaactccagcccccgcagtctgcgcgccaccggctccacgggctgacccccgctctctaccctggctctctcggagctcgccgggccccggcagacccaggacctggcgctctcgccaccccgttcctccctgctccgaactcccaattccgtgtggtgagccccaactgtcccgggctgtgtacaacttagagggccacggggattcgggcggtcccaccctcgcgcactcacctgggaatccgcggaaggcgaggtggaaaaaagaagagatgcttgcgccagggctacatccggggcacccggccgccatcacccggaagaggactgcggaaggcgcccgggaagcccggaagtggcttcactcgggttagggaactaactggaagagcgggcggaagtatgcgataagcgagcgaagacgcctccaccctctctcccgccagaagtgacgtcagtcacgtgggaggacaatggtgagaagagggaacctaagaattcctggactctgactgggcgtgagaaatggccggaagtagcttcgagtccgtcattcaagcagtagaggctctggagaaaaactggagcgcatctgcttaaagggccgcccagggtcaggatggaggggcaaagtccgagcagggtcagtgggttgctgctccgttttcctgtcctgggttcaagtcacccttcccccagggctaagggctcagcgcccctaccgtctcgttagaaatcctgccttcccattcctatggtccagtggtcagccctcctagcctgagaggtgcagccttgcctctccgaggggaagcctgactctcccgatggccagcctggggcccctggacggctctccgggcactttctgaacacacctccctttaggacccaggggaaataatttgtcccacgcccataccctgggcgagttcctggtttctgaggtgggagagccatcactggagaggtggcattggcgccagtactcaggccagaagccccttgtgccctgctctcaggtaggcctggaaaagggcaacagtgcctctctgcagcatgaagcccccctgagcaaacagggcctagcaactcctgcccaggtagcggaatgtggcccaagcagaagggggaattggggaggtagcggggatcagcccctgtgctgggacccctagctcttgacactcggagcctgcatccccctaagccaagactgtgcgcaggcagcacgtgctgaagccagacgaggacagcatgagagttcccctactcttcccccaggcaactagatgggccacttctctctccctaggggtttcctcccatattggatcacgatgaaaactgcacagaaagtccgtgctcagtttcttccatggttacagaacacaggccccagaccaggaaggcattctgctaaagaaggggacccgaaacctcagctaccagcgccgatggttcatcctccgaggaaacctcctcttctacctagaacactagaccgaccatgcacccctgagcctcatcctgttagagaactgccaggtggaaccacaccttaaggctgcagaaccctatgcctttaccatcctgacccctggggtggagggcacaggtgggcgggcctacaagctggctgcagaaacccaggaagagctggagacttggctgtgggcactggctggcgcgagctggaggcggctggctgggctgctgtcccccctccccccccaccaaaacccaatactgggagctgtgccaggcaactggccaagaacccatctcatccccagaggacagtggctttctagccactgtgagtaccccctccagcttccaggagttgcatgagcactttgggaaggagatccgggtgctgcacgtggtacatagagagctccaggcagccagtgacaatggagacagcagatcccaggcaaagatggagcaggagc

SEQ ID NO: 1242702 - DNA, 4001 bp, Homo sapiens
gctcacctcctctctgggtaggggttggggtctccagttcctcctccgccaactcctcagcgaacatgtccagggagggtgggggtgtgggattgtggggtcctagggtctgacaccccaaacccttcagacgcatagccaaccgttcccttgtttcctggtacacaccaaggttgccccgggccaccatctggtcggccaacccggagagccggtccaggcgctgaggggaactgggttgcccaggcccctttctccctttgcctcctcctcgggcccccagacgcctcagtgccccagccactgtctctctaggcaataggagctccaaaagtccctccaagagggcttgggcactcattgaggtctggcccaagctgtcctcctcctccgagtctgaggcctggcgctggccaggtggccgctcccggatcttcacctgtaatgggaagatggagtgatttcccaccaactgccacgggagcaggcccagcatctgccactcccaggccccagccacgccagcccctgggccgcacccagtcaatgttgtccagccagctgtctcggatctgagcatcccggttcaggaagtagttgccatcggcatcaaagtggccttcctccatctcctcctgcaggttaaagggtgtgatccgaacacccccctcgctggggagtgtggctgcctcctgacctgcaccaaagacacaggtgcccttttccaggcatggaaaaaagagaccggagcctccctcgctccacaccaccagaggcccctacttgtttttccagcagagtgtattcttgggtacagcttaccttctacatcctctgaggccaagatgtcatatttgctggaccccccatcatcatcatcctcctcctcatcgctatccaaagagtgtttgcctttaaagcggctcccaggaccccctgacccagccacagggtccaccagctgtgagcaggagccagaaagttgagaaatgcaggttactggctacctccccaaatacttccggatctggacccaaatattccccaaatatttcaggatctcgactacttccccaaatatttcaggagccacactaaagacgctcccaacccattcctcagagaacctgaaaaaactaggcttttctctgcctgcccgccccgcccctctcccgccagctttcttcctcttcaggcttctagctcctctttcccccacacaaagcagtctggccccctcaccttcttcttggggacaatgatttcatcctcatcctcctcatctcccacgccttggaaggtcactttcctctttggcatgacggggcaaagaggtgtttctcaagctgaggaaaggatgcagaggaagggaaccgggtgaggaggggactcgccaacagacgcagcacagcaaacatttttcctggtctgtgacaggtacagtttgggagcggagggagcacaaaagcaggggccgaaaggaagctggcagccaggaggcctccaggacttgggtctagcatccgcgagttaaacggggcggggacggaggagcggaccctctggatcccccgaccctggctgaaaggagacaggcttcaccacgtgaccgcccccaactccagcccccgcagtctgcgcgccaccggctccacgggctgacccccgctctctaccctggctctctcggagctcgccgggccccggcagacccaggacctggcgctctcgccaccccgttcctccctgctccgaactcccaattccgtgtggtgagccccaactgtcccgggctgtgtacaacttagagggccacggggattcgggcggtcccaccctcgcgcactcacctgggaatccgcggaaggcgaggtggaaaaaagaagagatgcttgcgccagggctacatccggggcacccggccgccatcacccggaagaggactgcggaaggcgcccgggaagcccggaagtggcttcactcgggttagggaactaactggaagagcgggcggaagtatgcgataagcgagcgaagacgcctccaccctctctcccgccagaagtgacgtcagtcacgtgggaggacaatggtgagaagagggaacctaagaattcctggactctgactgggcgtgagaaatggccggaagtagcttcgagtccgtcattcaagcagtagaggctctggagaaaaactggagcgcatctgcttaaagggccgcccagggtcaggatggaggggcaaagtccgagcagggtcagtgggttgctgctccgttttcctgtcctgggttcaagtcacccttcccccagggctaagggctcagcgcccctaccgtctcgttagaaatcctgccttcccattcctatggtccagtggtcagccctcctagcctgagaggtgcagccttgcctctccgaggggaagcctgactctcccgatggccagcctggggcccctggacggctctccgggcactttctgaacacacctccctttaggacccaggggaaataatttgtcccacgcccataccctgggcgagttcctggtttctgaggtgggagagccatcactggagaggtggcattggcgccagtactcaggccagaagccccttgtgccctgctctcaggtaggcctggaaaagggcaacagtgcctctctgcagcatgaagcccccctgagcaaacagggcctagcaactcctgcccaggtagcggaatgtggcccaagcagaagggggaattggggaggtagcggggatcagcccctgtgctgggacccctagctcttgacactcggagcctgcatccccctaagccaagactgtgcgcaggcagcacgtgctgaagccagacgaggacagcatgagagttcccctactcttcccccaggcaactagatgggccacttctctctccctaggggtttcctcccatattggatcacgatgaaaactgcacagaaagtccgtgctcagtttcttccatggttacagaacacaggccccagaccaggaaggcattctgctaaagaaggggacccgaaacctcagctaccagcgccgatggttcatcctccgaggaaacctcctcttctacctagaacactagaccgaccatgcacccctgagcctcatcctgttagagaactgccaggtggaaccacaccttaaggctgcagaaccctatgcctttaccatcctgacccctggggtggagggcacaggtgggcgggcctacaagctggctgcagaaacccaggaagagctggagacttggctgtgggcactggctggcgcgagctggaggcggctggctgggctgctgtcccccctccccccccaccaaaacccaatactgggagctgtgccaggcaactggccaagaacccatctcatccccagaggacagtggctttctagccactgtgagtaccccctccagcttccaggagttgcatgagcactttgggaaggagatccgggtgctgcacgtggtacatagagagctccaggcagccagtgacaatggagacagcagatcccaggcaaagatggagcaggagctcaaccagtgtctgatgagtgactgagagatggacccaaagctaagaggtacctacttgccaagacagcagactgcttcaacagagacccaggtcctggctctgtccctccctccctcgtccttaccccatccccccctcatcaaataacaaggcagaaaacaggcccaggtacaacagcaggttcttttccaattcctcaaagcgctgcatggggtgggggcagagacagaagagaatgtaaacattgggttccaccccctggagctcaagggaagacccttacccagatagggactaactggaggggtggaagggaacaaggtgaaaggtatgggtcctggtgagacaaaagcaggggggcctgagaacacagagcaaggtgggtttggagggagcacagcagggtgcaggaagggagatggggg

SEQ ID NO: 1242703 - DNA, 4001 bp, Homo sapiens
ggcacacgccaccatgcccggctaatttttatatttttatttagtagagatggggtttcaccatgttggccaggctggtctcgaactcctgaccttgtgatccgcccacctcggcctcccaaagtgctgggattacaggcgttagccactgcgcccagcctaaaaaaaagttaaaattatccaggtgtggtggcacatgcccatgataaccagctactagggaggctgagatgggaaggatcacttgagcccagaggatggaggctgcagtaagctatgattgtgccactgcactccagcttgggcaacagagcaagaccctgtctttaaaaaaaaaaaaaaaaaaaaaaaaaaaagcttttatatctgtaaacaaaagccacagcccagtaaccaagagagggctgctcttcagtcatcccagagatggtgcttaatggggcctgggagtcagatcccagttcagatatctgctctgctgaccctgagcaagtggacgtcactctcttagcctcggtttgctcaactgtaaaacgggaatactcctgccaggccttcccacccaccaggtttttgcagtctgaaatgagagactgtctctacagtgctgagggcaataagagaaatacgaaggcttctagtaagtgccctcaacctcctcttctttataacatagtcaacaaccaggcagggttaccccctccaccacagtgttcagtcgtaaacgtttggatccccaaatctgcgtaaattccaaggggtgtcgtttgagccaaggagggagcttgcccattgcaacccaggggtgtgggagtgcaatttctcggcccctttccaacccctccctactccgcccagggacaccggcagcgcgccctcacctctgcccaggacgcggcctctctccaggtggcgccggggcaccgtgaacgtgtagctctcggcgtcaaagccagggtggcagggctccggctcctggcagagccaagaggagacctggggtgggggaaaggtagatggaaccgggtgactcggagggttccctcctgctcaccgaaaccaacagcgccgcccctccctcgctcccggcgtcgggattgggggaggaccccagcccgcagccccgggacgggcgggcagcgacgtcaccctcccccaccccgaaacctacggccgccgagcccccaggaactcccgggagggggccgccgagtcaccccctcaagacctagcccaccgttccctttcagtctcctttctcattttattggagatgtctttattctccagtaccccactttccttagaccgggaatgcaccactcctcagagcgaggggcgctcccacctcctccgacctcactttcttatccccgggaccctcactcctatttacgacctttcttggcatggcaggtgcctttatttctacggatgcccctctccttccctcgaagatcgtccccacgactcctggctccccctcgacttgcaccagggcaccccttctccacaccccaccccctacaccccgcttcacgcccccaccgcccgcgcgagcccaccccgcggactccgcggccagacgcccccgcctcggtctgcgctggagggggcaggaaagccgcgctcgcccctcaccacccaccccccactcccatcactggggggtccggagcgcgcgaggcttccaggccgctccgctcctcaggacccgaactttcttggaagaagggaagcggtgacgacgggagaggaaggggcgcagggctggggcgcggagcttgcggcccgaatgcgtccctcgcaagtcaggggatccggggtacctgcagcagcagcagcagcgccgagaggctgcggctccaagggcccatggctggccggggacgccgagcgagggcaggcgccgggtgcggtcgggtcgggccgggctggagcgggctggagtctgaactgacttccgcaagctcacaggtgctttgcagttccgacgccactgagagggggtgcgtggctgcagccaggtgagccccggaggcaccgccccccgtaccgctgattggctgagggttcacctgccggccacagccaatcagcagcgcggacccctccccagggcggagctgacggcccgcccacccggcctcgcatagacgcggtgaccctctagcctggagttgctagggtctaggtgggttatgggacctgcacggttctgattccactgggttcgaatcccagccccgccggtggctcactaagacctgggatcagaaagggcttttacacttggctgagttcttttgttttttgggattttttgtttgttcgttttggagatggggtctcactctttcacccaagctggagtgcagtggtgcgatcacagctcactgcagcctcgaactcctgggctcaagcggtcctctggccccagcctctctagtagctgggagtacaggtgcacaccaccacgccaggctaatttttttttcttttgcctttttgtagagagacaagtcggggcggacaggggcagtgggggcgctgtgtctccctgtattgcccagcctggtctcgaactcctgggctgaagcgatcctcctgccttggcctcccaaagtgctaggatttcaggtgtgagccatgagccactgagctagcagcctaattttttgtttgtttgttttgtttgtattttttgagacggagtctcgctctgtcttgcccaggctggagtgcagtggcacgatctcggctcactgcaacctccgcctgccgggttcaagagactctcctgtctcagcctattgagtagctgggactacaggcgtgtgccaccacaccggctaattttgtatttttagtacagacggggtttcaccatgttggccaggctggtctggaactcctgacctcaggtgatccaccctcttcagcctcctgaagtgttggattacaggcgtgagccactgcactctgcctcgagcggcctaattttttaaaaaatttttctagagaggggatctcactatgttgccgaggctgatctcaaatttctgaactcaggcgatcctcctgcctcagcccctttactgagttctcattttttaatctagtcttttttaactgtagagcttcatgggttagtgagtcagcaaattgattccctaggtcaggaccacctcccaaagcctcagtttctccaccctcctaatgggaataatgatcagaaatgtctccctatgctgttgtgggactcccatacaattaaaatgacaaatgtttcttgagccataaatgctctgtacagaagtgaggggtaaaaatagtaacaatagggccaggcatggtggctcacgcctgtaatcccagcactttgggaggccgaggcgggcagatcacgaggtcaggagattgagaccatcctggctaacgcagtgaaaccccgtctctactaaaaatacaaaaaattagccaggcgtggtggtgggcgcctgtagtcccagctactcgggaggctgaggcaggagaatggcatgaacctgggaggtggagcttgcagtgagccgagatcgcgccactgtactccagcctgggcgacagagcaagactctgtctcaaaaaaaaaaaaaaaaaaaaaatagtaacaataggtgctggacattgaagattactgtgccagtctctgtgctaagcatttgacactgaccagctcttttttttttgagacggagtcctgctctgtcgcccaggctggagtgcaatggtgtgttcttggctcactgcaaccttcgcctcttgggttcaagcggttctcctctatcagcctcctgagtagctgggattacaggcatgcgccaccacgactggctaatttttgtatttttagtagagacagggtttcatcatgttggccaggctggtcttgaactcctgtcctcagatgatccacctgcctcagcctcccaaagtgctgggattacaggcatgagcca

SEQ ID NO: 1242704 - DNA, 4001 bp, Homo sapiens
ctcagagtgcttctcgtattggccacaactctgtccctttgttttgtaactttttttcctttgtcctattggaagaagaccaggctccctgcagctagggttgggcagttaatatttctgttctggtgtctgcacctacgtatttgtaggaaaaacaattccaggattaacgaaaagaaggtcagtcccttctcttctctgccaacatattaggctctagcgctcagagcccagcctggcaaatgtgctcatgcgatgctacaggatcctcgctcctgagaacacatctgcatccccatccccaggaaatccagacaccccgcaaaaccatcgacgtctgctgcaagcccaagtgatgaggaaattgatccgtcctctagccagattaattatggtagcctccctgtgattaaaacgaaaacttactgcctcatattaaaccgatagccatgattagaagaagaaaataagaaaagatttcagagcgatcgtagcacgatttctttagggggagacgaagggggaagactttagtgaaatctataccctcatacagccgggtttcaagaacaaccccccactcccatcccttagggataacccgtcgtcaggcagggatggtattaaataattaaaagatgcgatttcttaatagcagtgtgatggcccatgaaattcctactgcattatcagcaaaagcaacagggcttcttctagcacctagaaaacctttcacccgggagaggcaggcgcggcgagccccgggcgaaagcagggcctcggcaaaaaaacggacaaggaagccggacccgcaagcctcccccgaccccactttctctggggactccgcttcacagcgtgaggcgggccctcctacagttcctctgggttggggaggggggagaagggagctctcctcgccgtcctccccatctggccagcttctcagtgcttcccacctcccggctcgcgttccggggcagagcgcagggagggaggccgtgcgtgccgggagctagagaggcttggcgcgctccgagaagcggcgcaggtttcgggaaggtgtggttctcaaagttaacgttgaccctggcagctttcgccaatcccaagccagaggcgagcccgagtctgggccgctcatggacctactcctgcgctggtgggagcttacaaacgggcgccagagctcccgcagagactcgggctggagggctgtagcgcaccgcagcctgctgccccagaaccacagtcggcggccccaaacccacgctattaaagtgcgggcaatctccttccggagctggggtctttccgttttcccgggcttacccggcagtctcgactgcagggactaagccccggggagctttcggcagggatccgggaggatggagtaagaaccccgcagagcgcggtcatgtcgccgctttggggaagcggcgcagggctggcgggcaccgcgccgtgggcgactttccccagagatatgaccggggacagtcggcgtgtccggaggtctgctctgcagtctcttgccccagccaggtacaaaccccctctgctgtggcctcggcgcagaccccacaggaggccggagccagggagagtcgtggagcgcacatctgaagcctccgtcccctgctttgcccgcgcccacagctggctcccttctccctttctgatttttaaacaaatctctccctcccttttgctttgcgttagtgaagccttctcgactcagataccaccgtccccctcaccaccccgccccgccaagacattctcttcctgagaaaatcctgccccccattccaagaagccccaaccaggcgagaggaagggactggcggcgcacctcacctggggcccttgagggtggacgcaacctccgagccgccagtccctggcgcagggcaagcgctgcggtgtcagtcccggccccagtcccggtcccattcacaagtcagcggcggctgcgagcggcccccgcggcatctgctcctcggcccgcgacgctcccctcagctggcggcggccgcggaatgagccgccgagcgcgctagtggcaggaatgagaaaccggggggaggtggcgggcgggcaggcgggtgcggggcggggggggcgggaggagggaggctgccgctgtgagggaaggaaagggcgggggctgagagaagccgaggctgcgagaggcagcgagatgggcctcgcagaggctgcgggggccgaccccgtccgcgcccctccccccaggggcccagagatgctaacccctggattcgtggccgcccctcccgccccgtggcgcggcgctccgactccctcagggctcagatggagtctggagcgactgaagttgggctccagggacgcacagccaatcagggagggcggcggagggaagctggagaggggttgggagcccccattttcctccttcccccaaatccgctccagctggccaggctgggctctcgcctggcgggccgggatggtggttgggggaaggtatcgtccaagtgagggaagcaattgggaattcgggagcgcgttctattctttctcactccaccaccccaccttccaaaaatccctcaacgttggcggctcctgcccagcccccacccctctcaatctcccatcccttgcaaactcttctggtggctctggtggtgaagtcgggcggggagggagacttaggacttgggaagagcccagtctccgttctctctcagctctcctctcgtctagtgccccccacgcaacgcctcggagaggggtgcgcggggagcgcttcgccggggtcggcctcgctccagcttttgggagggtgccttggcccctaccccagccaggtatcagtggcccccgccggtagtgtcacttgttgccactccctcgctacagacccgccagggcccggtggagtgtgcgtttctacgggagaaagggcctaatggggcgcagcgccggagtcctagctccttcctccgctgttcccctcactgacgactcgctaccgtgagggttccccgggcctgcttcctgccctccctccccgagtcgccgggagaaagggctggcagggccggggcttaggaatcacgccaaggactgggcggggcgctcgcggtaccgggaacggcgtggggatccgcacacccagcagggaacaaccatgcctgtgtggggacccctggcttgaacaagtttgcagggtgggaggtggaggcaagagaggaggcggaggaaggtggagacgccagtgggtgaaggctaaaaaggaaccgcctagggggacggggatgaggctgggaaaggagaagagatggacccgcgaaaaagacggggaaggaggctgcggagggaaagctgggcgccacagccaagcagtttgaaagggctagaggggaggagacgggcccaggagttaacggaaaaagaggccgaaaacggaagagaaagcttgggatcctgagcgcatggggaaggaaccccagtgcggggctaaggcaagagcggccgagccctgccctccagctcctggtcaccagcccgcgggtcccgagcgcccgcagccgcccgggtttccacacggcttggggagacgcccgcgggggcgggtgccggcgaggctgccccgggacctaccctcttcggcctgcgcgcccgcgtttttcttgacgactccaggatccgggtggcgctgcgtgcctgcccccagtccgcgtcctgcgcggagaggatgcctctgtcaccctctgtgtggacgtggcctttgaactcctcattcctccactgcgggggaagagctgtaagtttccagctgcccggttatcttactcctcagccttccccccaccataggtgtccaaggtgatagccccctgggtctccagtaaccccccaacctcgcaccacactctgcgcaagggacgcgcgaggacattgactcccggtgctttcctgtagagcgccagagagcagatcgtggt

SEQ ID NO: 1242705 - DNA, 4001 bp, Homo sapiens
ccaaaccgccttgctaaattggggtatatgtacacacatacagccttggggtctctagggtacaggacatctggaaaactggttcacagccaggcttgggatccatggcaagactcaaggctgtagggaccccaagataatcaaccagaaaagcctggtagaaaaggagctataactgggcagtccttaatcgggactgtatatccaagaaagaagtcaggagcttgggagcgggctcagcagccgggcacttgaatctcccctggtactatcacccatcactgcatttctgagatgttagcccatttccaaagtctaaacccaacattgctctaacagtggtctcccttagaagtctgcaccagtctccccatcccagacagtccctacctgggaacccaactcccttcccctgcctttcacccgcaaactctcacctgagcctctaccccggccaggaactcaacactcattcctagcaccctgaggcactccctgtctctttccctccttactctgcccggccctgccctgccctggctcttatccacccacttgcaggctgccagctcactccaagtcccaacgcctgccagagaggcgatgggggactggatcggggtgctctccgaaaccacaggcccctgagcagcgcagggcgtgccccccgcagcggccagcaccccaggcctggcctcggagcgctgctttcctgcactcaaacttcccgaaatctctgaggtgcagaggtgactgcaggcggaccgcatctccctcgccccctctcctggttggcgtgcccttccctcgcgccgtggcgctctgagggttaacaagcagctgcagcccgggtgggcaaggcttgaacttttctctgcgctccgctcccgctcagggaaggcagcagaggcggcagcccgggatctggccggagctccagctggctggacaataggggtgcggggggctggggcctgcgccctggcgggggacacgctccggccctttcgggcccggggtctgggagcaaaaggaccccgatgcgggtgcggccggcgccggcgcctttgagcgacagcagcagccgggctgaggctctctgctgccccgaggcgccttccagcgggcagccgggctgtaccagggggcccgggcgccctgggaagtcggtggtgcctgctcggcctctccagccccgcatcccgcaatccggacccgagcagcgcttcggccgctgggcgttgggctggggaaaaccgcggctcgttggagtcgcctctaactgagtctttctccaatgcaccgagcctccggaggagggaaccaaagttaccccacttgatgtgggcgagaatgtcgcccctgctagcaaaaaaggactgggagctctctcctcctcccgttaacgaacgtacacacacacacacacacacacacacacacacacacacacacacgcacgccagagtgggagcctgtgtgtggggggtgcctaggatctctgggctcggaatgacctccctaccgagccccgatctgtcttcgccgccgcgaccggaggccccgaccccccgaaagccccctcaccctgcccgtgccgggcgatccgaatgcagaaacggggcgcagagcgcgcccggcagcccctcttccctacctgggacaggagaacgcacagaacgagcggagttctcggctgcattttgtccgactagaagcgcccggcggcgttttcattcatgcacgcggctgcactgagcatattttccgtgggagccaggctttgaggagaggctctgcctcgccagccagccaacttcccaaatagatcagcagcagcatcacgaaagcattgggtagaggctgatgaccaggaccaatggctttacaagacggattccttcctaacgctccctcgttttgcatggcagatacggggtgagcacctcgcgaggagcgagccccgcggaggtggcatcccatttgcttctttggactgttggggctcagcctcacaaatcacgctgggcaatgccagctgattccacttttccagagaatggaattgcacgggggactggcggccacttccagcctagtgcaaaaagattctctttattaaaatgttaataagatccactctatttccaataaatcagataaaatggccccagcagttccagccctttctacgcctggcaaggcttggcagtggattttttttttcttttttccttttttccccccactgtggcccaagtcatgatggtgtttggtgcttccctgccatctcacaaatcacaaagatgacagatcaattcgagcttgcagaaaaaattccattaaggggcaatagattttattaactgctcaggtgagagtctgactagccacctactcctcaaatgtgcatctggcaccaaagctgggatctggatcggaaggaacttctttttgtatatggatgttacctttcagaagctctgaactacctccaggtactcagaacagcagtagtcactgcttaagggattttataaatggggggctttgggactgagggtaagagggacatctaggtctgccttccctaataggaatctaagaaaatgcagggaagaccttactgtatcatttccatgcagccttcccttagaaagaatttaaggtgttttacaataaaggacatttgtgcaatagaatttatgaaccaaaatagaaaatctgggccagaaggaaaagttcagcaaactgaaatgacaagcccaaattctaatgtatttgctctgatttggataagagcttcctgatagccaaagcaataaaagaaacataagttacatagttttgttgtagaaacatgcatacaatgtctttcagcattattttccatgggctaaataccggaataaatgcattatgtaacacgtaacatagcaggacactgagcaatggaccatgccaagatccagtggatggggatgtatttctagcatctggcacagggcctggaacatggagacagcaattagtgtgtgttaaagaaatagatggctagactcaatcaagatgcagcagaaggcagggaggggcaaggagtctggagccacattgtctaggcacagcccccggatctgccacttacttgtaaattactcaaactctctgcctccatttgttcacagataaaatgaaaacacaaattctactgaactcacaaggttgtggtgaggattaagtgatgacataaccactgaataaatataaagtgatgtgccttttaagattccttcattggctgctgtttggtcagaaggtcacctcctgtggtcccaaggtcattgataaagatgcagtgatgtctgaagcttggctgctgtagccagcactggcccaacagatggcaatgttggcaaaacaacccccagatgaaactgggaaaggtgaatcttgctgcttcacccactcatttccttgcctaaatagggtcatctgtccctgagcctctgatcaatacggtccgacagatgacgtcacagatcatgacactttggaatccatgtgtgtggagatctagcctcacgtttcccacaggtgggagtaaaccagagaactttggagtcaaacaggcttcaaatcaaggcatcctgaaatatccggacttttctccactccagggaaggtgccatcttgtaattcagggccagctaaactgagtccatggcttagcaacacaaagatagggaaagagagcagaggacagcttgggaggtgataaaccacagtgagggactagactgcagaagatgaggatctagctaggtttccatctgcagcagctcagttaagggaagcagtccctcagaagagggagttttcaaggctgtgttctaaggacagttcggtgctgtcagttttacagttctgctggccttctgtggtctccccattcccttgtccttagtgctgatgaccaaatatttccaatttttccccttttg

SEQ ID NO: 1242706 - DNA, 4001 bp, Homo sapiens
ggcccgagcaggggagcaacccctcacttgtagaaggccctgatgggcccacgctgcctgcctgggggctcaccaggaggcggcccaggaccccaaggctgcccaggagagctcacagtcctgaaagctgagctgctgggggaggggcaggcagggtcctgacactgacatattttgcctcacagtggagtgaatttgagccttggcgatagtccccttgccatctggcccccacctccaccacctcccccagcctccagctgtcgggggagggggttattgtcccccagccctgggcgagaaaagaagggacagtgagagggaaggcttctgaggagggagaggtcctgcctgcctccccacctgccacagagccccctggggccttttgaaaggcagacactcccaaatccaaaggaagaggtctggaggaatgttttcacaggcgccagcctccccaccaccatgccctgggttggggtgccagggaagaaaccctgtccccagagcaggtggggaagggccctggaggcatggagccccccagcctgcgctccccggcagagggctgaggggtggagggccggggggtgagcacgcatgctgagccactgtctccccccaccactgtctccagatgggggagtcgggggtggcaggagccgtggtgccctcaggggcagctgctggagggtctggctggccaggcgcctggtcagctgccaggggctgaaattggagccagctggagctgggaggcctgtgggaatgaggggactcaggaagccccttcagtgggggctgggaaaggagtggcttcccttactcactgtgtccagcactccctgaccaccccaggaccacaagagcaatgaatactgtgagcaccgctaagccctttatgtgcattctctctcgaattggccagagagaggctgccctcttgtacccagtgacgtcccaaccacagccggccatgccccagcccagcccagtccctgggggctgaagccactgaggccacatcctccatgtctaggtccccctagggtgtgaggagacgtggctccagctaggcagtacccatgtcgggtgtggggggctgaggcctgggcttccttccactctggcttgctcccacgttggagagaccacggtgccagcagtccagacaagatttttaggggcagagtccagcagcctctgggggctgggcccccaggcctgatcaccccaggcagctgcggcagggtcccaggtgaagcccaggaacagagcccccagggctgccacacgccactctgcaaggccgtgtgttgcgacctggctcgggctgggccctcccaatcgagaagtagccgtgagggtgagttcctgggggcagggcctgcagccacccctgctggccaggaacttggggtggggggtttggacaaaacccaagactagccaggggtcctgtgcccaccgcagggagtccctatagaaacctggcccccagccccccagagaggggcactcctgccgctcccccctctctctgctccactcaagactggcaacccccagaccccggcagcggttcctccaaagagagggcacggctacctgggtggcccctgcctggggtccctgaccccagcagcactctgcagtcctgggggtgattccaccagatggagtgtttggttacactcactccccacaacccctggggtgctgcccccagcccagggacccacccggagccactccgctcacaggcccccaaaggcgaccagggccagtggttctgggggagacctgtgcggctgcagttgaagacactgtcccgcagcgtcgagggaggcagcggggacccccgcaggtgccgatgccttacctgggccaacagcccgaggacgaggaggaacgcggcgtccatcggggccgaggcgggagccgggccggagtgcacccgcgacccgaagaagcgcgtccaggctgagtgacagcgcaagtgcgcggggcgggccagggccagagacagagacagcacgtgtgaggggggcggggagggggcggggcaagggctgagtgacagcacgaaggaggcctctgacgggccgagggccggcctgggcagggctaaggctgagtgacagcgtgttggcaggcgggtggggcggagcctctggcgagctagggcggggcgcaggctgagtgatagcccgtgtgcgagtggggcaggcggggcggggccggggccgagggctgagtgacagcgcaggtgcgccggcggggcggtgaccgcacgaggctggtggggcggagccagaggaggatggggcgggcggggcggggccgagggctgagtgacaccttgtgagagtgcggggtggggccggggtggggccggggcggggccgagggctgagtgatagcttttgcggggttccggcgggcagggccagggctaggtcggagataccccggcttgctgcgttgggagcagagccagaggccaggctgtggggaaggcagggtgggtgcgtccgggtcagggaccagctgggattcctggcttcttcatttcctgctccttgggcccggctcgcccctgctccagggaatctgcattgtagtccctgccgggggacacctcttgagcacttccttgggcccctcgcctctctggctgcgtctcctgcgcctccccgcatcccactgaacgctaggcccgccttccacgcacctcctcgcgacctcattttgcccagctcttattcagtatggaactgctctggttcacacgcctctgataccagcgtggctcgtaggacacccccaattcccccagtccacgcacctcctccagcatccccttgttccccgaggccccctgcctggagcaccttccttcctacagaactccttctcatcatccctcaacacccaaggtcaacgctgccgcctcctggagcctccttgccacctcggccagaagccctccctcctgttgactgtggcacctgttctccccttcgagaccccgccccctgggatggtgtgggtgtggctcaacacctgcacaggcccagcgcacggtcaggaaggtcctggagagggggtggagggggctggaggcaggaggatcctttcttttgagcaggcagggtggggagtgggggttgccgaccagcccagggccgggccggggagcccgttcctctctgtgatgggagcagacccggtacctctgctctcctgtcgacggcgggtggctgtgcaggtgcaggcagcatctgtgcacttggcctgcttgaaaggaggccaggctgcccgggaggctcaggccaggactgtccctagcgctcactgctccaagatgagagagggcagggagtccatctccagactgggaggcctctggggctggggtgtagcctgttggggaccaccatcctgcctctgtggtcagtgacctcaaaataggggtggagaagccctctgagtgcttttggttttcatcctcacgggactagtgcaggggtgaggtagaagtgctcgccctccccccagaaagaggtctggggaggctgcggtctgccaaccccagctcctctccgcttccaccctgcacccacctcgcttcagccacctgcctcccacccacctcggggagaaacggaggccaaatccctcctccatgggatgtgggggtctctaagggaaaggctaagctgggccaggtcctgggtgagccccaaatgcagggcggggccagggaagcagccggcttaaccactgcgggagggtgtgctccctggctggcgggctatcccccaggggcaggtgcccccgcgagggaccccgctccacatgctcccagggcagcaggaaggtcaggaggcaggagcctgggtccagtcccagctcggagccttgggctggaggttctcccccgtgcctcagtttctccttgtgtcagaggtaggtggcagggaagggctgggtaccct

SEQ ID NO: 1242707 - DNA, 4001 bp, Homo sapiens
ctccttctggccatagcctccccagctcgcaaatcccaaagtggtaatcccagcactttgggagcccaagacgggcggctcacctgaggtgaggtgttcaagaccagcctggccaacatggcgaaaccctgtctctactaaaaatacaaaaaaaaaaaaaaaaaattagccaggagtggtggtgcatgcctgtagtcccagctactcaggaggctgaggcaggagaatctcttgaacccaggacgtggaagttgcagtgagctgagaacatgctactgcactccagcctgggcgacaagagcgaaacttcgtctcaaaagaaaaaaaaatgtataacgttaccttcaggctatgtgtataagatgtatatgaaacataaatgaatttcctatctagatttgggttccattccccaagatatctcatgatatatatgcaaatattccaaaatctgaagaaaaaaaaaaatccaaaatctgaaacacttctggtcccaagcatttcagataggggacactcaacctgtgtaacgtgtacatactctctggaaagcaggatttcaaagagaaacagcaagaggaagggtgccagaggaaggagaagcaggactttgcggggagggatccccccggccccaaccccagctctccggctcaccttggtcaggtataaagggaaatttccaccatagttttctggaacttccacagacagctctgcaggctgggccttggggagagcctgtgggaggattctcaccttgtcaccaggctctatcttcctgcgtgggcactgagacccaacagaagagcggaatttccgccccttcccagggcctggctgtaccttagtccatccacccgcgctctggtctttgacctcctcatcccacagtggctctatagtcccagctctgacccctcccatgccttgcaccgttctcacggtcagtgcaattggtccaggtggagttgggggcaagggtgtcaacccccaaagccaagacctgaaggagagggggcagggcctagctcacctgggggacggagacacaaagcagccacagccaggcagggaccatggtcaggacaggcctgagggacacggcagtgaggatccagcccaggtgggtagggaggggctttccatcccacacacacaactagtgggatcgtactgcagactagtcttctcttcctcccctccaaaggagctgaggctctccatctcctgcagggtagtgccctgctcctcggccaggcccaccaaggcccccaggcccagccaccctgcttctaggctcttggtccatcaagcactctatcagaatttcacctccagacctccagctccttctcaccatagcctccccaggccgcagatcccaaagtggtaattttctagcaatcccccaaatcacaaaagtttgaagctggaaagttcctgaagacttggagggtcacttcctgaagtcacctcttgttgcaggcaaggcctgaatgctggggtctggccaaggtcacagaggacttgaccacaggaggagtcctcctagctcagggcctctgggactgtcctgcctcccactgccaccttctagacaaggagaacccccggagcaggagcccggcccttgtctcatcattttccagcccttgtcatggagctgggcaggcagagcagcgacaaatcgacaacccctctaagatgaggccctgggaattctttcccagatggcgaggacagggcagtgtttctcctttccccaccaccaacctcagcctcagccatgccctcccctccactcccagcccctcaccctccagcgcccaagactggctcccttggtccagctgccaagcaagaagagagctccttctccagggggctctggccaggctgggctgggtggggcaaggcagggcacttgagcaggtaggagggttcagccacgcttgctcaggagtggaaaaggccactgggcccacagcagcaggcctggccccgcccagccccccaagttactcattgactttggaaagccaggagctgctcagcatccgtgactgccagctccaggaggtggggagatggttggcctggcactccctcgaccccagcacagcccaggaggtattccttggccctctggttctggacgttactttttctgtggctccagacttggtctgacttatctcccaggctccagtgtctgcagccacaccttttcacactctgttccttttgcatggaacacccttcccactcattcatctgtgtggtaagcacctgctcatgcatgcttcagtgctcagctcaaatattcctttttccaggaaacttcccctatgttcccaggcttgttcaggagcctcctctgggaatgcccctccccctcacaccatgccatgtgctatctctattaatacacagaggacaccagcttgtcattgtctgcctcttccattagattgggagccctttgagagcagaactcagggactcaggaatgacctggctctcattctgccctggcagctccgcatggcttgtggaactaagacaaggagctggaggttgcaaaggatgggtgagcagtacatgagtggaagtgggtattggggctccagaccaccccccccagggggacctgtggtgggggagtgcagcagcctatgagctcccgaagtccttacactggccactcaacagtgacagggctgagacagtgggcagtctcatgcccctaagaagattaaactggctcaggtgaccttgagggagttgcagggctgaacaggggctctccccgcaatgagggcagccaagcagagccaggagatgcttctggggcctgggagtctggaatgaggggagagggtgggaagaaggtctccagtccctctccagccttggagcttcccatggtccccacgaagtccttcccactgtacatctgattagtctctctcaggccagaagctacccccagctgcccccagccttgtcacaagctgagtgcctgcttcagggtcactctggcacccagcctggagcagtgtagtgtggggaggttgaagggggtttcacacgtgttaagctcctgctctgtgcccagcactgctctgagcacataccttcattatgccacatactgcgttctgaaggggcattgggcacatgctggggcacagagaagctgagtggtttgcctagggtcacacagtcaataagtgacagagccaggaaggcctggggaccctcacttgatctgaaaataccatgccttctgcattccttgaagtatgtggggaggaggggcagagcagcaacagctctgagcagttacctctgccctggggagcacgtgggtgaatctcagcgctcccctgtacatggaggggcagccctcaagcctcctcctgccattcaataagctgcaatcaggattctaaccaggttgccagggctccctggagtctgtggaatgaataaattgaataaattgaactaaggaaggaatgtatggaccttggcccagaaccttcttagaaactgccccccaccttgccccaggctgcctccaggctttggagatgggcagacctgtataccagtccccactcagccacttcccacccagcaccagatggggatggtttttcctgagaccatgtagataaaaactcttagcagcacttgtgccgagggtgagggaatgaataaattgaataaattgaactaaggaaggaatgtatggaccttggcccagaaccttcttagaaactgccccccacctcgccccaggctgcctccaggctttggagatgggcagacctgtataccagtccccactcagccacttcccacccagcaccagatggggatggtttttcctgagaccatgtagataaaaactcttagcagcacttgtgccgagggtgagggagccatgggcatgggtgggcagggagacaggtgcatccctaaacataagc

SEQ ID NO: 1242708 - DNA, 4001 bp, Homo sapiens
gccgaggaagaaggggggcggggtagggaagctcggagaaaagaaacagacccggtctgtctgtcggagacacaaagcacggttcacaaagggggcccgagaggggcgaagggggctgcccggggcacggctcatccccacacctgcgcgcgggttgggggaagaatgtggccggcgcattcctctgctggggccagcgggggagaacttcccacgtcgagactgggtgaggggctcagccatccggcatctcggaggagggggtcaaggtaagcagtggctaccggacaaggggctggatgtcataggcgctctgctgcccagccttctccgtcagccaccacccccaatcccagcccccgaggcgcgttctgcgcctccccgggaactgaggtggcgccaggagtcccttgccccggcccgaacacccctcgcgcggtccacaccaaaatggtcacgtgcggcccctaccctgcggttccaccctgaggatcttacctttccccagcgcctggccgggctcctgctccgcgcctcccgcctccaaggtcacttcagcctccctgaagaccgcccggcacggctcggaggccgcgcactgcagccagcaaacctgcgcccgagggcagagagtgaaggaggctgggtccaggcgtgcccggccctgcactccccacaccgcagggtcctcacgggccttccgggactcccttggccccagggagcgcagccccgcgctctccccgacgccactgccccatgcggaccccgcccgccccccagggagcggtcccggtcggggccacggcgaggctgtggagtacctggagaaggaggagagacgcgagaggtccacgagggagccccatggctgcagagagaggggtgaagcagctgccgcgacggcgggccggtgttccgctcagctcttgcccctttgagcaccgcagcccccgggagccagcgggaggaggccaggtgagcgcaggtgggtgctgattggtccagcgccacgaggtcccgccccctcgcaggtgggaccgatgtgggtgcggttgaggccccagcgaacccctcctggcctcccggatgccctcctgcgctctcctggcttttctggagctgttctttacagggactcagcctctgtctcgcagttctgggttagaggagaaaagaacacccagtgcactcctcagcctcctcagtacgggaagagaaatgtttccttgccttgcggctacagcggaaaaaagtggagacacatctgaagtcgactgaaaacggaggctccgcattcattatcccccggaggcgctgttatcccaaagctttgaagcaggcccgtgcgtcctcccacacgcggctacagcggggccgcccaagcctctttctccacctcccgtgccagcccgccggggaggatcctccggggtataaaactagcaggtcccgaaggaccgcgtttctgaattggatacaacttcctcttttttcttttttttttttttttggagacagggtctcgctctgtcgcccaggagtgcagtagcgcgatctcggctcactacagcctcgacctcccgggctgaagcgattctcctccctcagctcccgctgagactacaggcttgcgccaccacacccggctaatttttaaaaattttttgtagcgatgtggtggggcggggggagggtggagggtcaccctatgttgcccaagctggtcttgaacttctggactcaagcgatcctccgcctcccagagtgctcaggttacaggcatgagccgccacacccggaccgcttcttccatttcacagctaaacaaagggaagctagtcgagaaagtcccagagtttggaagctgtagtggtgccaaagggtgcgagctaagagggttgttattagtctcataatctccagcacccctaccccccatataaataacactttctcaactttctgtaaaatgtaaataaagacaatttttaaaacgcagaggttttgaaattggtctgaaatactgtatataatctgggtaaaaactgcttgctgcgcaaagcagcctccagagagtctcccttggaaaacagctctcccacacccttcctaggagataaacgccagacctgggattcgttgttcttctacgttactctcattccactacgttagacacgaagtgctttcctcttgctgcacacaagtgggctctggccatgaaaacggtcctgagtctcaatcactaccccacaagcccttccccacggagctgagctttcccggtcagtctctctcacctgtcccctcactcctccttcaccttctgctgctgccttgagaagccctggatgccacctcctggtccttctccctccccgtccccagctcagatttaggggtttgaggaacggactggagactggagaggtttttttgttttgtttgtttttttgagatggagtctcactgtcgtccagtacggtggcgtcatctctgctcactgcaacctccgcctcccaggttcaagcgactctcctgcctcagcctcccgagtagctgggactacaggcgcccactaccacaccaggctaatttttgtatttttagtagagacgggatttcgctatattggccaggctggtctcgaactcccgacctcaagtgatccgcttcccttggcctcctaaagtgctgggattacaggcgtgagaaacggggcccagcctggagttttaaatgacagattctttgaccttccagggctaacctggtaatctatccgtcctcctccccgccaggcctgtggctaagccatggattgcttgcgttgcgagggtgggggtcttgctctctcaggcctagcatgggcccttaaggccggccccacctgggttcaaatccaggtcccaccccttagtagcgctgaagcctcggggaagtaaaataaaccccctgggcctcagttctgcatctgtcaaatggggctgttatgatcttagtattttaccctctcatagatgagtattaaataaattagaaggtttaaaacgctaaacatcatatctggcacacagcaagtgcccaaatgctgcctggtattattgctctcagatgtctggcgagccgtctctctttctagcatccccacatcccctgaattaagagaatgagaagcgttgtaatcctccaatttcatggctgagggtacaacgagcaactggcatctggtatctcgggagcattcccttagccggcgggtgagcccagcagctggggctgggactgaggctgggggtggaccacgcggttgggaaagcctggggctgctcgctgagctccgcgccctcccggcctggatctcccgcagggcgctttttatgcccgaggggaggtcaggtctacgcgcacccgcgcggcgcaatggagtgggcccccggcgggacagggtggccaggcctacgctcgcctcgcaggttcccccgcgcccgcccggagccagacgaagccattaggcggacggttaaacacaaacgagcctcgggatgcaggccctaattaagtaaacacccggctggtgggctgttgagcgcgctcatttccgcctccttctcgggcactcagcattccggacgggggcggagagaggagcggagattggagagtcagctcttctgcctgcgacgcggaccgcaccgctgccttccccttagctccccttgtcggtcattcactcattcattcatttcaaaaacatttgctgacagccggcgatgtgccaaccacttaagatacaacagtgaacaaacatccctgcgccttcggacttgccatccagagtgtggagggtagaggaaagtgaaaaaatacgtggaaatataatatgttagatggtaacatgtaccgtgtacaagaacaaggacaggggggcccggcgcagtgggcagtggttcacgcctgtaatcccatttagaaggctgaggtgggtggatgagccc

SEQ ID NO: 1242709 - DNA, 4001 bp, Homo sapiens
gatacagggaacagtcatgggtccatgtgggcaaaatgagcctaagattcttcctgggatggtgtcccctctgtcccctgggtgtccccaagtcagcagtgaatcatccaactttgcagaaaatgtgtggcccctgctggcttcctgccctcatgtccggcccttgtttggcaacacaatagctcaggctgaggctgcaggcgggcagcttaaccccttccaggccagtatacacctcccctacccctcaccaccataagctgaaattggtagggctgctcaggggctcagcagctcttgggccccttggtggatacctgctgctctctagggcaggcagaggagagtcccaggcttcccaccacctgaggatggaccagggcttctggccctggctccagtggcctgtggcaaaagagccttccaggtacaccctcgactcctcaaagctgcctccctgggaatgcccttcctctcttgtcagaatcctatctgcccatcacacatgagaaacgtccacgctggggagggagcctgacatggagcagaggcccagaggtgctcgcgatgtcctctcacttgcacccccttcctcgtacctgctgggcacctgaggacccctccgtgatggggtttgaccatacctcaagggccaaaatctttatcacattcacaaccaggatcggctctgtgctagctggtaaatccagccactattccttaaagatctcatgttatgtgccattcccagcaccagggatgtagctcacttcactcaattgactgaggaaacactgtttccccatttcacagatgagacacttgagacctggggagagctggggctttggagtacgagatcctggttcaaatccccacaccagctcatatgtttccaaagctcagttgctttcactgagatataaagaaagaatgtatctaccttgtggagttgttaatggtaaaataatgagccccacaccatcccttgttccccactgtggtttggaaactctgggtaactttcccaaggtcaccccagagcaaatgggagagctgggatctgtacccagggcagctgtctccaggccaggctcttggcccagacctcctgcttctgggggacttcctgggctgtgggggccttggggctcttatgctctagcctttgaaagggtgctggtgggaggaatggtggaccgctgtccagactacagctcccttgacacatagtgggccccgatggtgtttgggcagggaaaggcccagagggaaaggcaagacctcaagtgcccagagccaagcctcagcttgcctatcctgaaatgggggcactggctgaccgagaggggccaaggctcggagcttccttttcagggcccctccccagatcccagcatagagctttagtggcgtatgggtagggggctgaggaggctggtgtcaggccttggtaaatcctctccagtaagggtaaggcaccgaggggaggccaaggcctgggtgccagtcctctgccccggcatgctgggcaactggggcagaatactgccctctctgagcctggcactgatgaaggccagtgggcctttttgagttggagaatacacttctgggagagccaagcccttgccctgcccccctcagccccgagatgcccatttgtgcccttggcactacctctgggtgcaccttccccgaccctgctctgagccacgaggaggcccagcgtgccctcgaggagcctctctgtcatgggagtgggacgatgcccattctacagatggggaagctgaggaccctcccatcttgggcgcagggtggcgggtttggggtggaggggagtgtgggagcccccactcaccgtgcctgtgggctgagggatgtttctgttccgttggactgcctgtccgtccagggctgagcgtgagtggagctctgtggagcctgtcagccgaccgtctttggaggggagccacaccccgctggcgagggaggcctggctgcctccccttcaggttttccagctggccctggcccacttccccctgggatggtttcctgttattgttcctttgtgagggctgggctggctgcagataggcaggccctgcggtgggcggctgcctcggccccggatggctgtctccacagagggctggcactggaccctgcctggggcaccccacttgaacccctactcccggcctcagctctgggactctgaacccagcacctgcaaagagcctggctgtggggacccttggctgcagcatcacatttaaccctccttggaatgctacaggcaggtgtcatcacccccattttatagcccgggaagctgaggctcagcgggtttaaggtgcttgtccacccagctggggtataaaagagccaaaaatctagctggggtcagcctagccccagagcttgattttctgtggtgatcccatgatgtctttgtgggaatggactttaaaggtgacagggaggcttcaggagatgggaaagggacagaagctcttggctctggaggaccaggttggcttctcctggtcagagcgggcatggactccagctctaaggtgccagcctcggtctgtaggggatgtttgcatttagggatattgggtggagtcaagtgacccagctctgcttctgatgtgacctctggccagttgtgtcatcctggagccacagtttcctcatctgtaaaatggggataatcacagcctcatcctcacaaggcttttgacataaacgagaatcaaagaggggcgtggaagacagtgacgctgaggctggatcagagcccagaagaaccaagaggctggggggaagggaggggccaagattctgctgaccaggagagacataggaggagcttctaaaaactacagaggactgggctcaccccagatcaactgatttggaatctcccagggcagatcctgggaatctgtcctttgaagagttgcttctgtttttccatgggtgaatggttgggaagtcccaaacttgttttattatatagctgggcaagcagagaccctgagaaagagagggcccagggccgtttagtaaatcagagcacaagatggggagtgtgatggaaggatatttttggaggaggaggggatagtgattcctctgtctcaggcaggttgagtttgagatgctcgttagatacccaggtggaggtgtcaggctggtgggggagacaggggtgagtccagcctggagtcgaggtttggaacccaacagcttatggctggcatctgaggccatgggcatggatgagcttggagggagggaggacttggaccctctgacatttggggatccattagaagagggtcccatgatgaaggaggaatgccaggagagggcagaggaggagggcaggggagtagtcagtgggtcagcctggggagcatgagggctgagacttaactttggatttggaagatgaggtcatcaatgactgtgaccagaacaggttaaacaggaaaaggtagacaagacagattggaggggctagagaaaggggagaaagggggacggggatgtggagtcacgtgtgactgtagcttcttccccaagtcttacagtgaatgggagcagagaagtgggagggttttttttttttttttttttttttttttttaactatggcagcacgctcatgtccccagggagcatccagcagacgggaagacagatgatgctggagactgaggagcgacctgctggaaggagaacagtccttggggcggaattctgagtgggatccaacacattcaacagccgattgtggaatgaacaaacaacagctcagcgcttccttctccaatgggattaactctgctttctcctgcccagagggggggttggccgcagaggagccaggacagtgctctgtcccctgtgttccagtccacatccccctcacccccgcctgtcctcatggtctacgtgcccatggggatacactggcctgt

SEQ ID NO: 1242710 - DNA, 4001 bp, Homo sapiens
cattacggactaatattgtgcgtttgcaacaataaacaattaatgtggtttgatttcttacatttagcaacccaagcaaacagctgccatctccgctggtggaggcaaacggctagtccttgacatgccgccggctccgtgcctgcgggggaagggtcaaccgcaaggaaactttgaggattctgccagactgggtgggggaaggctctggtgtttgggaggaataagcggaggaaattgtggatacctgttggcatcagcgttggcggcagcacgtttttttaccgtttcccagccttggctggatcctgggagaaccggagtaggtcccttatgaacctcttacgtactggcagaacctaggcaagagcctttttccctccgatcctgcgaggggcgcgaccagcccctcaaaggttcccggatgagaagcggccagaccacagaaagcgcaggtctgggctcagctgtccctaggagagcggctacggagtccccggcttaagggggcctccgtgcacgcaatctcgagttgcggggagacactgcctgggggtcctgcaggggtgctgggcagcgtcttggcgagggcagagccgcagggcgactccggagcccggcaagtttgtagcgggcaccgcacctcccagagctggagctgccacttgtgggaaagcctcgcgctggggctttcgcagctgagccttggcccgcagccctgccgcgggggtcgccctccctcgcctcggagatgaggcggtgcagaaaaccagccatagaccactcgggccccctcgcctccttttttccctggcttgcaccctccgcacagcgggctgcaggtgcttcccattcaccgcacggaccccgcagtgaaggcgcgcggctgcagccgcgcctgcctgcgttgggaagcggcgaaatagccaagtcgccgcagggaaggaaaccggcaggaaaactggaggggcacagcctggagcttgctactctctaggatctgttgtcaaagcagtttgcaaaaacagtcaggcaaaaccttgaggcgtacgtacgttatcacccacggatatcgcgaaagacacagcttagcccagagcctatgctaagaaccctcatccaccatctgaggggcaggaggcgcgcaaggtgtccgaaggggcatgggaattcctataagaaacggtcccttctggatagtcggaacatagaggaaaacgggggtgggttaggggaacacttactcttgtggggccctgcgctggcgaatgtcaagcctccaggttcacaaatggctggaggtgctcggggttagctcccgagggcggcaagcgccgaccggtcctcgctcgctaggcaggcgcctccggattccgttcatgcctctcggagctacagggcttggtgcggagacgcagggcgggcgcgctgggctctgggtgtccgcaacccaaagtgcagctggtgtcttgacgctaccgtctatgcacaagccggcggcggcggcggagcttggaggaggcagggagattccaaataaatccactaattctgggctgagcgctccggcgtgcgagcccgcctgcctgccaaatgtaactgtgaagtgatgtggaaaagtgagccgggtgcctcccctgacggatctcattgggcagagcgcagaggcaggtctaccacttggaaattcatgtaagcagtcccccctccccgccccctccccgccttcccccttcgctctcccgcgctggctcgatcgctctctttccccctacccaagtgggcgcacaacttttcgctcctcgctcccgagcaagccccgcgcgtctctgccgccagagccacgaggtgaagatgcgcccttccgcgcggtgcgcgcagcccgctgaggaccgagctcctggataagtgggctggcagataataacagcatgcggatgaggtacctgcgagctttctctctagaggtctcacctgagctctggggctggcgttatgttgaaaagcgtctcagtgacccgcagctattttccgtaggaggaagaggacgcgacagggcaaagggttgagcgtgggcagcttacctcctctttattccaagggcctcttgcgtacagaatagggtgattgtgagacccctgcctgcaactcagacgctatgtagaggctgtgtgtcgcggttctgtgatggagcgcattcctgatgtccccgtgctcctttgggaaaatgggatgagggacagcagagtggcagccaggaggggcgcgcagtagttggttgtggggaggagggcaggcaaagcagaacttgcttgggaaataggggaggaatttctaggtcttctcaatgtgccctgatcttgtcatatcctctcagataccatccttgcggttctcctgcctccaccaagacctgccctgtctgtggtcacttcaagtcttctgatgggctgcgctcagatcttgagaaatggccaccctggggtaaaagggaccatgaatcaggaggtccagatttcttttctttttcaacactggggctaacatgtagacgatgccacagtcatcatcttctaataaaattagataaatataagacaaataaattcttaccttaaaaaaaaaaaccctcccctccacaggagatcccgatttagtcccttccctgtgtgcactagacgtgagcctgagggtggattttaccatctggggacagagcaagaacagaagggggaaaaaggtgcaggggacaagacgcacagtctgtagagcttgtactgtctcactcaaattaatgagaaagagtgaacagaatgagaaaataggcacaacatgcttatgatatttatgcaaatttgacatttttttgtgtgctgcatctgacaacccattgtgaaatgtgaaaaagagtattggctgtagctctaatatctgattgtttcatgttctagctgtcataggcaagaaacttagtggattatttcagagagggagaggtgaagagaaccaagtggtattttttttcccccaggcagtcactaagtaactgtttgttctcttctcagactgtgtctgcttacagggtattggaattggctaattctgtcttggaaaaaggagcagcagtcaaggctcaatcaaattataactgctgctagaccagacagtcccaagtggacaaagaaatagatcacattttgggttgtgcttaatttcagatattcattttcacttgaacaaataatttgaaccgttccttggggtaacttcttacatctatgaaaactcaaaaaaactcatgtgctactgaaagctggggattgtcacaagtaacaaacttgtctcaaaaaaaaaaaaaaaagccagattgttagacaatatcctcaaatctcattttcttaacaaactatgctgacatagtaaagatagtcagaatccaatggcttttaaagagagccagaatccaatggctttgggtatctagggttaagaagagtttgctttgactcatcttgtccatatttactcttacagcagttatatacattgtcttccctgaattttggtcctctggaattcagggtaacctgtctatacctgctaatatctgctcaaagcgttacaataggaatttcctgactaattcttaagagaggtttggatgattaagcagtgtgatagaggattaggataatgttagaaagccctataaggatatttctaaaataatcagggatgctgaaagacaaggcatttatctctttaacaattccacccactcttaataagatgcagtgtaatgtcacaatggtgaaagcctacccccttaagaaagtgttttcttttcaacatcctctccagggttacagccttccagcgggaagaggactgtggtacataggctttttagaatggcaagtgaaattgcatgtgttgtggagcattgcgggggaggaagggtgaggaattatctgatagggcaggagtataattggagaagg

SEQ ID NO: 1242711 - DNA, 4001 bp, Homo sapiens
gatgactagcttcaattattgccaacgtgatctgctggggcaagctggccttcgggacgcattccgttagctccttctcaaaacaattttgttccctgaagtattactttacatcatacagtcaatgttctgctcttatggtgattctagaaccacggctggctgctcttaaatccttgtaagaacttgggcacggtagctcctgcctgtaatcccagcactttgggagggtgaggcaagaggatcacttgagcccaggagttagagaccagctgggcaaaataatgacatgccatctctacaaaaaaaaaaaaaaaaaaaaattagccgggcatggtggggcatgcctgtagttccaggtactcaggaggatcgctggagacaaggagttcaaggctgcagtgaacgtcgtgacggcaccgctgcactccagcctgggccacagagcaagaccctggctctaaataaataaatgaacctttgtaagagaacctgtaaagctcttccctggttctcccatcctgtggaaaacctccgaactccttcaaattctcaagggtgagagacggatttctaaatacccagggcttccattaaggtaaaaaccattaagaagataaaaaagtcaaacccaataaacaacaattctaagactctaattaatgacatgcatgcttatttgggagggaaaggcactgatatctgcaacttactttgacacaaaaaacaagagggactgctggttggacaaatatgtgatgaaatacaataaagtgttaactctacattctaggtggtggtctgtgggtgttcactgtaaaattccttcaacttttgtatgtttcacgtttttcgtaactgaatgtgtagagggggagtcttctgagactggcaagtgactgggcataacctttccgattaagggcagagggcaaggcagagctggcacgcctccctccacccagttctacctagatcggccccaagggaagcagcaaagaacccaggagagcagtaacttgcccgggcaccgccccgcccagcatcaggccccagaatacagaagaaactggcagaaacactatggaacgtccctgcccccgggcccgccaaccccctcactgggacaggttctcagccccagctgcgcccgggaatgatctggggagcctactaaatgcagattcctgggcagcgcgacggaactacagcatcccaacacctggggtgggccccaggaatctgcccgtttcccaagagccccaggtggttctgacgcagaggatcttgagcccacctttggaggaactcacagccactcgccccacctcatctaacacctgttgagaagccccccaaggaactcgctaagccaaggtcctcgaaggcgcgactcctagccccaagctaggccaggccgtcgccatctccgccggggatgcgcggccgagcgccacatcccgactccacacgtcggcgagccgggcgcgggtgcaggacactgctgggctccgggacggccaaggtcacccgcggggctcggcaggggctggctcggccacggggctcctcctcgaccccctttccttgagaaaacaactcccacccctcccctccccgtctcgccctgcaagacggagatggcaatttccacaaccttccctgacggaaaaacgtgcgggcgagcaggctgccattccgggcgcacaaccccgcggcacacagcggggcgcccgcccgggccccgccaccgcagcggcttcgacatccccagggccgcgctaggtctcggcagcgccctgaggggaggacgggccccgccatgccgcgccccaaccgccggccccgctttacctccagaagcccggtgcccgaggccggccgaaagcggagaggggcccgggtccggacaggcgccggcagaacaagaccctcagccccgcgcggctttgcgcgcacaacgaaaccccccaacccaccgcccaccccaccgcccagaggcttctaggacttgtagtccgcccggtcaccccccccaccacaacccgctctgagaggctggggactacggtgcccggcatgcaccgcccaggcgccgcgggcgggggcggggagggggcgccacggtccgaggtcacgccccgacctgaggagagctggcgcccagacccttcccccggggaggagggctcccgcgcgaagccgtctccgaatgcgtccagtcgactcaccgtccccgcagccctggggcagcggccgcaacagcaggaccgaacgcctcggcagctggcagtcgcacttctgtcacaaggaggcgggtagactttggaccagggccgaggcccgggacgtcacggtggggggtggggtctcgggaggcacgtgatgcgccgtgatgacgtcagtgggagcggaggcgatttggcctagagctggggctgagcacgtgggatggtcggggcctgtttgcccaatgtacacgaggctggagaatagggaaagaaccgtccctgtgagcgcctcctcttcactcatgccagcaacagggcagggcatcttcctccagggctgcattttttcttttatgcgactaatatttattgagtttgggaggtgcattacataaaaccttgaaccacacggtcactgtccctgcgcttgaaactgcctttgcaaaaattacaacagaaaattatgacagtgaaagagagctgacctaacccactccatcttgcttctaacctccaggttgtccttgttcattcctaggcataggcagaactaactttgggagcaacttagtttatagtttaatattgaaacaaagatagttaacagccctttcccaaaacaaacccccttgttgcctgagaaccaggcttcctttgtaagagtaacacgttagctacaagattagacattatagtttagggcccagctcagtggctaacgcctgtaatcccagcactttggaaggctgacgcaggtggatcacttgaggtcaggagtttgagaccagcctggccaacatggtgaaaccatgtctctatttaaaaatacaaaaattagccgggtatggtggcacgcacctgtaatcccaactactagggaggctgaagcccaaaaattgcttgaacccgagagatggaggttgcagtgagctgagattatgcctctgcactccagcctgagcaagagactgagactccatctcaaaaaaagaaagaaagaaagaaattacggtttaggagtcatgcacccagaggccacaagattctaaacctccccagttgatcctaggtataatatcactattgtaaaacctaagattggtactcttaggtgtttttctgaccctgcagtctgatgcaccagccaaggccacctagagctgtaatctgactcaaccagttcttgcatccttcaacaccctgtgatttcatctcccaccccaccaatcagcactccctactccttggcagcttatctaccaaattaccctttaaaaactctaggctctgaatttccagggagactgatttgagtaatgaaactttggtctcccattcagccagctctgtgtggattaaactctttctctattgcagttcccctgtcttgatacattggctctatctgggcagccaggaagaagaacccactgggtggctacttgctcaggtacttcctttgttacagacagtatacaaggaaaccacaaaatgcccaggactgtgaaggagaggaagggacgccctaacagagttacggggtggtgccactagacaggttggttagaaaaggcctctcagaggaggcgatgctgaggcaggggcatgaaattgaaaagacattctattctggaagggcattccagagggagggattgccttgggtgagagagtcagaaaggtgaggatgtcagtggggcaggctggatccaagtcatgttgagatttgtaggtcattttaagaactctggccaggcgtggtggctcatg

SEQ ID NO: 1242712 - DNA, 4001 bp, Homo sapiens
gcctgtagttccaggtactcaggaggatcgctggagacaaggagttcaaggctgcagtgaacgtcgtgacggcaccgctgcactccagcctgggccacagagcaagaccctggctctaaataaataaatgaacctttgtaagagaacctgtaaagctcttccctggttctcccatcctgtggaaaacctccgaactccttcaaattctcaagggtgagagacggatttctaaatacccagggcttccattaaggtaaaaaccattaagaagataaaaaagtcaaacccaataaacaacaattctaagactctaattaatgacatgcatgcttatttgggagggaaaggcactgatatctgcaacttactttgacacaaaaaacaagagggactgctggttggacaaatatgtgatgaaatacaataaagtgttaactctacattctaggtggtggtctgtgggtgttcactgtaaaattccttcaacttttgtatgtttcacgtttttcgtaactgaatgtgtagagggggagtcttctgagactggcaagtgactgggcataacctttccgattaagggcagagggcaaggcagagctggcacgcctccctccacccagttctacctagatcggccccaagggaagcagcaaagaacccaggagagcagtaacttgcccgggcaccgccccgcccagcatcaggccccagaatacagaagaaactggcagaaacactatggaacgtccctgcccccgggcccgccaaccccctcactgggacaggttctcagccccagctgcgcccgggaatgatctggggagcctactaaatgcagattcctgggcagcgcgacggaactacagcatcccaacacctggggtgggccccaggaatctgcccgtttcccaagagccccaggtggttctgacgcagaggatcttgagcccacctttggaggaactcacagccactcgccccacctcatctaacacctgttgagaagccccccaaggaactcgctaagccaaggtcctcgaaggcgcgactcctagccccaagctaggccaggccgtcgccatctccgccggggatgcgcggccgagcgccacatcccgactccacacgtcggcgagccgggcgcgggtgcaggacactgctgggctccgggacggccaaggtcacccgcggggctcggcaggggctggctcggccacggggctcctcctcgaccccctttccttgagaaaacaactcccacccctcccctccccgtctcgccctgcaagacggagatggcaatttccacaaccttccctgacggaaaaacgtgcgggcgagcaggctgccattccgggcgcacaaccccgcggcacacagcggggcgcccgcccgggccccgccaccgcagcggcttcgacatccccagggccgcgctaggtctcggcagcgccctgaggggaggacgggccccgccatgccgcgccccaaccgccggccccgctttacctccagaagcccggtgcccgaggccggccgaaagcggagaggggcccgggtccggacaggcgccggcagaacaagaccctcagccccgcgcggctttgcgcgcacaacgaaaccccccaacccaccgcccaccccaccgcccagaggcttctaggacttgtagtccgcccggtcaccccccccaccacaacccgctctgagaggctggggactacggtgcccggcatgcaccgcccaggcgccgcgggcgggggcggggagggggcgccacggtccgaggtcacgccccgacctgaggagagctggcgcccagacccttcccccggggaggagggctcccgcgcgaagccgtctccgaatgcgtccagtcgactcaccgtccccgcagccctggggcagcggccgcaacagcaggaccgaacgcctcggcagctggcagtcgcacttctgtcacaaggaggcgggtagactttggaccagggccgaggcccgggacgtcacggtggggggtggggtctcgggaggcacgtgatgcgccgtgatgacgtcagtgggagcggaggcgatttggcctagagctggggctgagcacgtgggatggtcggggcctgtttgcccaatgtacacgaggctggagaatagggaaagaaccgtccctgtgagcgcctcctcttcactcatgccagcaacagggcagggcatcttcctccagggctgcattttttcttttatgcgactaatatttattgagtttgggaggtgcattacataaaaccttgaaccacacggtcactgtccctgcgcttgaaactgcctttgcaaaaattacaacagaaaattatgacagtgaaagagagctgacctaacccactccatcttgcttctaacctccaggttgtccttgttcattcctaggcataggcagaactaactttgggagcaacttagtttatagtttaatattgaaacaaagatagttaacagccctttcccaaaacaaacccccttgttgcctgagaaccaggcttcctttgtaagagtaacacgttagctacaagattagacattatagtttagggcccagctcagtggctaacgcctgtaatcccagcactttggaaggctgacgcaggtggatcacttgaggtcaggagtttgagaccagcctggccaacatggtgaaaccatgtctctatttaaaaatacaaaaattagccgggtatggtggcacgcacctgtaatcccaactactagggaggctgaagcccaaaaattgcttgaacccgagagatggaggttgcagtgagctgagattatgcctctgcactccagcctgagcaagagactgagactccatctcaaaaaaagaaagaaagaaagaaattacggtttaggagtcatgcacccagaggccacaagattctaaacctccccagttgatcctaggtataatatcactattgtaaaacctaagattggtactcttaggtgtttttctgaccctgcagtctgatgcaccagccaaggccacctagagctgtaatctgactcaaccagttcttgcatccttcaacaccctgtgatttcatctcccaccccaccaatcagcactccctactccttggcagcttatctaccaaattaccctttaaaaactctaggctctgaatttccagggagactgatttgagtaatgaaactttggtctcccattcagccagctctgtgtggattaaactctttctctattgcagttcccctgtcttgatacattggctctatctgggcagccaggaagaagaacccactgggtggctacttgctcaggtacttcctttgttacagacagtatacaaggaaaccacaaaatgcccaggactgtgaaggagaggaagggacgccctaacagagttacggggtggtgccactagacaggttggttagaaaaggcctctcagaggaggcgatgctgaggcaggggcatgaaattgaaaagacattctattctggaagggcattccagagggagggattgccttgggtgagagagtcagaaaggtgaggatgtcagtggggcaggctggatccaagtcatgttgagatttgtaggtcattttaagaactctggccaggcgtggtggctcatgcctgtaaccccagcactttgggaggccgaggcaggcagatcacttgaggtcaggagtttgagaccagcctggccaacacagtgaaaccccgtctctactaaaaatacaaaaattagcccggcatacacgcctgtaatcccagctattcgggaggctgaggcaggagaattgcttgaacctaggaggcagaggttgcagtgagccaagatcacaccactgctctccagcctgggagacagagcaaaactctctcaaaataaaataaaactctggattcttctttcttttttttttgagataggatcttgatcaggcacccaggctggagtacagtggcatgatcat

SEQ ID NO: 1242713 - DNA, 4001 bp, Homo sapiens
tggcacagtggatgcaggacaggtgcccatatttggtttatcactctgacgcagggtgtaaacgaagactggaagtgtccgcctgcctggggaggaacgcaggctagaaaacaggctgtgtgtgaggtcagtgggcaaaggtcaccatggcatgaactgagaaaggcatgagagtggagggaacagggtaggaggagaggaaagctatgtctgcaactcatcaaccccagaaccaagactccagggctagatagagacttgatgcctcaggggaagccttacagttgggtctggagaacagattaaaaaattagtcaaccctccagaagccatcacccttccctctccatcctccctctaagcatgccttctggaaccccaactgcttatgcagggcacacagtaggcctccagtaaacacctgttgaatacactgttttttgttttttgtttttttttttccgagacagagtcttgctctgtcgcccaggctggagtgcaatggcgcaatcttggctcactgcaacctccgcctcccgggttcaagcaattctcctgccttagcctcccgagtagctgggattacaggcacgcgtcaccaagcccgctaatttttgtatttttagtagagacagggtttcaccatgttggccaggctggtctcgaactcctgaactcgtgatccacccacctcggcctcccaaagtgctgggattacaggcgtgagccaccgcccctggcctgaatggacttgtattcagagagacctccagcagcgccaccgccatgtcatgtcttgctaatccacacctctcacaagcagtgagttctcaagagctagcttaaattccttttgctacaaaatcagtccattcttgctgggcgcggcactttgggagcaaggcaggaggatcgcttgaggctaggagctggggaccaatctgggcgacactgcaagacccagtctctacaaaaatttaaaaattagccgggtgtggtggcacgctcctgtagtcccagctagtcaggaggctgaggtgggaggattacttgagcccagaagatgggggctgcagtgagccatgatcgcgccactgcactccagcctaagtgacagagcgagaccctgtctcaaaaacaaaaaaacaaaacacaaaacaaaaagccccaggccatcctgttctgctttttccagagatgggaatgacagccctctgactctgaggtcccgaggaggcaggggaagggaggaggggattgttgaaccccaaggctggctgagaggggtgtctgtcaccttgattaagagcgcgagcagcgtgtccatcgaaagcgtccagcaggccgctgagcaggtagaaggaggaggccgtgagggggcagcagggcatgaagtagaaagaaatgatggcgaagacaatccgggcataaccttggaacgggacgcggggagacagggcaggatcagggagcccgccaaggcccctcgccctctcgttcggcccggggccgtgggcagcactcaccgatgaggttgggcacgaacaggaagatattttcgtctggcatcgcggcgcctcccttgctgccccgggcctgctctggagatgccagtgctgtcccagccccgcagcgcggcctcagcctccggcccggcgcatcggccgcaccacctgcgccctggaccccgccgccccaacctggccccagatgctgaagcccgcagccgtcgggagcatggaccggccccgaggtgcgcgggacgcagggggcgcgcgcagtccgcccttcctacccgcaacctccctcgcctctgccagccccgcaggcgctccgggcctccagctgcggtcgccgctgctccagctgcgcgtggcttccgggaacctcctcctccgcgcccgtcgttgcaaaattggagagaggaaaaagtggcttaaaaaaatagttgcggcccctttaaggcctgtcggcttcctttcccttttcctccctccgcccctctcccttggctcgtaccaaagcgcagaggaggagagggaggaaggaaccattaacgtcaagcaaagttagaaacggaaaaggaaagggtaaaagagaagaccgaataaaaatctctgctttccttttgtggagggtatgacttcctggaggcaaagataaggcgataaaattcctcctcctgagtctttgcgtccccaagaggccaggagatttggtgcagtcctcactttactccccgccccctaagtctccagccgcctttgctctcgcaggctctaggcggctagagaggctccagagcgccctgcagatgggttgcttttcgcgtgccccttgtgatgggaggattaggtcgcaggctccaccctacgtcatcctcccaagcttctcaagcgtctggcgcttggggtcactgccctcaaggaggcacctggaggggtacggaggggaggctggaggagcaaacggggcgcgctaggaaattcctctgtctttagttctagaacccctgatctcctagcaacgaggctgcggaacctctgcagactccaagggttttatagcgtccggtagcgacacggagccggctcccccttttccagccttcctccccatctcccattctccatcccccacgacctataccagaggtccttaggcctccacgtctctccttttgccgagtagcccaaggtttccacccatctgccaggtctggggcgtcaagtcggctgcctcggcttgggaaggtgcttgggagggaagaaggaaggagaggcccaccaggcgaaggggtgaggggtagggggttgcgggagttccctctcactcccgaagatataaagcaacctttattattattattattttttcttgtgagagggaatgaggcagcgggatgtttcctctaaaggccttgtttaaacctgggcccggggaatggtggtggactgggttctgggggaaagcgggctggtttctcaggtcaactcaggcttcgactgttcccagggggatggcgtccactccgatggggaatgagggggagaagaagagcagctggccatctcaagctgcaccctccttgagaggaggtccggtgagcactgcagggaaccctagaggtgggaatgtaatgaagtgaaagcctcccaggcagaggcaccccgtgccaggtctgagccacgggccctgagactctagcctcaaccctgagtcctgaagccccgactcatagctctcagcactaggccctgactctaaacccccaccaaacccccctcccccaggtccagagctttctagctaaatctcaaggcccagtccttcaggagcaagctccttggacccacaggccccagcctgggaactcccacagccagcactcccatgtgggagctcccaggctgaacccctccggcttttcctttcccaggcttcgttatctcgttctgaggaatacctgtcccagatcagtgcagaactcatggaggaggctttgtgcactgcttgctgccacttgaaccctgtgcccatcaaaaaaaagcagtcacaagaccaagcgactcagatatccaaacgcggtaaccccctgcctcaggaccaccgtgtctagagaaccgctgcccccactatgcctggttacagtccctgacccctcccacccctagctgaactctccaggagtctgtgcccatctcatccatctcacagccagccctaggacctgtgaaatgcccctctcacccgctaacccagtacccactcctcactgctggccgagaatccccttagccccgtctgccctggccgcatctcttctggccacggggatagtcctttctctgactaggtcctctacttccagcattcttcaccaagacctgaggcacagacacctggtgagtgaggcttcaagggagatgctctttgtcctgggagagaggtgaggaacctggaggggagagagtgagggtttcacaatatcccagcagggt

SEQ ID NO: 1242714 - DNA, 4001 bp, Homo sapiens
actacctcctggaagttatgaaacgctacccagtggcatctggccttggaatgtgagctgaagggaccgtgtgacttccaggtgaaaggaagctttcacctcttctcacctcagtgacgggaagaaaaaatggaaccagaatgcctgacccacctgtgcaaaacaactgcttctctccagaatgttaggggagagtgaaaaaaggcatcatcttgaggccctgtattttggggtctctgaactagtagagtctgtatccttctccatggatctaagaagcacatgtaagccgggcgcagtggctcacgcctgtaatcccagcactttaggaggctgaggtgggtggatcacgaagtcaggagatctagagcaccctgactaacacggtgaaactccgtctctactaaaaatatgaaaaaattagctgggcgtggtggcgggcgcctgtagtcccagctgcttgggaggctgaggcaggaggatggcgtgaacccaggaggtggagcttgcagtgagccgagactgcgccactgcactccagcctgggtgacagaatgagactccgtctcaaaaaaaaaaaaaaaaaaaaaagcacacgtagcaaggtttgaaacctcacagcccccatttcccggcttcccttctcttaaccctcagtatcaaacctgggctcaagcaatcctcccacctcagcctcccagattgctgagattacaggtgtgagccactggccgcatttgtcctcagtctgattccttcctgacacctggggaccgagtcagaagcatctggcctgtcactcactgatggcctagtctcaaactccctttcccgccttaattccccttctcacatcctctgcttgtgctcttctcgacacgcttatttctgggtgtccaaatccttgtcacacttcctgaactcaaagaaatgccaggccaggctgggggcggtggctcacgcctgtaattccagcacttgggaggccgaggcaggaagatcacttgagcccaggaggctgacgatgcactgagccgtgatcacgccactgcattccagcctgggcgagagcgctagaccctgtctcaaaaaaacaacaaaaaagaaaaggccaactcactacttcaccccagagtccagcacacggctctcaacgcggtgagcgcctgctgcacgtctggatgagtaaagtgtggctcctgttgtcatccagccacgatctgttaatgattcttactgaacacgtggcttggcctctcagagcaccagccagcagttaaaaacacaaaccagcggccaaagttcagggctctccacccccaccagccgtgcacctgggcaacaccgcccaacgcccagaggctctctcctggtctctgcagagggaggcaccggcacctccgcaagggacgcgcccagggttcgcgtgaagccgccaggcagcgctggaccccgctccatgcagcccaagcccagcgggagccttcaagctcgaactcgtcgcgggtgtaaattctccccacaaacaagtggctcgcggctcagcctgcaaagcccagctcgggcgctgaacccagcagcgcccgagctggatcccggagcttgctcttcccaagtcccgggcccgtctctccgcgggcgcgaggcatccctgagcccgccccggcccctcagatctccagggaccggctgtcgggggtcctgagcccgccccgccccggcttccgcccccgccgcggggaactctgggactgtcgttcccgcccgtgccggaagcctcggcgcggcagcgcgacacgaggctccccagacccagccgggcagtgccgctagcgaggcgggcagagctgcccgggtggcaccccgcgcaccctgtgttccggaggcaccgtgaagaagccctccttacgaatacacttcagacggatctgctcgcactccagatctggctccgccatgccgagcgctggccccgcctctcttgcgcgcaggcgcagacgcggacggccccgcggcgcaggcgcgaaagctccttcccgggcttcctctccttagcaacggttaccaagagacgctcccgcgggtccgccctaggcgctgggctccagggatcggctccgactgctgcagttcgggccttattttagggtgaagcccgggcagccgacccggctgcgccgtagtgggaggccacggcgattacccaggtgaaggtcttccaggtgagacgggttcccccaggtaagaaggtcctccaggtgggagtccttcatgtggggaggtcctccaggtggggggggagggtcctctcggtggggggtcctccaggtaagaggatcctctaggtggggggggggggttccccaggtgaagggccctccaggtaagaggatcctctaggtggggggggggttccccaggtgaggggacctccaggtaagaggatcctctaggtgggggagtcccccaggtgaagggccctccaggtaagagggtcctccaggtgagagggtcctccagcggagggggtcccccaggtaagagggtcctccagttgggagtccttcaggtggggtggtcctccaggtgagagagtcttccaggtgagagggtcctccaggtgagaggtgaaggtgaaggtcctccaggtgagggtcaggtcacttggtccagggatgtggcttcagcaagcatttgggtgcctcctctgtgttcaggacatggggactccaggagactgaaggaagcaagtggcaatgtccatgctgtcaagttctgtcacagaaataagcaggagtgagtgaaagacaggagagaagctctgtgaggggtggcattcaagcttagcttctgggcaggaagaggcagctatgtcagcattccctaacaaggtttggcaaagtagatacctcccctcactcatggaagacctgacttcccaggctggtagaagcttctctcacaggcacctgcctctccaatctctttcacagcccagccctggaaggtggaaaaagaaaagttgacatggaatgtttaggaagcaccattggtccaggtccaggatcggggcagccagcatgtcctctaatctggcttcactgttgaaatccagtcgagcaagcagggcccaaaccactgcgagaccagctcggtcgggcccaaaccaccgcccactgcgagaccagctcggtcgggcccaaaccaccgcccactgcgggaccagctcggtcgggcccaaaccaccgcccactgcgggaccagctcggtcgggcccaaaccactgcccactgcgggaccagctcggtcgtggagaccctaacccagcggcgctagaggaattaaagaaacacacacagaaatatagggtgtggagtgggaaatcaggggtctcacagccttcgaagctgaaagcctcgaacagagatttacccacatatttattgacagcaagccagtgataagcattgtttctatagattatagattaaaagcacttcttacgggaaataaagggatgggtctggctagttatctgcagcaggagcacgtccttaaggcacagatcgctcatgctattgtttgtggttcaggaactcctttaagcggttttccgccctgggtgggccaggtgttccttgccctcattccagtgtgggagtcatggccatcatgagcatgtcacagtgcagcagagattttgtttatggccagttttgcggccagttgatggccagatttgggggcctcttcccaacagcccacagccagacctagactccattcagattggttttgatcagcatgtagaaaatgggggagttgagtgtggtatacaaaatgggggtgttggccaggcgtggtggctcatgcctgtaatcccagcactttgggagtctgaggcgggtcgatcacgaggtcaggagatagagaccatcctggctaacacagtgaaaccccatctccactaaaaaatacaaaaaattaggcaggcatggtgg

SEQ ID NO: 1242715 - DNA, 4001 bp, Homo sapiens
ctaggccatcaatccttacggggaaatctgaaaacaggtttgttaatatgtataataaatttgtctcttggacataaagaagatggtgccaaacactgcactgcaaccactaagtagcttggactctgtaagtgtaataaaggtgaattactttggttaaagtgattgcatgttaatttaagaaattatcttcctccaaaagaggtgctcattttattttccttttctgagttattcaggtctacattcttttcttctgccatgttcagtggttagcatgaacaagcaacatgatcatttaatattcaactaaatgagatgttaattttcattgcaagattagagctgagagcatttacacagaattgcagaaactgaagatgcctggaaaaattcctgaggattgttcagtactcagtatagcggttaagaacgtttgctctggagtcttaaggagaaccctagcactccccaacattactacctctattgtgttactgggagaattaaatgagcaactgtgttatgggcctatcagtgttaggcacataaaaagtgttccccaactgctagctcctgctattagtataagaaaaacaggggccccactggccccaaagagtgggctactctacgattgttctctggagacaccatcggcaggcctgtttctaagtgaaagctggcgtgcaaactgaagaaaagtggcagagatagatgcgctctttcttctgtcgtttcaattggcatctggtgaactatgcctaacagcttaacgcccaactgaaaaaaactgtaaactaggatggtaaggaagagatggggtttgagcagtgactacaactcttcttctgagtgtgtgggttcaaaaaacactccctcccacacttagctttaggcaagccactttaccgttttaatctccgctttcctcatatggaaaatgggataacaaaagtgtgtaattggattgtttgtacctcaatggataaatgctgggatggacgccccgttctccatcacgtgcttatttcacactgcgtgcctgtatccaaacatctcatgtaccccacaaatatatacacctaccatgtaccctcaaacattaatttttaaaaagttactgtctcctggagttacggtgcggagcgcacagctcccgctacgccgcaaaacaactaccacctgcagcagccggccctccacgctggccatgaaaggcgctgggctagacagcctgcgacggggcggcttctcgggctatgccacttactgcgggacacactggctcacccgggtctgcctcggaggaatgcagtgaggattaaactagctaatccacggaaagcgcttaaaacggtgcctggctcgtccctggcccccacgcgcctcggggctgatattcaactgcgcattagcaaggccgtgggccccgtgccgaggcttcctgcgggcgggatccgcgggcacggccggcccagccgccaggtgagcctgagcccttcccggcacctgcatcctccgccgccacaaaaagcaactttttaacagtttcgcagcgggggcctcccgggccaggccgccgcccgcccgcggggcgcccccgccctcaccttgctggaggtcctggtggtcgtaccacggctcgtcctccttcatctcaaactcctctaccaggttttccgccagcatctcggctgggtcttctaggggcagcggcccccgccgccgtcccgcctcagccgctgccccgggctcttccccggcccctccgccctcagccagagccgccctcgggcgggacgcgccgccgcccagactccgctgcgccgcctcagccccgttcccgccggcggccgccgaccggccggctgcctcgactcgcctcgcgcctaccgacggccccaacggccgggcattacggtgcgaacgcctggagccggagtctcacgcagccgccagtcttcacgccgccgccgggcccaacgtggcactttggcagaaccctccccggccggggatgcgattcaaacccccggcggcgcctcaaccaatcgcgagcgggctgctggccgagcggcagggacttcgtccaatcgcctctctccaaagaccggcggctcgcccggtatcgagggcaagcagccaatggtgggtccggaataaacaaagaaggcggggaaagagtgaaggggtgcggccgaaagcccgtcccctgatctgcgctgtgaggctcctaggagggcgttctgggtttcgggctggggagctggcagaggcgcgtcttacccctgtggtgggtgtcccgaggccggcgcgtctgtggacaggcaacgcaggccggagggcctaggactccggcctctgagaggcgggcggttgtccaggggagtccttcgtgccggcgggaagcgcaagggtgccggaagcctgaggtccgccgcccggccaccccttctcgcatcttgactctgagatttgctccgggtccggcggggagactcgaggtcgatcgggagtttgggttgagaaaacgcccactgagcggtagctcttgtctccttgacatctgagccctgggaattaaactcacgctacataaaacggtgggcaccagacccccttgagaatctggggcggtgagggatgcccgaagctgtccacttggagggcgaaaattgtaagcagtgttgcaacgatttttaaaaggtacccctagaccacaagttaagcatctggggacgtgacattgcacctggaggggacaggctgcagctccagcacttagtagccagcgaggcagagcacgctgtcctccaccgacataacccagcaaatactgctcctaggtaaagctttaagcaccatcttgcagacaaagcacggaaactcttaagcaggatgacagacctgaaggtcaatgttctcaaccttgacgtaaaggtaaaggtgcagctgatggaagacaacagggccaatatctaactaactttgagcaacgaaacaaaaaaaaatcgaggtttaagtatacaattgaaagattatctctagaacatgaggtaataaactgttagaaattcagagagagggaagaggtggagaggagtgttaaatcctgatctattttagaagtgagtcgacagataataccttacattgataatccaatgaatagtttccacaaatatggagagagctgccagaactaaaaatgggaagcaattaagagttttccgaggctggacacggtggctcacgcctgtaatcccagcattttgggaggccgaggcgggcggatcacctgaggtcgagagttcgaggccagcctgaccaacatggagaaaccccatctctactaaaaatacaaaattagctgggcgtggtggcgcatgcctgtaatcccaactacttggaaggctgaggcaggagaattgcttgaaacccgggaggtggaagttgcagtgagccgagattgcgccattgcactccagcctgggcaaaaactgcgtctcaaaaaccaaacaaaaaaaaaaagttttcctaagaggaggagtgatttgaggctggggactttggctttttgttataaacccttctgtgatcttgcttttttagttacttgcacattaaaaataagggaaattgtagggaaggaattatagactcaagctactttttttgtctttctgtataaaaaaagacttgggtaatttggaaggggggaaaaactcatcctgaataattcttgtgggtaataaaattcagggtgtctctctgcctcccatctttgctcaaaccagcataacctaacctcacgctgatgctgtatcaaacagcacttgactccagggttaccttacacataggctgtaggctactctggagaagtcttgccaaggacaagacctcccactgtggagttgttacctgaagttttacccttcagtccttaaaggagactgctgaatagagtggaaagcacaagggacctagagtgagaa

SEQ ID NO: 1242716 - DNA, 4001 bp, Homo sapiens
gtaggaggccgggtacacggttttgatctggccaacattgcactcctcaaaacgcctatgggaggatgggggcggctcaggaggcaggcccgggcccacccccaactccaggacagccacagcccacccccggccactcacctacgcatcatgtcctggacgccccgctggaccttggcaaaggtgggcgtctcggagcggttgtggagcatgcccacgatggtgtccatgctgcggaacatctccgccagcacctggtacttgtagggcagcacgagtcccggcaggccgggctgggccagggcatggaagcgctggtaggcgggcgccttctcgccactgtcagggagggaggagcctcatgagaagcagtaggcccctacccctccaacgccacagcaggcccctcggccagggagaccctccgatggggcctgccatgccacacacgatggctttcgcggcccttgcacacccaccagcactggcaccgttaggggtagcagtggtgacgggaaagcccggctccacaccccagctctgctgtgtccacgcagctcccccagggaagctctgccctctccccagcgcagtttcgtcagctctcaggggcagaggcagacaacacaccaatgcatcaggagcatttgaaacctgccagagtccccgaggcaggagctgccccccgcaggagggactgagggcacagcgccagcagtgcccgggacctttttctcaggggtctgggtccgcgccctggtgacctcaccaccaccctccctggaaggagcagacctgggcctctgacaggctcgctgggccacgcctgccaccaacccggcctttgccggggcctcgtggccgcccacccagcactcaccatggctcctcagggcggccctcggcctctggggtgcaggactccccagcatcctgggcactggccttcagcgcccggactcttgcccccagctcccgggcccgttgcaggcatgacgcaagctcagagatggtgtccttcagggggatcaggggacacggtgccgtcaggcaggcaggcaggccggcaccactcagccctcccgcatctgccccaggccccgcccctcacctggtcctgcgcggatgtcaggtggggcggctgacctgctgccggggtggatttctttatcttctggcccggagaagggcaggctgggatgtctggggcctcgggggtactggggctggaaacctggtgggagggaccccaagggtgaactcatgacaagacctggtgctcctggctctgcagaggaccccgaaggatcagaagccgctctgagttaactgggacgggcatggctggggggcttaggacttcccgtagatggtggtctgtgctaaggccggggacacagccttgctctcgtcttccggggccgtttccaggtcggacccctgccctggcctcgcagagaagctggacttccagccccatcatcggatcccggtgcaagccccccagtgcctcctgctcatctcaggagccagccaagtccccagtggtggcagggcgcccccaggatcccccggcctgtcccagagttccctgcgccccgtcccccccgcctgtttccccgcccccgtccctccgcctcagtttccccgagccctgccccccgggcctcagtctccccgcccccaactccccggcctcagtctccccacgcccctcacctcgtccaccgacagccgcagtctcctgcgggccggtggcctggcctggtcgcgtccgggggcggcgggcgggcgggcgcgcttgcggctgccactggtagcggaggccggggcgcggagtgcgggcctggcggggctgggggtgcggcaggccagcttgggcggcgcgatgcgggggggcccggggcggcggcgcgcgaagaagtcggtgacgcggcgctgctccatggcggcggagtgcgcggcgaaagcaaggaaagaaggaagggaggaagaggcgggcgcggttcccgccaaatttcccgcgggcgccctggccccgcccccggcgcggaccgaaccatcggggcagagcacggggggagggaagggacggggcgcgcatgcgcgctggtgggcgcgggcaccggcttggccgcgcgcatgcgccgacgtgcgggcgtggactcgccggcgggcgccgtcgtgcgtgggactttagcgcggtctccggatcccgcgtgtggctcccacttttcagggcgtgtcagtggggccgctggcttcagggtcagaatgagcgcaatccaggcaaacagcagcgcgcgcctgacaaaaccccggcgctgcccgggggagccgaggacggcgcggcctggggggctgcaggctcgagctggtaaaggcgcttcccccgcgggccgcacgctccttatttctttttttaaaactatttctggctgggcgcggtggctcacgcctgtaatcccagtactttgggaggccgaggcgggcggatcatgaggtcaggagatcgagaccatcctggctaacacggtgaaaccccgtctctactaaaaatacaaaaaattagccgggcgtggtggtgggcacctgtggtcccagctactcaaaaggctgaggcctgagaatggcgtgaaccccgtggggcggagcctgcagtgagccgagatcgcgccactgcactccagcctgggcgacagcgagactccgtctcaaaaaaaaaaaaaaaactatttctatcgaggcggagattacgttgccgggtggtctcgaactccccggttcagtgatccgctctcttggaactgccccctcccaaagcgctgcgatcacaggcgtggcctccgcgatccgcgttgctcgctttttaaaagggtggatttgatatgtgaattatttctcaatcaagctattacatggaaacgaagaaaaggggccgggcgcgatggttcacgcctgtaatcccagcactttgaaaggccgaggcgggcggatcacctgaggtcaggagttcgagaccagcctgaccaacatggtaaaaccccctctctactaaaaatacaaaaattagccaggcgtggtggcgggcgcctgtaattccaactgcttggggggctgaggcagcagaatcgcttgaacccgggaggcgaaatggcgccactgcacttcagcctgagcgaaagagcgagaaactccgtctcaaaaaaaaaaaaaaaaaaaaaaaaggaaagaaaagaaactgcctttagcatggctgagggctgagattttaaagttttagttcttaaaacctatagcgctcctatctgggaaacggcctagagcgcggtttatctggagagcccgagccacagccactccttccagagacgccaataagcagggccaggcgcagcgctgcggaagtcccccgcaaagcaatgcgggccgccggggcctggaggcctgcgagggaaggggacgcgggtggaggcggccagggctcagaggagggcttctgttttcccattttccaagttttctgtaaaaagcgtgaattgtgcctatttttttttaagttaaaggaatagaaaccggtttgatgatgcaactggtgcttgcaaaatacctcaaaggtggcctgcacggtggctcacgcctgtaatcccagcactttgggaagtcgaggcgggcggatcacttgaggtcaggagttcaagaccagcctggccaacatggcaaaaccccgtctctacaataaatacaaaaattagccggacgtgatggcaggcacctgtaatctctgctactcaggatcccgccactacactccagcagcctgggcaacagagcgagactccatctccaaaacaaaacacctcaaaagtgaggacgttcataagtggggggatggggagggcgtggtgaggcatttgttttccatctgtatataagggatcagcacctagacctgtgttttgcaagcagctggtagcaaatttttagtgggtcaagaaata

SEQ ID NO: 1242717 - DNA, 4001 bp, Homo sapiens
tcaggcaaggtcaacagctctaagctgactcaacctcaattcgtagaaaaccatgattccaaccagatcactttcacccctaaacaatatctacttttagccaatgtccccacagtactggttacacataaggaaactcaatcaaaccttctattttactgtgcttcaattttcaatttcagaaattgttccaccatcttgaaacagaccaaggcgcttgggtgatccattggccacatttgccgaagttcttcacaagatctctatccaacttcaccttgtctcttagcatagagatgaggacggccacagggtagtgaagagggcaacatacaccattctttcaaggagctctaaggtctcccacccaccccacctgaacctgctggccggcagtccaggcctgggcctcaccaactccagaatcattcacaagaacatggtcacacaggagacctgtgctcctttctccattcttcttctctaacgccagtcagcaaacccaccacctgaaaaagcttcaactgcccacgagggcctagaggaaagagcttcttaggaatcaccccctgcagtctgtcgtgggtggatcaccctacaatgtcttatgcaaaaggctaattctaccccttctgggtgcttatctcaatggagccccaaagccttaagaaccagatggcgttaaccaatttatgttccgggaagtgcaggtccaggctaacccatgcggctggtttcacggaggcccagaaggccctctggttgaagatggctggtctcttaacttctttatcctgaacctggtcttggcggccaacacctctgaggccattccctctggggagtggtggctggctgttccttgtgttgtccacttgtggaaaacccaaagcagtaacagttgtgttcctaagcccttgctccccaaagaccatgggtgttcctccattgtttgaaagatgccagactaatgtcttccttcgccacttttgggaagacatgagagtatccaacgctggccactactcattaggacctggagccaggtatccactgagggtgacgagagtactgggcgctgggctggcatctgtgtcctatgtccccaacacctcagacttccacgttctcctcccacccagggccctccgcagcgccccctttcgcccccagggagcacgacacccgcaagggccacccccacgcccgagcccggagggcgtccgagctggtgcgggggcagcaggtggggggtgagggaggtggcccggggaccccggggagcggtttggcggttgtccccccgaacccccacccagcctcccccttcgcagccccccgggaccccgcctcgccccggccaggctccgctccgatcgcccgcccccctcctcccccgcgcccccggcccagccgggccgcgcaacccccgccccacacccccgccggccgcggcgcgcccccccgcattcccagcacgtccggcgccgacttttacctgtactttctgtactcgaggcggctcgtcgggcgagaaacacctccccgggaccgctacctcccccgccccggctccgcccggcttcctccttcccctccaaggccgcaaagtagatggagtaagagagtgtgtgtgcgagagaaagagaaagagggagcgggcgcgggcgccgcgggaggcggcgggcggcgggcggcgggcgggaggcgcgcccggcccccgccaccctccggccgccgccgccgccgccgcgggctcggcaactccggattgcgcccggccccggccccggcccggtccccgccgcccgccgccgccgcccgccgccgcccgctgactggggccggcccgcgcccccgcgtccccgtacctcgtaaaggtccccagaagccatgccaggctgcggaacttggctcgccggtgtgcgcgtctgctcgctcgcgccctccgtgcgtgtgcgcgcggggtccggtgtgcgcgtgtgtgtgcgcgcgtgtgtgtgcgagtgtgtgtggtgtgttgagtaaactgtgtttttgcagaatgacaggcttgggggctgcctatgcgcagaatcagagcgggcggcggcggggctggcgtaaccggcagcagcggcggcggcggcggcggcggcacgagcgcgggcagcagcgacggccgcgcagcgcgcccgggaggcacggacgcggcccgagcgccgcggcccccgcgacccggcgacccggcggcggtggctgcagccggcaacggctcgccccggcgccgcctgcaggaagccgcccggcgcccgccgccggcccggacgctgctgccactgggcgagtccccgccccccgggagcccggcccggcccccggggcggggaggcgggggctgctgcccggccgcgccccgggggaccggtcccagagtcgactagcgctcgggcccgccccgccaccccgggccggcttcgggagcagctggcggggcccccggggggcggcgggccaggtgcccgccgggtgcgcccgatctggggccgcgaaggggcggccggggagccaggtagagggctgcggctgcagacctcagggaaggggccccagccgagccccgccggcccggggtccccacctacctcctccaccctcgaggggagtggacgccgcctgggagacctggcccctcggggctgcgcggcccctccctccaggctgggttgtaagatgtggaggccacagggaggaaggatgaaatggcccatccagaggcaccatggggatccaggacaggcgtggccaccccataaaccctggaaagtctttagagccaggggtggccttccctcaacaacccctctccccgaatttattcactcatcccttactcaaacatttaccaaagtcaacccaagtgcacagtgtccctggacaggcaaaactgggaccctgcccagagacagtttgaatccgcaagtgaggagtgtaatggagcactcagttgttctaaaaggtcatcctgcgtgtgacaggctgcggagctggaggagctagagaagctctccaaaacccaaatccgttcctaagccatctctcatggataaatggtcacccctctgcttaaagggttctccttataaatatttatgtatatagttacttcagaacctgcaaggtcagacttctgaaattggagggaagatcttcatccccacccatgaaatgcctgcctggctccagatgtgatgtatcattaactcacatgctccctggatcattttctacttgggaggctgtgggcaggtcaccgaaccctgatgggagatggtgatagtcacctaagtgatttaaatagaattaaggagaggatctacgtatacatgaagtgacctgtccatcccagcagaactcaataaaggtgatttgtatctgagtctcaacctggactgccctcatggagagtgagatggcagaggggctcgataaattgtttaatcctgaggttgtcaaactttgaaaagtcaccaaattttttaatccaaaaaaaaaaaaaaaaaaaaaaaactccatggaacctgaagcatgtctggctcattccaggacacatggatttgcatttgctgttccccctgcctagaatgtccttccacattgaatccatctggaacattcttgttcttcgtataggggcttgtttatctttgtatcgcaagcatcttccactgttcctgagagagagtaggtacacagtgattgtttttcgaactatgccaatataacaaattttataccaatttctagttaaaatcccgcatgaagataaggaaaaaatggtgaggataaggaattaataaatcagaaagcatatttggcttagaaactgttgaaattgttatagaacttctctcttcatattgatattttcccggtggtcatggttttaaataataacagtaataataagcagttctctatctgtaggtagctaaacaaattttaatgagtcttaatttgta

SEQ ID NO: 1242718 - DNA, 4001 bp, Homo sapiens
gagcagctctggggtaggtgggcggccccactcctgccccctactcattgcccggctctgtcccagacttcgtggtgctcgacgactcccttcacgtccaggccacctacatctcgggtgagctggtgtggcaggcggacgcagctaggcagtgacaaggacctcggctgagaggacacctggccgcagcgggatgccatcagggccgggtggttggggagctggtctccagggagtgagtcgggagccctgctggattgatgcccagggcctgtgcggccgccctggaggcggtggctgggataaacgtgcacccagcaggactcgccttggctccgggttttgcttgtgctcacatgtggcaccatccttggttgccctcctggagaaggcattcacggcctggggtgggatggctgggctgtagtttagcctgggccttgggccccagtgggggacagggcctgtctgcatgaagtggaccggagacctgcagaccccaggaaagtgtcactatgggagggaggggcaggcagtcagtggctggtgccatggggtgaagccaccatgggctgggggtgaagagccggcaggaaggggaccagtcacagggagtgtggacagtcaggggtttgctttctgctcctgagttggggtgtgcagcgtggagcccacagcctggttctgggccagggcacagtgccaggggctccgctctgacctccaggagggagactgggcccgggacccctgttttctgctccctggactgcctagccctgagtgccacggatgaccagcgttctgttttctcttctcaataaccctatctcttcacacatccccaggcccagtgcttgccggctgtggtgaccctgcctggtgctggagggcagtatgggaggcaccagtgtgccctgctcaccccattagtgtcatcctgccatcttctgtgtccccttggccctggcacacacccatgtggcaaacacgggccgtgaggctccctgaacagcttcgaggcgggtgggcttctggagccctcttggctctgaggacagccacagtggggtcagacgtcagggattggtgcagccccacgtcaggggtgattgtcttgactttctctccatttgagttctggggtgggtggctcccttcccccttgcttacaggtgctgtcctgggcacaggaggtacgcgcctggctctgccactgttctcttccctctgctgcaaagcccagttaaggaaatgtctccaggtccaaagagataggatggtctgggccccacctgttggaagggaacagccagggaagaaccacctgcctgggcagggcctcgcctgagggagggcctggggcagggcacaaggggttgatctcagcccacaagccccaggggcagcccaggaaagcaggcgacggatgtggatcctgacctcctgagaggtgtgaggtgcagggatacccacctctgccttgacggccgcgcaccccttaggaagtggctgtccagcgcctgcctgtgctgggcctgggagaggagctgtcttgccagggctcccaggcagggagaggcaggtgaggttctcagccgatgtgttagaggttgagcatcgcctgtgcccagcttgctggctgtcagtgcttgatgtgcccatcctcagctaaaacccagagctggcatgttggtcatccccacctcagacgggacgcccagtccagagctggtgagccctgggccagcctttgggcctggcctgccccattcaccggccagcgccccacctccctggctggagggtcggggaggggctggcagagatggttggtccacagggctagccctgggtggtgggagaggggcccagggtcagggtgagagagagctgggccagggagctgctgcaggatgattttgaggtgtgggggaagcactcttggttggttttggtttgctttttaaaaattgtggtaaaatacataacaaaagtaactatcgtaacctgagcagttctgtgacatgaagtgaattcactgctttgtgtgaccttggccaccatcattccccaccactcactcccgctgggctcccagccctgccccaccattccgctccctctacagctatgggttttacaaagaaggatgcagggcgccctgactgcggggtgaggggcaggcctgcccgcggtgtgggcattcgctgaagggggacgcccaggtgtctgcctgagttacgggttggggggtcgggcatgtggggagggatggagttggaggtgcatgctctcagagctggtaggggtggcccgtttcgtcccgtgtgtgaactggagatgagacccggcgcctgcgatcccgcagaccgcgcccggccgggtgtcacttgtgggcgcacgctgccgggatgctgggccgagcccgcggtttaagacccagatctcagccaggtccctttcgccgtccgagcctctgcacctcgtgggctccgagcacatccaggccagagactgcgtttggggcgtgggcacgggagaccgtcatcagccaggacgctctcgaccgatccggccgcgccccgcccagcctcgtagcgcaggcgctgagtccaggctgacgcgcaactctgggagcgttgcggcacgcggggccttgcctactgtgggaggggcttctgggggcgggcttctgtcgggccaattaggatcgccgcagggaaggcacgcgccgcggctgagcaacaggggcgcgcgtcaccttctctagttaacccgcgcggccccgggcacagagcccgaggctgcgcggtccccggcgggcccgcggaccccccccatctctgcgccccccacatctctgcggaccccgcctcgccccagccctcccatccacaaccctcacaaccttgcataccccgctacgctccccaccgcgccctcacattcctgcagaccccgtctccccacaacgctccccgccaacgctgcggagctccgcgtcgccccagcgctccctgccaagccccccacacccctgtagaccccgcctcgccccaaccctccgagctgctccccttatacccttgcggacctagtttgtttcgtcccagtcctccccgtcgcgtctcccacatccctgcggacctccccgcgcctcgcctctcccttctgttacgtatcacgcacaggtggatcccactacgacccagcttggctcctgtcccgcacctccgcacctggcctctagccccgccctcactgtcttgggaaatgaagcggaggggtgggccggacactctagaagcaccctggctcggagcttccctagctcggagttggtttggagcccaggctagggacccagggtgggcgcagcaggggagattggcaccagaagcgtggaggaagggcacctcttcagcccggcttttccgcccctggagtctgggacagctccggagcgtccgggtactccctcccagactggccctgttccttttatcacatttatgtcacacacgttttttctaaatgggtttacacttttgctattactttgcagttcggtttgtgtgtgtgtgacggagcctggctgtgttgcgcaggctggagtgcagtggtgcgatctctgctcactgcagcttccgcctcccgggttcaagcgattctccgcctcagcccccttagtagctgggattacaggcgcacgccaccacacctgactaatttttttgtatttttggtagagacagggtttcactatgttggccaggctggtcttgaattcctgacctcaattgattcgcccgcctaggcctctgaaagtgctgggattacaggcgtgagccactgtgcccagcctttttttttttttttttttaacacggagtctcattctgttgcccagcccggcgcgatcctggctcactgcaacctcagcctcctgggttcaagtgattctcctgcctcagccttcccagtagctgggattacag

SEQ ID NO: 1242719 - DNA, 4001 bp, Homo sapiens
ttttaatagagacggggtttctccatgttgaggctggtctcgaactcctgacctcaggtgatccgcccgtctcggcctcccaaagtgctgggattacaggcgtgagccaccgcgcctggcctgaaggtattctactcttagttatcagaaaggtcgctcaaatttacagagtggcatgacgcactgtctagtatgagcagtgctttgttggtgagattattttgggcactgtatttttcaacggcaaaaaaagtaagtgaaccattcatgaaagatgctcctggtcacccaagcctttctgttggagcgccaaatcacgggcaaactgggcttcaagaacccttcagagccttgcgggtttctgagcggtacaccagtaagggcttcaacttaaagtccccagctgcactgccaccaagcagcagcatcaagcgatctttggatgacttaaaccctggctcagcattctcttcctcggaaataaacgttcctttgggcattctcttccaatcaagtctcgtctcatctacgttaaagacacctggggggtgtactcaccttcttcgatgatgcttttcagcatttctgtgtacatgtccttgttgctgggagctgcgctgttcatcttgaagtggggcaaacagtggcactccttgaatctcacaagccacccttgacttgcatgaaacctctccgtttgagaaccttcgccatgttcacgctgtaagtcatcaaactcagccttctcctgaacgatggcggcgctcaaggtcgcatttggctggctctggtcttccagccacaagctcagcagctgctccatgctctccatcactgcacttcgatggcgagtcaaccgagaggctctcagaggagtagctatttgtgaactcgctttgattttttctttactatctcgaatggtcgccactgtagagatagcaagatctaaggcctttgcgatctgactgagcttctcacccgcttcaaatcgtcgtaacacttccaatttgaggtcaagggtaatcgctttccgttcccttttggcactagggatgacagttgcatctgtgggcctttccccaggcatttctgcctccaaaatgtcagaaaatcacagcggtctcaagcgcaagaacgctgtggttcctctacgtccccttgcagaactcggtcaacagaaaacgaggctgcgaagaggctcaggctgatgtcctggagacgtggacgggtccccatgggcaggcccagccccactgcctagcccagctgctgcttcactgtccactccgaggaggccgcgcgggtctcccggtaccgctcgaagtccgcgtgttggggccgtgcggccgcaggcacatacaagcggcctgggtcctggggctccagagaacaaccgaccaagcagacaaacggaactccgtgagggggacactgcggcagaaacgtccaggggcggttttccagtgcagcggagggcggaccgggcgggtgttgtttcgggagctgctttccatggaggaccccagaaataagtgttgatgccgatgcccgatttaagataagtctaaaggcgctggctatccccttagggcccagctgtctgggcagggcgaggctgcgctggcgatcaaaccctcgaacggtcaggcgacggcgtggacacccaagacggggccccagccggcgccgcgcccctgccgcgcctgcgcgagtcctccctgcgctcgcggggccctaggaccgctctcccattgcgcatgcgcgcgcccgggcggcgcgggatctgggtctggggatgtggtaccggctgctggcggcggccggcagtagagcggtggccaggccgctggccttgctgtggcgatgtggtggcccaggaggcggcaggacggccaagaccagcgcgagggccctgggcaaggcccgacaggtgagcggggaggcgctctccgccggtgccgggcggctggtctgctctggacgccgcgtgacgccattcgcctgcgccggccgcgggggagcgcgggagggcggcggccctgacctggtccgcgcagtgaggccgacagcacctggccagagcttcccgcccccccgcctcctccgtctccaaactcctgctcttctcctcgctacctcttccacccacttcttgcggaattcccgctgtttactggatgcccggtcccctcggacatcggaaccgggacctccagcctccttgctcggctttgtaaagcgccgggcgttgagcgatttgcgcttgagtcccacctcctcgcgaaccagctttgtggccccgcgtgccagcccgtgtcctcctgggctcggcggcgttcggctttatccacctcgcagttactcagtgaaccagacacgataagaggcgtgaaagggttttgcaaactgttctttatacagcgaccagtcactgtcgttaacagctaatgctgagagctaagggctttacgcggattatctaagtcttatacccgccctataggtagatatcgctataaccctattgttatttattatattatttttaaaaatttgggagcggggccggagtctcgctgtgttgtctaggctgatctcgaactcatgggcacaagcgattctcctttctcaacctctggagtagctgggactacaggcttgagccaccgtgccctgctcataaccctgttttatagggttagggtctaagaccggaatattctgcattttaagattgctttatttttgtattgatacatcccagtgagcagcagtaacgttgaattgtttttctaatgcagagtttttgaattttgatcccagaaagctgtcatggttttcagacagcagtaaaataagaagaaggatcccatgagtatttctgtcctgtcttcaggaatgaactcccccccccccccgccatctccattcatttgggaaagtgtatgatggtttagttgctagcaatatgagtgaaagcagtctttcagctttggccatgtggcatcagcattgcagaggtcctcctggttgctaacacatattgaaagtcagcgatatgcaatatcggtgtgtacagcctaatatagcccaggagagttttgaatcattgaactgctatagacccctttatgaagggaggacggacgttgaatgatctttgagttccttcccggactggatcattcatctgcttctcatttattagagatagatctgttaatcatttaccagggaatatcttggtgaacacgacaggcaagggctctgccccactggcttgctctcttttgagagctttatgacttgtggactgagggtgacatgcagaggttggagaggtggcagcaatttgcattttttttttttttttgagacggagtttccctcttgcccatgctggagtgcaatggcgcaatcttggctcactgcaacctccggctcccaggttcaaagcgattctcctgcctcagcctcccgagaagctgggattacaggcgcataccaccattcccggctaattttgtatttttagtagagacggctgggcacgatggctcacgcctgtaatcccagcactttgggaggctgaggcgggcagatcacctaaggtggggagttcgagaccagcctgactgatgtggagaaaccccgtctctactaaaatacaaaattagcccggtgtggtggcacgcacctgtaatcccagctacttgggaggctgaggcaggagaatcgcttagaacctgggaggcggaggtggcagtgagccaaggtcgcaccattgcactccagcctgggagtgagactctgtctcaaaaaaaaaaaaaaagaaacaaaacaaaaaacaccctaacagctctcctcatggaagcttatgctgtggaggcttccatgcagtcatctttcattcattgagctacctactctgtccttgttctcgtagagtttacgtgctgtgcaaggaggaaccagacaatggataagcaagtattagg

SEQ ID NO: 1242720 - DNA, 4001 bp, Homo sapiens
tcgggaggctgaggcaagagaacagcctgaatccgggaggaggaggttgcagtgagccgagaacgtgccactgccctccaacatgggcgacaaagcaagactccgtctcaaaaaaacaaaaaacaaacaaaaaaacccacagacgaggctacccgttaaaatgaagattcctgggccctatcaaattaaactgtgaggagggcgcacggagggcttgagatttagcatcttttaaaaagtacgtcagatgatttattccgggtaaagtttgcagaacgccagtctaaagaaatttggtagagcgccctcagtctcaccaattaagacggaaatccctttagtaaacgtttaccccgtgaccatttttaaactttcctttttttgttgtttcggagacacagtctcgctttgtcgcccagggtgcagtgcagtggcgcgatctcgggtcactgcaacctccgcctcccgggttcatgcgcttctcctgcctcagcctcccaaatagctgggattacaggcacccgataccacgtccggttaatttttgtatttttagtagagacggggtttcaccatgttggccaggctggtctcgaactcctgacctaaggtgatccgcccacgtcggtctcccaaagtgttgggattacaggcgtaaactaccgcgcctggccccattttaaaactttctttatacttcctagcgttttagtgtctgacatacagtagatgctcaagatctgtggaacgcatgatcaaaaagatccattttaagtaacgttcccgtagccacacacctctgctgcgctccaacaggcaatgcgaggagcaacgcaagagggtacagggacaaaaaacgacggaagccgaggtgacagaaaagcaaaaccccaactctgggaaaggaagcaaccccaggatcgtagagcggagcccctggtcacatgaccacacggccctcccctgacgcagtcgcgagcctacgaaaggctccacccgccccaccgcgggcgaggtgacgtcacagccggcacagcgccaccgccccctcacctcggcccgaaccgtagttcctcgccccgagcccgagacccagcgccaatcctgcgcctcacaacgtgcgacaattgcgaaaaagccacccccgaggcctgggatctggcttcctcaaggccccacaccctccggggcccgatccagtgccgcccggggctctcttaccggcccacatctcctgcagtctcactcctcaagagctgttcccgctcgccgcgccttcaaagccaccaattgcagttcccgccgcctccaagctccgcccaccggagcacaagcatcaggctgtgtcttgggcacaggggactgcacgggggagcgactgaagcgaaggtcgccgagccccccacgccgctcttcttagaagtgtgcaaccttgcaccagtagtggacttacacataggctccgttaggacctggcttatgtgctcggcttgtggcttagacgctgccgtgccccagtggactcactgtgcctccccccacgacggacggaaatgggcccctccaggacaggcggcgcatgcgccttggggcccgcgggcggcgggggcgaggagccgggagcacggtggagcggtggagggcgtcactgggtttcggcgtctggcaagcggttcagctgtctgctccctagcagccggccttcgggtcgggcgtctccgccggctactgccgcttcagttctcccggtgtggccacgagtcgggtgagtctcgggagtccaggccgttccgaacgcgttccgttgttcctcctcaggtccctgatggcgcgtcccgccgagccccttcctgccgcccgtcggccccaggaggtggggaccaggaagacccggctgccgcaggcccacagccgggctgctgcgctggggaggctgcgagcgaggtggctgggcgctcgctggaacacgctggtggccgagacaggccgtgggcgtcgctcggggttgggatccgcccgccactcactcaactggctggtgaccttgggcgcgctcctcccctcccggagccggggcttcctcgccggtaaaatggaccttgaggaatggagccctcaacacagggtttgacacgatgagcgcccaataaagtgttgttattgttgtttatctagcaattgagaatttgcgggtagaaaacgggggccgttcaagcaagtctcagctgcagtgccctgtgatgtgagaacccaccaagagccccatcagtacactttactcttttttctcctttaatgctttttttttccaggaaagtaatacattcatcttgcttttcttgcgtttaaagatcaggcgttttacgtagagtcttaagtaaatcagttttggaagtcttcatttaaaacctcaaaggcatggaagttttcgatggcaaaggaattatgttgtgatgccattcgtatctcctctcctttatatgtatggcttttgcacttgtttagttgatttaaaatgagtttctttttcatccttttcctactgcgttgaggcctgaactagttgtcagtttctgacattccgcgaacatcgattgggcatttaccatgtgcattggcaagaatgctccctcacgagcctgtgcgttccttgagatgtgtgaacgagtattttcctctgaaattcacatgattctggcagagtgctaggcaccttgtaagtcctggtaatgtttattcagggaaagctgcgagggcgcattctctgagaaactcttcggtggaagtcagagtagttaagcccttctccctaggcagcacccccgggtccctcccagaagcagcctggcatggggtctacagtgccagcgccagtcgctttcttagtggtatcggtttagaactggtcctgtgataagtggaagtgggcaggggaggccgtccccgaccgtgtctgcgacctctgctgcagtatggctcatagcttgaaaagttgaaaaataattctttaataccagggccgaaatgtaggccttaaaaatgttttatgttatttatttatatatatatatatttaaattttattttgagacggcgtcttgttttgtcgcccaggctggagtgcagtggcgcgatctcggctcactgcaacctccacctcccgagttctagtgattctcgtgcctcaacctcctgagtagctagggttacaggccacgcctggctaatttttgtatttttagtagagacggggattcaccatgttggccaggcttgtcctgacctcaagtgatctgcctgcctcggcctcccgaagtggtgggattacaggcgtgagccaccgcgcctagcctaaaaagatatattttagaaagcggagtgtttacagtttttttttctggagaacagtttcttcagactctgcacaacagacttttctggccttgttttttgcttattttgcagtagcattagaaattacaactgtagtgtaaatttcctgtgcagccgcacaataggaaaatctttctaaagaaaagccaactggcattaaaatacagggttcttccttgtgattatagatttgctgaagtgagttattagaatgcttacccgttttctttatactagagttaatacagcgctggctcttggtttattttctaaaattgtgccacctggtggttgaaatctgtcttagactactcttgaggaaaattgtacctcagagtcagtagacaaagattgaaggagtgagtaaaagaaagctataatttttatatcttcactaagagtaccctaccgcttctaccctcccagcttactccccaggaaaagttaaaattgcccttatgggccccttagctagctatcaaaacacatttgacagctgaaaattttaaggaatttcagtggactgttttggtatcattgtgtgcatacacagtggatggggctggattgaggagggaggtggtggaatcgtgacaagtttacctttt

SEQ ID NO: 1242721 - DNA, 4001 bp, Homo sapiens
gggttagatctggctggtaatcaggtggtggaagcactgcagtgccctttgttgctcctattgggccagtctcacatcttcccggtcggagcaaggccttttccaggatccagccatgctcttcagtgtatccttgagctcctatttattgaagggacttctgctgtttctgcattggctcccttgaggctctcagcagtactccctggaccctccctggtgtctggaggttatgggcagtgttttggcttcttagggagaagaagacagttcacagagcaagggagatcccagatgcagatgtataagcggggcaatgcagagttctcactagctgagtaataagcatctagtcaggcaaagtgtagtgttgacagacctgagatttaaaaaacagaagtgtggtccggtcttaccagccatctcttggaggggtagcctgtgggtgggggaaggtgcaaaactcttgtggaagaacaggagtactgagagacctccggccaggaaggaaggctaggagttgcctggagaggccttgtagccatttcccttacctgtggtaccccaagttggctgcagatctctttgccaagcacaggtctgacctagagactggccttaccacaaatgtttgtgttaccaagaaaacaaatgggcgttgaaaggaaagggcaatgggtaggaagagaactatttacaatctggtcacttaaatcacagcgaaattttgggtaagtcagtcatttctctttcctcattaataaaaatgaaacacttagctgctctatctgctgcaaaaaaaccttacagaatgttttggggggacccctgactgtagaagtttgagggtaacctctccaaccaagccccacctgagggacatttgagtctccggcccaagaatagcctagcctgctcgaaaccagctttgggcccgactcgccgaggtgcaggcgcacgaatgttgggattgcaggagctgtgcgttccgcccgggctggttaaggccacacagctcggaagagtaacagcggcagccatagccccaaggggagggggtttcgtgagcggaaacggcccaggggcccagggaggggcagctgggccagcttggggccgggctgggctcccacggaggcggggccaacccccaccccagtgcacagactgggcggggccgagccagctgagaccaggagacaactgagccctgaccctagcctggcgccaacctctagtgttccagaggcttccgctagaccacaattctcaggggcttgccccggcagcctccctccctggcttagcctcacctcccgcgctgcgggccgtgtctgggcctccgcgcatagcacgccgggaattgtagttttctctcggcgcgctcatgccggaaagggggggcggtgggactgcgtctcccagagtgcagcggggcgggcgaaggaaggcaggggggaagggacagtcggccgcagaccgcgctgggttgccgctgccgctgccgccatcgtgccagcccctcgggtgagtgtcggggccagcacgccggggcgggggctgggccgcaggagccgctctctgggctgccgggaggctccgctgagagtccccgggcggcccctcccctcccccccccccggcggcccgaagccgcgcggggcccgggccatgtgtcgcgcgcggctccgcctcccgccggtcctgtgaggcggcggccgggggtaacgcacagagagccagccgggcgcctatctgggccgtaccgtgctggtggctggtgcaccggcctgcgccatggccaggcctttttctctagtcaggaccgtccggatggggccttagggccccgccccgtctagcctggcccggcctgcgcgagccccgcaagctctgcaggctggctagcgggcagaccccagccccacgtcctgctacccacctacgaaggatccggggatgggcagcgccacccggcccgctccagagtcagcatgggtaagggcgcccgcctgccgcagccggggcttgggcccctcaccctgttcccgaccatagcccggccggggtgtaggtgaacgccccctccttgtctgcccctcggaagtgtacgtttcttaccgcgccctttgtggagcccggactggagttctcgcagggagggcagggtcagggaatatgaggcgggaggggattccacgggagactttatccctgtcttgtcttagaggatctgggcctgatggggtgaggcggctcctgccgggtaggcccagcccacgcccttctctatcagtgaccaggccccagcagcaacacagaattgccccgcaggacaggatgacttcataagaatgggatgttaaggtgggacttaatgcacgggaagtagaattcaggcctgaggttcttgagcctagtgctaaaccagaacctgggctggaaggggctttggggggtggggcacgtagatttcagactttgtggggccctcccgaagcctgggtggcagaactagggctggaagctccagaaagtctggcttcccctcacttgcttgctcacttcccaacaactggagctgcctgtaaacaggcaggaacctggttgctttatgaaattgcccttactgatgccatcagagaccctactgagttctgggggaagagttatctttgaccaaaaaatactatcctgatatcctttgtaaaggcgcttctgattgagagatggtaaattaaggaaccagtccagagaagaccttgggactaggggagagatggcatgtaaagcgttgatttctctgagccgcagtctttccagagactaaagaagtagctcaggcctggcgcggtggctcacgcctgcaatcccagcactttgggaggccaaggccagcggatcacctgaggtccggggttccagactagcatggccaacatggcaaaagcgcatctctactaaaaatacaaaaattagctgaacgtggaggtgcacttctgtaatcctagctactcaggagactgaggcaggagaattgcttgaacccgggaggtggaggtcgcagtgaactgagatcatgccactgtactccagcctgggtgacagggcaagactctgtctccaaaataaaaaaagctgggtgtggtggcgtgcacctgtaatcccagctacttgggaggctgaggcaggagaatcgcttgaatccgggaggcagaggttgcagtgggcagagatcatgccactgcactccagcctgggcgacagagcaagactctgtctcaaaaaaaaagaaaaagaaaaaaaaaaaaagcagcagcagctcaatctctgcagctctggcctcaggagcaagcagaatatcaggtctcttagaagggctgattgagacccaaggtgaagaaagccactgaccctgcatatttttttcttcctccttgaatattttcccaggtaatgtttttctgttcatttctggtcacttcttccaagtactcttgacctagaagttttcttgcatatgaattgctctgcctagttattctccctggtcaggaagaataggcaagaatgctgctcagattttaccaagccctgccttctctctggatgtaactttcctagtccatatcctggcccatgaggacatggaaatcaggttcatccaagaggctcaggagaggccaactttgccagtggagctgggcaataaggagggactacccacaggacaatgaggtgaaatctagaactagaagcagttatttcaagaccctgtagattgtctgcgtgggtactttctaggacacagatttcaggtgagctggcttacggctatggcgtagtttgcgtatttcatggccctgggtgacttgaccaggagagtttttgtttttctctcgagacggagtctctctctgtcacccaggctggagtgctgtggtgcgatgtcggctcactgcaacctccgcctcctgggttcaaacgattctcctgcctca

SEQ ID NO: 1242722 - DNA, 4001 bp, Homo sapiens
acaaaggtcaaacacagggaccactacggccaagaccaaagatccatcagaataggggagagagaacgttcccatgtctttgaagcccagggagcaagagggcgaggaaccagctaagagtgctgaggacttcagggaggtggaggagagtcaagtcagagaagaaaccactgggctggtcatgctcagctcagggattcccttcaacaggatgaggtggatggcagccagattgccaagggtgaaaaagtgggtgaatggggggaggcagaaacaagtgtgagaacaagaccagttgctgctgatgttatatgaagcacgaacatggtgggcacctactatgtgccaggcatgcattccagttttttaaattaatcttcaaataagccttgctgggtaggcatcaacatgcccattttacagaggaggaaactgaggaagtggaggcagcctgtatggtcttcctaaggaaggaaatggatggcattgccaggagtaaccagaggtaaaggaacattcagttccaaataggcttcctctcttctctgcccttccccacagttccagagctctcgcagtgtcaggctgccagaaggaagacaggatgcagacggggctgggctgtcaggattcaggacccagagacagacctaggcgtgattttcgggttgaccctgggcaagtacatttccctgtgtgagtctcagtttctctgtctataaaatggcatgggggtatttcgaggcccctcgctgcacccctctatgtaccatgtgttttgctttctgtattctgatgctctggcatctgaggccttgttgaccttggagaaactccctcccagggtccagccaccccagagcccacaccccaactgcctctttgatcgggttgccatgccctggccactacccacctgccctaatcatgccagggctaggtacaaaacaattaggaacagcccctgtgccccagagcccctgaagtatcccaacttgccagtcctcagcctgcctgccctgcctttcctcttctatccttggaagccacagtaaaagccccttggcctcagatccgccctgtcccctccccaggctctgctgcttccccttgtgccccgcgcactggtgtccccctcctgttgagaacatgagtaagaaactgtctttttaatggcaagaggtcctgatatagtggcctgaccacagctcaaattttctattcatacactacgtttttaaacagcgcctttatttatccatccctttttcgtgctttctacataccaggcgctgccaagagtgctttagaaacagccacccatttcctcctcaccaaagcccagtgaggtaggcagcactgccacctctgtttcagagagggggtaacccaagcacggaatagcgcagtcccttgcctaaggacacacagcgaggaagcgcccagcggggactcgaacccacgcactctggctccagagtcgatgctcttaatattatgttgagccgctctccgtgatccagccgtaaggggactaattaagggacagcaaactgagctgcctaaatttctcgtgtgtgcggcctgaggtgggccggctgtcggcctgcatttgggcgagcagtacagggcgatctcaggatgttcaccctccctgcgtctccgcgcgggccaggctggccgggctcagctgctccaagtccaagtcctaatatggaagtcgtgccccgccgcagagccggacctgttgtgtctttgcctttctacgcatctgcgcccacctcggcccagaacaaggatttcaaaaagtgccccgcattttgatttcagaaggactcaccccaagccgcggaagcagagagagtggccaggataaaggcacggagccacatcgtggaagggcgacagttctcggggcctgcgaggtctctgtgcagttcagagggactgtgctgtccagccctggagcccagccccgcccagagttaccgccctgcgctgccaattgcctaatcctctaattgggagagatcagaaaagccctccctttcctcagatctccctgggcttctagtggggcctcaggccacgcccacccacagtttaccctctttcatcaaaccagtctggactctactgtcagattacagagagctgtaaacttgcccaactacttgttacataagggttcacccttgcaggactctaacctcagtgcactgtgacggcccccaagggcccacaccagcaggcagatgcttttaggcaaagggaagctttgatctgaggtcctcagaaacaactggaaaatgttagagccactcacacctcacagctcagctgggtaagttaggacatatctcagctcccagggcttgtgttttcatagctttccaggctctcaagcttggaagcgatcttaaatttcatcgagtcccctttctgaggcctgaattagcttcacaatatcctgccaactggtccagcctcctgtcacacaccatcggtgtcagagaactcactactttccaaagcagggatttttggacagaatgtaaaaatgaactccgtccccccatagtccctggctgttatcatccatccatccaagtacccatccattttgtgaacatttaccaaaatgcttggcacctggccatgtataatggatacaaagaccaattcaagacatggttcagcttctcaaggggctcaccattgtagacaagacagatggggtggaggagcagtaggggtgatgtcaaggcaatgtgaaatcaccaaattaaggggatacagagtgctctgggcacacctggaaaactgtcatttacaagctgctggggacacaaggaagtcactcaaagcctctttcatgggattattaaatgtccaacaatagggaattcactaaacacactgtggtaccgctggctaaggaaatacgatgtattcactcaaaatagtgatgtgcacagctatttattaacaatgaagacaggatgcgttgtgaaaggagaaaataataggttataaactgttgtgcggtgtaggcagttcctcaaaaagttcaacacagagtttccatatgacccagcaattcccctcctaggtgtctaccgaagagaactgaaagcatgtccacacaaaagcttgtacacaaagagcagtgtcattcatcctagtcaaaaagtgggcacaacccgcatgtccatgacctgatgaatgtgtaaatgaagtgtggtgtatgcgtgcagaggcatatcatccagccataagaagaacatgctacaacgtggatgaagctggaaaacatcatggtaaaggaaagaagccagccacaaaaggccacatgtcgtatgatgctttttatatgtaatttccaaaatagtcaaatccatggagacagaaagtgtttgacagggtctggggaaggggaaagagacggggatgaggagtgactgctaatgggcatgagttttatcttgggggtggtaaaaatgtcctgggattaaatagtgatgatgttagtgcaactttgggaatatactaaacaccactagattgtacactttaaaaaggtaaactttatgacatgtgacttatatttcaataaaataatgaaatatttttgaaaatctagataggtataatatggtcccgttttggtagtaacatatgtctttatttgcataggaaaatactggaagtctatatatctaattagaattacaacagccatttcctggctgtaatcttgtcagtgtttcacttatttgcattttccacttttattccttcatacattcattgacaaatatttactgagagcttactgtgtggcaaacactatgccgagagttttgtatgcaggatctcagttctcaaaataaccccgtgagattaatgctgtctcacgatcttaaattgatttctgttgtttaagccacccagtctgtgatattttcttctggcagcctaagtagactaatacataggct

SEQ ID NO: 1242723 - DNA, 4001 bp, Homo sapiens
aaagtgatctcccacctcagcctcccaagtagctgggactacaggtcacagaccaccacagcccactaatttctttcaattttttgtacactccgagtctcactatgttgtccaggctggcctccaactcctgggcacaagcgatactctcccttggccttctaaagtggtgggattaaaggagtgagccaatcgcacccagccactgtggcctcttagatctgctttaggatttggcgcctgggggcttctgttccccaaggaccactatccttgtctgaggcccctttggagggctcagggcatcccccctggccaaggacgccacacactgagagccagatgctgccagaagctattactgttattaccggccggcagcacccgctacagccacaatcataagagggaaatggactgaatccccacaccccaatccctcacccactccgaccccaggctgcctacccggcctggcatgtcccggcgctcctggggcccctgtactccgctggttccttgccgtggtgtcccccagcccgaccctttctgtgcttctaggagcccaccttgggcggcggggaggcgttgcgtggggctcacgagttccacgctgtcatctccaccagctcctacctcccaggcgcctgccctcccgcactgtcaggttctgcctccgcagcatttggcagatctgagcccggtccctgtcgcccctccgagggagcctcaccctggccccggacaagaagcagcagaagcccacaggccaccgcgctcagccgcgcacgaagtctgtgcagccgcatggtcggctcgctggtctcggttcgctgccggcggacacgctgctgttcacccagaggctgccccgggtctgtccagcagtggatcagtgccttgcccagccttggagtttggactgggcagggagtcagcggggtgcgctggcttgggccgggaaaggtgggtgtggtaggagagcgggactgagcagtcataggtgggtggggatctagtggtaggcaggcccgggcacggccactttcctttgcccgggctcctttggcatcctcggaaggggctgtgccattcctgcagcccttccgcgatccagggaatcctctcttcaaacctgtccttgtccacaggcccgatgagcgcgctgggggatcgataggagggggcaataaactagaattggagaccccaggagggcttctctgaggatgtgcacgttcaggatcccccagatggagaaatgggaaggaacttgatcggggtgaaggaaccgcttgagcaaaggcaggaaggagtgtcggcgcccttcattctggaagttcctccttgctttcaggactcagtttcctgggttccccttcacggcccctcatctccttacagtccagggtctgagggtctccgcggtcccctccctactcagtcacgccattcttttgaaacgtacacgtgaccgcggcacttcttaaggagcgccccccttttcctcggtggctttcagtttcctcacctcccgcggagaccacggccatggtcatttatccacttgacaaacatttcacgagcccctgccggtccaagctgtggggacgccgtactcccgggcctatggtgcagcaggggaggcaggcgcgtcaccgggaggtcccgagacactaggatccctgccaggccagaggcgaccaaccgtcctggatacgggagctcccggccagcctgacttccaggaggaagcggtgtggggattacctccgaccgcctttagtgccccctgagacctggttctggcctctacgtttcagcccgctactggctcgcacgacccagcgccgccgtggtcccttctcagcgccttctgctccagcgaccatcatgttcccgggtccgagcagccagggccgcggtcaccgcttctctcgcacctcaggccgagaacccacaacgcggcgtgtccctcgcgcgactccgtcgccacgccacgcccccttcccgttctccggaagtgcgcgggttggagcggaagcgcacgcctgctaggatcagcggtggtggttccgcgatggtaggcggcggcggggtcggcggcggcctcctggagaatgccaaccccctcatctaccagcgctctggggagcggcctgtgacggcaggcgaggaggacgagcaggttcccgacagcatcgacgcacgcgagatcttcgatatccgccgctgctgggcgcgggcgggttccgggggcttgcggtggggggagcagtgatatcgagcagctggtggagccgcatcccagcagggcgttcctggcagagggttctaagtgggcaagggcgcagagtcccttttccttcacttcccacatctgattcgctccatcaatgacccggagcatccactgacgctagaggagttgaacgtagtagagcaggtgcgggttcaggtgagtcacttccgaggggagcgagttgttccagagagtcagaaaggtttctgtgcagcaggagctggcgtgctctatgctcacgaacaccgaagggtatctttggggagggagattgttgtgcctattttatgggtgttgaaactgaggcccatagaagttggatgatttgcccaaaacaacaaactaagaagagggaccttgggctgagggtggttgactcttgacatctctcctccacaaccaggttagcgaccccgagagtacagtggctgtggctttcacaccaaccattccgcactgcagcatggccacccttattggtctgtccatcaaggtcaagcttctgcgctcccttcctcagcgtttcaaggtcagttggagctgagccccgggagtgagaccaggcattgagggtctactgctgaggatggggactgggagagcatgaacatggataggacatcagagtggggcctggaaggatccccattagcagagaggaaactgggaggaagctttccaagtcgatgtgacaagaataaagatctgagctggaaagtggagaaaagtattgaagagtgtggcaggaagggcagtagggagcggcagatgggtttggaccaggggtggggcacaggcaggcctttaaatcaacagtagtgggccagttctttggatagaattggaatagctagggccgggcgcggtggctcacgcctgtaatcccagcactttgggaggctgaggcgggtggatcatctgaggttaggagttggagaccagcctggccaacatggtgaaatctcatctctactaaaaatacaaaaattagtggggcgtggtggtgtgtgcctgtggtcccagctacacgggtggctgaggaaggagaatcaaattgaacctgggagacagaggttgcagtgagccgagattgcgctgctgcactccagcctgggcaacagagcaagactcagtcttggaaaaaaaaaaagaattggaatacctgtggatgggtttggggtgtaacggaagggccagagtccaaaggcatgattaggaggaaggatcagctggagatggtgcctgagggtctgggggctgcagggaaaagtgtgggtcggtgggtgggtgttcaggccctggttatctccctcccagatggacgtgcacattactccggggacccatgcctcagagcatgcaggtaagtgtggactggtggtgagggtgttggcccgggcaccccctaagcagtctgaggcttcccccttgcacaggagtctatgggcaagactggagatgggtaactgtgtgagtgaaattgccagagactcctcagtatgggttatagcctagaccgaagctggcctgagaagactctcctttgcttaccatgtcctcttctcccaaatcccctctcaccaaatatacaggaccagagtgtgtcaggcttcagcagcgcaggaggcagccagggggagggatcctaagaaggcagattaggtgggctcaggtggttgaagtagcctgatcaatatgt

SEQ ID NO: 1242724 - DNA, 4001 bp, Homo sapiens
cccaaatacaacaggcaagtggttaaaggcaactgtagagaatgaaaaatttcttcaacattttttttttgagacagagactcactccgttgcccaggctggagtgcagtggcgcaatctcggctcaccgcaacctccgcctcctgggttcaagctattctcctgcctcagcctcccgagtagctgggaccgcagacgtgcaccaccgtgcctggctaatttttgtatttttagtagaggtggggttatgccatgttggccaggctggtctcacactcctggccttgagtgatccgcctgccttggcctcccaaagtgctgggattaaaggcatgagccgccgggcccagcctgagtcacccaacttctaagaaacattctcagcaacaagtcctgggcacagccttccacgccaggcagatctacccaggtcctggggcacagccaggttggggttcccttggtttcactcatacaactgtaagttgatggtgtggggtaaaggctgcctgccagagttgagggcattgacctgaaaacttttacaagctttgtattttgtgagacagtgtctcactctgtcacccaggctggagtatagtgggacagtctcggctcactgcagcctctgcctcctgggttcaagtgattctcgtgcctcagcctcctgagtagctggaattacaggcatgcaccaccacgcccagctaatttttgtatttttagtacagatggggtttcaccatgttggctaggctggtctcgaactcctgacttcaagtgacccactcacctcagcctcccaaagtgctgggattataggcatgagccaccgcacccggcttaagctttgtctttgaatgtcaagattgcatgagcctctctctcacataccaagggaccaatatgaggggattgattccaaagggctaagtcagaggacaaaagccatggacatgaagacattcactgcgctattagcctcagtggtaaaaactagaagttgccaggaccgggtgcagcctcatgcctgtaatcccagcattttgggaggccaaggctggtggatcacctgagttcaggagttccagatcagcctgtccaacatggagaaaccccatctctactaaaaaaaatacaaaaattagccaggcatggtggcagatgcctgtaatcccagctactcaggaggctgaggcaggagaatcgcttgaacctgggaggcagaggttgcagtgcggtgagctaagatcgcgccattgcactccaccctgggcaacaagagcaaaactccatctcaaaaacaaaacaaacaaacaaacaaaaaaactagaagatgcccaaatgccaagatgaaagaacaatgtaacgagacgctccatttgtggaagatttgcagccattaaaagtggttgttggctgggtgctgtggctcatgtctgtaatcccagcactgtgggaggtcgaggcaagaggattgcttgaggccaggtgctctagaccagcttgggcaacagagggagacctgactatacacggaagaaaaaaaaagttagcagagtatggtggcacagacctgaggcccgagctactcaggaagctgggaggattgctcgggcctgagaggttgaggcagtagagagtcatgatggcgctgctgcactgcagcctggatgatggatcgaggctctgtctcaaaaaacaaacaaacacacaaacaacaacaacaacaaaaatggattgctttgtcttagggtgtgcaatgggccaagacgaaaaaaaaaaaaaaagaaaagtgaagaaaatgattgctgtgaagatgggtagaagaataagaatgacagaaacaagatgctcgggatgaaagcacagtgctgacactcttgtgggaagttctatgcacctggaaaggaatggaagggacttggctcatgaagtccccggtggcttgatatctaaaacctgagagttttagtcaattgctctggcacagagtcacactaaccagtctcatagagcctgatgtataaaccagacgccaaggcaggaatatgctgcccagatcagcagtgcccagaaggccagtttgtgcaaaaaccttgttccccaaaagaaaacatttgctttattgaagtggcccacgcctgtaatcccaacacttcggaaggccaaagcagatggattacttgaggtcaggagcttgagaccagcctggccaacgtggtgaaagctgggtgtggtggcatgtgcctgtaatcccagctgcttgggaggctgaggcaggagaaactcttgaacccaggaggtggaggttgaagtgagctgagatcgcaccactgcactccagcctgggtgacagagcgagactctgtctcaaaaacaaacaaacaaacaaacaaaaacagaaaaaaaaaagcaaaacaacaacacaacaaaacaaagctgggtgaccttgggcaagtccctcaaacctttctgggcctctgctttctcacttatcaaatgggagtaacgggagtgctccgttcacaaggctgtagtgttgatgctggggtggcaggtactggctggggcagggccttgaagggcacaggggtgggagcaactcaccctggggatgagccagctgaactcatggttgttgacacccatgaggaagggcacagagtggaagggcttctccttcaggagttccttggggcttttggggaagacagtgccatcaacggtgagaggatagatagtatttttctgcaggagaaagcaatgcaggaggctcccaagttagggccaagcctcaaaggctaggaccccagcagccactgagctgcaggcctgagtgtctgagcctggagggaaagtgaagggatgaagatcaccagggttaagggggtcgggggaaccaggagatcagggcaacagatgcgtccagtttctttcctagaagacaggcctgctgtggggatggagatggccctccatttctgtctccaagccctcagccccttcccctcatgagctgctgtccccagccccacctgggggtagactgcccctctgctcctgcaggggatggatagaaccccctctgtgccattgcccggcaccatccccaaaagggtggccataccagcttcttgctaaggaccagctcttctccttctttctgctgaaggcactgcaccatctcagccggggagctggagctgcaggccaaggtgtttgcgattttctggggacaaatgaaagagtcatgcctccctctcagccactcagccccaccttgcagccttctgcctcccacagagagggtgcatctgtaggacagctggatgtgatgtcacagatcggcctcgagactggtcacagacttgtcaccactcctgagaagcctgccctgcccgtcagcttgggtggtcccaagggcccccttgcgtcccctattataccataattttattatctgggggaatgggggcactgagtcctcattgccctctaagaatagtgtcattatcttttattattatttttttgagacagactctcgctctgtcgcccaggctggagtgcagtggcatgatcttggctcaccgcaagctctgcgtcccgggttcacaccattcttctgcctcagcctcctgagtagctgggactacaggcacctgccaccatgcccggctaattttttgtatttttagtagagatggggtttcaccatgttagccaggatcaccttgatctcctgactttgtgatccgccaacctcagccttgagctgtgtttttctttggacacaggagagacagggaatgacctcaagtctgtggttgagaaaatctctcctggccatggggagaggatgggatggggaggttgagaggaggatgctgttgtccatacaagagtcaacatgcccacgcagaggttccagaatcatcttgtacacagtggttaaaatgcccagcccacactgccttggccaccatctggggccaggt

SEQ ID NO: 1242725 - DNA, 4001 bp, Homo sapiens
ctcgcacacgacccagggtggtgtctacttcaggctgagcaacttcgggccctgagggaaggacagaaaggccacggggtgagtttgcagcccccatgaggggaaggagtgaaagacaaaccctcaggctgttctcagtacttaccacacagcatcttggtaaccttcccagcaagccggtgagcctggtcttaggttgacgcccaacttcctcctccctgcctgcctgagagtcactaccactccactccaggccagaccgggcctgccactagggccttgtgccttggggccagccacttgcccatttctttgtttttattttttgtgtttgagacagggtctagctctgttgaccaagctggagtgcagtggcacgatcttggctcactgcaacctctgactcccgagttcaagcgactccagggcctcagcctcccaagtagctgggattacaggtgtgcaccacaacgcctggctaatttttgtatttttagtagagacggggtttcatcatgttggccaggctggtctcgaactcctgacctcaagtaatccatccacctggggctcccaaagtgctggcattacaggcatgagccatcatgcccagccctgaattattttttaaaaagtagagatggggtctcattatgttgcccaggctggtctcaaacccctgggctcaagcaatcctttcacctcagcctccccaagtgctgggacgacaggtgtgagccatcatgcccagctggcaccatgtttcttgtacggcctgcagaactgtggcctaactaaacttcttttctttgtgaattacccagcttcctgtattcttttacaacaacacaaacagactaagactggaggactgcctctcccaggctagacaattcctagagataggaggcagctctctggggaggtggaattggcaggcatctctctagggagcaaaggcaaaccagtccagagccatacccaaccacctcctttatacagctctcagctcctggctgccatccaccagccataatcaccacagagccgggtaccaggaagctggctggggacagcccctttccccagagcctgctgccaatcgtaaacctctttagcctgccttgcctattccttcccgtggcaaccgtgtcaaaggggcttgcccacattttccccctgctccctctgcctcctggctgatgccacctggtgcttccctctgtggccctatgtggcatggcctgcttcctgttcacagggaactacgagcaaactccttccctcatgatagtcatttgcatatctgcttgtcttactatacttcattaaaacaaatctcaggcccccttaagacataaagacaggccaggtgcggtggctcacgcctgtaatcccagcactttgggaggccgaggcaggtgggtcacctgaggtcaggagtttgagaccagcctggcccacatggtgaaaccccatctctcctaaaaatacaaaaattagccggccatggtggcaggtgcctgtaatcccagctactcaggaggctgaggcaggagaatcgcttgaatccaggaggcggaggttgcagtgagccgagatcgcgccattgcactccagcctgggtaacaagagcaaaactctgtctcaaacaacaacaacaaaaacaacgaaacaaatacagcaagagcagagcgcctgcccagagagaatgcacaacccctggtctgcctccaaacaggactgtttcctgagcggtcggcccactgctccctgtccctgtctcactcttgactcctccacaccaagtacctctgcaggcccagcaggtgtgtcttaccagtggctgtggcagggcatgccaggagcagacagaccaccccgaccaggaccccggactccactctcactgctctctccattctccttacaactggttcgacagaagcttcagaaggtggaataagatccctgcccttcagcaccaccgatctctaaagggctgtgatatagaacctccaaggacagcgccacctagctggtggccagccccatgctcaggctgagccagaggcagggctagatgagtgccctgcagaggcctggttgatatgacagccctccccgtcccactgttttcaaattccagctctcctgacttggtgatctccatgaaatcctgtgcgttcatcccaaggtgaccacatcactgaccctaggaagtggtggccagtgaccctggggtgccactccgagtgggcaacccagcctgaggtgagggcttgatatggtttggatgttttgtcccctccaaatctcatgttaaaatgtgaaagaaaataaaacagtgatgataataggacccacctcatagcattgaagtgagggtacatgtttgcatgtgtgtgtgagtgtgtgtgtgaaaacatgaggcttgggactgggtgtggtggctcatacctgtaatcccagtgctttaggaggatggggcaggaagatcgcttgagcccaggagtttgagaccagcctgggcaacacagggagacacgtctctagaaaaaataaaaaaaattagccaggtgtgatggtgcatgcctgtggtcccagctacttgggaggctgaggtgagaggatcacttgagcccaggttgtcgagactgcagtgagctgtgataatgccactgcactctaggctaggctatagagcaagacaaagaaagagagaaagagagagagagaagaaagaaaggagagagagaaagaaggagagagagaaaggagagagagaaagaaaaagagacagaaaaagagaaagaaacaaaaagagaaaaaagaaaaatagagagagaaagaaagagagagagggagggagggagggaggggaggggagaggaggggaggggcttggaaccagaactcatggaagcctgaggagaggagagtctgggaaccagaactgatggaagcctgctcttgaccggggcggggatctgcagggcatctgtctctctgctggcttaggaggctcccacccccagggagggcaggactcacttctgggcctcagtgtcaggaacatggctggctgggagtaggcggtgggaggatggatagatatttgctggcccagtgaaagacagagtgagggttgtgcctaaacacgatgccagatcctcttccggggctccagctggcacccagagctgaagagacaggctttaggatgaaacttcccttctgccaaaaataactagtgccagctgggcattgtggcacaagtctgtagtcccagctactcaggcggctgaggcaggaggattgcttcagcccaggagcttgaggccagcttgggcaacatagcaagactctctctctaaaaaaaaattcataaaaaaccattgcagcttcctgaatcttccccggcagcctggggtggggtctccttttcagagctgcctccagactttgtccttccctattccaccttcctcttcttgttgccatcacagccctgccaccccccagccacacccccttgatcatttgctgaagattttagcacctggctctggcatgctttccaccttcaacactcacatcaaggcacctggatctcttctccgcccacaatcttaccttccatcttcgggtatagatgctgccaggagagctctccatctgctcccaaggccacgtttcccaactccctgcagctaggtctgccttccctcctagcattgtggatgggcctaccagggccaggactagggtgagacaggccagcaaggcgcccagggcataaaagttaaagagtcactcacccccggggtcataccagtagagggtcggcacctgagaatgaatgccttctaaattttacacttgcttgtcttgctctagtcccagctctgggacctacccatggacactagaccctggtcccctcccacgtccccagggctgtctctttggtagcagcatccctcccatcagctgcaaac

SEQ ID NO: 1242726 - DNA, 4001 bp, Homo sapiens
tggcctcctggatcactctgagccatcctctgctctccatctttcctgcccctgctttagagccagccccatgatctctcctaggatatatcctatccccatccctgcccctcccagtagctctccgagtctctgctcctgtttcttgccaacccagtcccatgcagcaggctgagccatctctctaaatgcacatctgatcatgtcactttgctgcttacaatctttccctgctttggagaatcgcttgaacccgggaggcggaggtaatggtgagctgagatcacgccattgcactccagcctgggcaacaagagcgaaactccgtctcaaaaaaaaaaatttttttttcctctgctttttagtgaattttggataaagttgcttaattctctgggccttcgtttctttatctgtagaatggagacaacagtacttttctttttggactattgaaggaattacatggatgacgacacataaggtgcttagaagaatgcctggcacacaggaagtgctcagctgttgagtattattatgactgtggccagcaatgtcctgtgtgatgtgttcacttcccagccatatgcccctcacagggcaccttacagtacacccacattccaggcacatcccaggtcagcagtcacacaggagtcaggggcaaagcccgtcaactcatgcccctggcttgcaggcctggtgtgaggtcctagccttgcccagggggcagatggtgggctctgttcaggggatagagttctgggggaatgtggagaggcagaaggtgctgggtagcacctggattcactgattaccccaagcctcagcactacccttcctggggctcagttttctcatcagtgctatccctcaacagaggagacatccttggctatgaggggctgtacccttggcaggggcgagagcatttctgtggcaggcacgttcctgtacacgcaaatctgcacatggcctgtgcagtggagcatacatttgtgggaacgcaggagcctaagtctgtgctcggtccgtctgggcattgctctcaccagtcctgagatgctcatggcccccgccgactggccgaacagggtcacatttcctgggtctcccccgaaggctgcgatgttctcctgcacccagcgcagagccgccatctggtccagcagcccccagttcccgcgcgcgtggctgtcgtccgtgctgggcgtgtggggttcactgtcagggtcccgggcctcgacagtcggggcgcgttgggctgccctcctgggcttcccccacccagcccagccttgcccctctaagacccagtcctgcgaccacacccccttccttggagttagctcgccccatccagatggtatggagcgcccgccccttccaccgagcgccaggccccgcccccgcctcgcggccccaccccccccatccccgccccaggccccgcccctcccttcccacccagtccccgccgctctggccacagctgcggtcccaaagggtaccggccccgccacctcaggaagccgaagatgccgagcctgtgctgcagaaacaccagcaccactttctcgcgggcggccaagtcagagccctcgtacgaagaagcagcgcccacgatgaaggcgcctcccgggaaccagaccatcacctggacgaagaaggccgggatctgagcggggcggtgggcggcggtgggaccgcgggcgcgggagacctggcactcactggcagctggggatccccgggcgcgcgcgccggcgcgtacacgttcaggtacagacagtcctcgctgaagcgcagccacttgtaccgttcccgcgtgctgacgtacatcgaggccagctggccccaggactcctgcaggcacctgcgggcaccaggtagcggcggcggccgcggggagatcgtttcaatccagggtccgcagtgagaagacggaacccaaagcaaaatccaggcagcgtctgtgcgcgtgcgtgtgcgtgcgcatgtgcgtgcgtgtgcgtgtacaggaggcctccgccagccccggggcccaggactgggaggcaggttggcctctcaggaaccatcccctccctgcccggcgcctcagtccgtggagagattcctgctcctgttggtgctgtcaaggcaggaacctgcctgccctgggcacctccctgtctttcatgccccaccctcccctcagtctcccttctgcctcccaaacagctctggaatatggtccctcccctccatccccatctctggggagatgtcaaggccaccaccgtctctggtctggacagtaccccagcctcttcacactcctcctactcctcggccacactctggcggactatgtcactcctcttcttcatatcttccctaatatgtacaactatgatatatcaataaaaacaaacaaatcaacaaaaatcttccctggctctccactgccctcaggataaagttaagatacgcggagtacccaggccctcctttccatccagtcatctctgtcccagccaccctttgctgtagatacatgtggccccttgcctcccacctccaagcccgtgggcctcagtcctctcaagcaaatgccttctgccctgcccagcaaactcctattcgtgtttaaggcccagcttaagtggtgtctcctctcctggtcacttcctcttctgtgcctcccgacatcctgtccacttatttttttgagacagagtcttgctctgttgcccaggctggagtgtagtggcacgatcttggctcactgctacctctgcctctaggttcaagcaattctcctacctcaatcttgcaagtagctgggactacaggcacgcgccatcacacccagctaatttttgtatttttagtagagtcggggtttcaccatgttggccaggctggtctcgaactcctggccttaagtgatctgcccacctcggcctcccaaagtgctgggattataggcatgagccaccatgcctggcctcctgtccgctgttgaccatgtcctggttggagttatttcagttggctgtttttctccccaagtgaccatgcacttcccaaaggcaggaatagaggtagattcatctgagtactggcacccagcccagtgccttatactgtgtggatatttggggtatttttgtagcatgggctctccggccacctcaccttttctccttgctggcccaacccctaggtggctattctcataacagctgggcctggaccatttgattgggcgcaggacaccctgtttgcctcgcctgttcctctgctcccttctgctcttgtcctagcctagcctgttcccagagcatcacctgctccctttcaccagtccttccctacagcattccaacactcctttggcagcagctaatgtggtattagaatgctgtctagtaaaccacacctagcacctcaccaggaaagccagggctctgatagctgggaactgggattatgaacagccaaggcttctgtgcccatcccaccatcagagccatcctgccatggtcaccagtgacatccatcttgctaaatctctgtcattatcttacttgccctgacagccctcaacatggttgaccatattatattcccctttgctctatctcctctcttttttttttttgtttgagatggagtctcgctctgtcggccaggctggagtgcagtggcaccatcttggctgactgcaacctctgcctcctgggttcaggtgggagatatcagctcactgcctcagcctcctgaggcacatgccacgacacctagctaatttttgtatttttagaagagacggggtttcgccatgttggtcaggctggtctcgaactcctgacctcgtgatccacccgcctcttcctcccaaagtgctgggattacaggcatgagccacggtgcccagcctcctctctttctttagagacagggtcacccaggcagcaatgcagtgacatgatcatagttcactgcagccttga

SEQ ID NO: 1242727 - DNA, 4001 bp, Homo sapiens
gcagttgggactgcaggcatgcaccacaccatgcttggctaatttttaaattttttgttcagatgggctctagttatgttgcccaggctggtcttgaactcctgagcttaagcaatcctcccacatcagactcccaaaatgctgggattatagacatgagccaccccatttggcttaaaattgtgtacattctaatagtacagctatagataaatacacaatgaaaaggtgaaaagaggttgggcatggtggctcatgcctgcggtcccagcactttgggaggccgaggcaggtggatcatctcaggtcagaatttcgagacctgcctggccagcatggcgaaaccccatctccactaaaaaaatacaaaaattagctgggcttgtggtgtacgcctgtagtcccagctacttgggaggctgaggtggggagaattgcttgaacccgggaggtggaggttgcggtgagcggagatggcaccattgcacaccagtctgggtgacagggcgagactccgtctcaaaaaaaaaaaaaaaaaaaaagaaaagatgaaaagaaaatgcgccaaaatgttaaaagcggagtaagcaaagtttccttcaaatttaaaataatggatatatgtatatatgggcaaaatttatttatgatagaggtcagactagtggtaactttgagtattgactgagaaggagtacatgggacgctggagatggttttttgtttttttttttgagatagagtttcgctcttgttgcccaggctggagtgcaatggcacgatctcggctcactacaacctctgcctcctggcttcaagcgattctcctgcctcagcctcctgagtagctgggattacaggcatgtgccaccatgcctggctagttttgtatttttagtagagacggggtaataatattggttaggctggtctcaaactcctgacctcaggtgatctgcccgcttcggcctcccaaagtgctgggattacaggtgtatccttgtaagttaaaaaaactttttaaaaaatgttttttaaaaatagagacagagtctatttacccaggctaggtctcactatttgcccaggctggtctcaaactcctgggctcaagtaatcctcccacctcagcctctcaaagtgctggaattacaggcatgagctaccatgcctaacccactggaaatgttctagatgttgatctggataatggttaccatatatatatatataataattagtataatagatataattatacagtgaagatgtgtgcaccttgctgtatacatcttatacctcagtaaacttttgttaatgtattagattgttttcacagtaaaaagtgtagtactcattttaaaaagaaagatattggggagaaatttgaaggtggtaaagaggttcatgtagcagagagggggcagagacaggcctcctgcttaggagaaggaaagaaggatggaaggaaggaaaaaggtgggaaggaagaaaagatgtggccatgttctcagaccccttcacctgtgccgggaggcaggaaatacagagaagccctgaggttcagggaggctaaaggacttgtccagactcccagctggtagatggtttagtgtcctgaaaccctaccctccatttgcccaggccttgtctaagtgctcctgccctgctgtccccaggagaggttgaactggggcctgtccctccatcccttgtgcccgtcttgcctgacactctcgggaaggggtgggggtcttacccaaggccgtctgcgccatcaggcagagggtgaggctccagcacagaatccacctcatgctccagccagctcctgctgtgggcaggagtgatggcaacactgtggatggcaacactgtggatggcatggtagccgtgtctacagtgtgtgagcacacttttatctgctcttaatccctgccagcaagtactggggcgggaggaattgtaaccagcttctgaccagcccacagccttgtctctgccttgggcaacaggtcacgctagatgatcttggctcttcaaactgatcagcctgcaatctccgccccgtttgctcatctgtgcagtggcttaaagctgaacatgtgtgagtcaaggtctaagcatacagtgggtgccaagattgaagtagaacacctggttacttggcccttcagccagggcttcctgtctgtggatttaagggtcttgggcctccctgctccccagtgcctcgtctagcctcttccctgcctttcctcgcacatgctgacccttggctgtcctcacagtttcatagtccacatgcggaagctggacctgaaagcaaccgtaatgtgggagcccagaggggcacccgaggagtgagcccagagccgggtggtgggaatgaagattccctggaaaagatctaatcttctaagtaaaggatgaggaggagtgggccaggcaaagaaagatcctgtttgaagtttggagccacaggagcaagtgtgggaggtggaagcaaggagacagcagtcccatcttcagtcaaaggtaagatggggctgggtgtggtggctcatgcctgtaataccagcactttggaaggctgaggcaggtggatcacctgaggtcaggagttcgagaccagcctggccaacatggtgaaaccccgtctctactaaaacaaagaatacaaaaattagctgggcgtggtagtgtgtgcctgtagtcccagctactcaggaggctgaggcaggaggatggcttgaacctgggaggcggaggttgtagtgagccgagatcgggccactgcactccagcctgggtgacagagtgagaccctgtctcaaaaataaataggccaggcacggtggctcatgcctgtaatcccaacactttgggaggctgaggcaggcgggtcacgaggtcagaagatcgagaccatcctggctaacaccccgtccctactaaaaatacaaaaaattatccgggcgtggtggcacgcgcccgtagttccagctactcaggaggctgaggcaagagaattgcttgaaaccaggaggcggagcttgcagtgagccaagatggcgtcactgtactccagcctgggcgacagagtgagactccatctcaaagaacaaaaaaaaggtaagatgtttcctctctcgtgtacccccaaagtctggggtcctggcccatctttgtgaaaagagggtctgttgggcttctgtgctggggaggggaaaaggcaggggaacagagaacttctcccttggcccacagcctcttgctctataggcctgacagatggttaaacctccttctttcacagtcaattttctgagttcttcggagatgctctttatttgggactcctctcccacagttcccatccttgtgacccttcctcagtcccaaggaatgtggcattcactgcccaatcattgctgcctgggctctgtgctcctctaatgaaggcccaagatgaccccccacccctgcctctgccacttatcctgtggggtctacatgggcaaacctccaatatcccttgccccacctcagcagaggtgtggcccatcccattgcagccccttctgccccactcacgatggcggggtggagtcaggctctggctggctgagcctcctatggtggaaagcaccactcatcttccccatggtctcatgcccacaggcttgaggggaaagaagtggggtgagaactcacagcgaggtaacaggtctctacaaagaaaatctctcccctaactcctccccagcataacgtgttaacttgtggtggctcacgcctgtaatctcagcactttaggaggccaaggcaggaggaccgcttaaggccaggagttcaaggccagcctggacaacatagtgagaccctgtctttacaaaaaattaaaaagtcagccagatgtgctggtacatgcctgcagacccagctacttgggaggctgaggcagcaggatcaattgagcccaggcggtcaagacagag

SEQ ID NO: 1242728 - DNA, 4001 bp, Homo sapiens
taacacccttctagtgtggttcttctcaataaaaccctcacccagtctgaccatagagccaggcttgggtgagaggtcacaagaagatacctagacagtcccttctgaccaaaggactcagtacgcccatttcagcacttctaaaaaaaactggctggtgatcagagtctctaaaaagcgttcagataatagtttcctgggctcagctcgggatattctgattcagaaagttcagaagggagcttggagaatctgtatatttttaaagatgcctccagtgacctggccatcagccagtttaggagtcaggggattaccaaaccactcgcccgagtctcaagccctctctctccctcctcccccatccatgccaatccctcttctttcacactgggctgcatgacctgaattcctgccactcccagagtcacaaaccacccgtgggcccgaacctggtcttacaaattagggtaggaggtggcttctcgcaagttatcccagggcgatgcaggctgcgggttcgtaaatcgcagggatcccagcgggggagcagcaaaggggactccgaggaacacgttcacaggcacagggcttcccagcacagtgacttgcttgccctgaatccatcccagcctggtgttcctctgtggcccttcagcagaaggccctgcgggaacacatgggaggaatcaggagcaggctggggacaggcagggcaatggcccacccagtctggagctccccagtggggatgtgcttccttcactcagaagttgtgcagctggtggtatccaggttccctctccatgaatccagttccatggctttttccaagattgctgtagaagtcacccccatgaaaccactgacttagtttctcctaggagcccagcagtacctagcaacaaaattttcccccattcactcagaaacccatctcccttctgctgagagcgctttctttctacaggattgacatataccgaactctgtagatcctgggatgccacaaactcatcttcccaggggttcctacacttctgtcactccacaccctccagcaccactgctggcatatctgtgcagcacctgcatgattgctggcttcttttttttttttcttaaaatttaattccaataaactccttttaaaattttacctagaagaattccaagtaatgacatttatggaattgtgattttggtgagttaggtatatgcttttgaatacacatgaatattcatgggtgaaaatttaaaattctcatgcagatacttcctgaaatcaactcgtctacttccaggagcataaagatggcactttgggagactgggcatgcaggggtctcagtcaccacacagaacgtggagccttgggaaggaaactgcccagctacttacttagcaaaacccgggtgtcttagcactgtttctaatgtcatttcattactgaaagtcctgtcgccgcagccaggagtgcagaagcacaggctctgttcctcacgcttctccagtgctcaggatggagcccctctaaaccccttgcagggtgtgagcaacccaaaggcagaaccaggatcttctgtgcgctacccactcccaagaaggaagctctggtcctaggttctcggcaacagcagaatactgatgccatcaaagtactacatagctctccactggccctcagagacctctgaagaataacttcatttctaccagtggaaaatcctcacccaccccatcttctgagagccctcctttcccattggatatctcacctttggtgggggctgcaaggacccagatagcccaaattaggatctggcctgggtgcacccaattcccactcatttggctgcctgcctgcactctgtgaacattgacggcggctgctggcctcagagagcttcagttgggagccagaaagagcttcctgttaacaggcaaatgctgaataggcaggcagaggcagcagagttactgaagatcagcatcagaacaatattctcaaaggaattgactaagcaagactttcctgttctgatttacataagaagctgatgattaactattgagctggggaaagataatttgataggctttggacttccgggatgggggaaacagaaaagacattccagaccaggcaagacattttaagattatgagttctagagacccaaggatgaatgaggtttccagacctgcctgtgatgccagaaagacacagtgcaggtcagagaagctgagaagtttctgagaagaggaagaaggttgctgctgggacaagcgagtggctctgaaggcacaagcactgccagctcagacaagcagcccggctggccctgccaacaagagtcttcaatggccatttggtctacagcctccttggcaaccttgaggcttcttcgattatattatttcccctctggcccttcatagttgccaccgaaaagattctccctggccttcaaatctgtcccttcatctgaccagaaatattatcaagtctgtacaccactgctcacccaactgttttaaagcacttcacacaaactagcttgttgccaacaccaccacccccattttggatgtctttcttctccagcttcttctttaaaatccaatttaactgccacctcttccgagaaccttcccctgattctcctgaactttttagtgctttgcttttccaacctctcttattttctaacaaattgtagccatgactgtcttcctccttggagtacacctaggacttttccatgtacatattcatcacagcttcttacttgtgccctgtggcttcccaaagctcagccctagaccttctgtcttcacaatttgtaccattcccactaccaaattgactatcaatttacttgattttttttctttaaattgacattttttaaaagctgttattaaagaaaattgtatctacctagtgcaataagaaagagcttttgggaagagcaagccaatatatgttgcatttctataccacaaaacattccctttgcctctagcaaccattacaacgaaagggtggtgtatggtggagaagatccccaaagtaagacaaacaggaaaatccggcctttctgtacagtggattttggaaaggagaagggaacagaggtagggaaagcatgtgtgatgcaaagtgccctgactccccctcttagacataggtcctaaagggatacagcgatgaggtaaagtgatggggtgcagtgatgggctgaaatgtgtgctaaggatgaaaagtgtgctaagtagtgaagggttctccaggaggatagtgacagaagggttccacatctcaaccaacctggggcagccacagcagagcagaagtggttgggctaagagagatctcagggggtggtcctatttcccttggatcccaaattccttgaaattgatccagacatcaccgtgtggcttcgaagaaaacttggaggtgactaccaacctggctgggagctagaggaggaggaaggcagggggctacagagatgcttcatggactcgagaacagagtgaaaccacaacctggcctgtgctggagcacagtgttgagcactgggcagggtgaggtagggcactgagtcagtcagggggaatcagtgggctttgatcaagatgagaggacagaccatgagctcaccacttaagaattcatcctcctcccaggaaccccggcagtgggacattgctgtggagaccacaacaacgcaaggacttctgcaagtgggtccaagctccctctgccctcccactcatgtggtcctattagcatcccataactcacacagccagacaccatcttggcaaggagtgcgggtggggtggggagcaaatatgagaggctatggatttatttgaagtgattatgctatctaaagaaactgtttaaattactgaataggactttaccagattgagttagatgtaattgtctatcattaaccagagaggcgaagaattctccttgc

SEQ ID NO: 1242729 - DNA, 4001 bp, Homo sapiens
tcccctgctccccgctgcccaagccagcctctggtaaccatcattctactctctatctccatgagttcaattgttttaatttttagctcccacatgtgagtgaggacattcaaaatgtgtctttcaatacctgctttttaggttctatttcccttccaacagaaccaagctcagatagcaaaggccaaaatcaaacacctgcctgttgatccaaatgtgccaggctttgcaggttcggtatttcattagcaattaagaaaataacttttccagaagcagaatgcattgcatgcattggaagcaaagggaaggcagcagaaagaaaatttgaggaaaatggaaaacaaagcctggagacacgctaaagcttctcatagtcggtcctgaccgaggtgaagctcaggagcgggagaggagaggtctctccccctacacatgccccaaaaaaccagggtggccaaacagatggtgaagaacatttttaaaccacttttaacacagtaacttttttttgcctgcttgctctttattcctttagtcaaaagtcttaccagctgtcaccatctcaaggaaaatgtcagaggcttgtggctgcctgtgcctctcctcagcttggtgcgggagagaggtgtggaacctcagccagccacagtcctggctgcagaactgctgaagtggccaaggatagggggaaggcccctcacaaaaatggacccaccatggaggctcgcagccaatctcttctacatacaatcccttccaggaactaagcatgtatactttccaaagtactttccctaggttcttatatcctccagacacccctgagataaatattattcccattgcatggagagagcaatggcaaagcctggcttctagctttgcaatctaccacctgtggattcttggaaaagttccttttcttctctggaccttagcttctccgcatgcacaaggaaattgtccaaatgtcctccaaagttgcttccaactctaaagctctgatgcattgtctaataccagttagacatccctgatcctcctctctgaatgacagttctggctgctgcttccctgaccccttccttctgccccagggagagctcagtgtacaccaaagaaatcagaacatgagaaccgcaagaggctaccaaagtcacttccttaacttttttttcccttctttttcaaataccaataagtaacttctttaaaaggaagccaagtagggctgttagtttcctgttgagtcaaaaaaaaatttttttaataagtaatttgctgaaactaatcccccccatcttttaaaaatcacacagttaaactgatttaaagaaacctttaaagatgcatttaaattttctttcctccttgtttaactatataattgttttcactcacagtaatattctcttggaggcatatgcttgacttatttaataaatctttctccacatttgaaatcatccattagcaataaggagcttgacgctccattacccacaataaatttcactgccattaaatcgccacatgccgcatggaggaaaggagataccagtatggcctctctaagacagggcagagtcagagctcagcatggagcctgctctgagcctgcctctcagttccttagcccagccctgggttctcctggcagtcaaggtatccatctagcctaccgtgggggctgacccagagagacaaagttgggtgggtaaatttgcatctaatctaaggctcatctttctcattccagtgggtttgggggtggggtccaggcagtagcaccctgtggctaatactcacctttaggccatggcatgaagcagggcaaaccagaacagccatcagacttgcccttggtcctaacacaaaacctcagcatcccagctggccttgacacagagccccagtcctcttgcacatcatgtacatggtacagctgataaagaaaagtcaaatgagttcaccactttcctctaccgttgccagctggctgcattctcaggggacactgaagctcagcttgcaagctgatgacgtctctgcttaccaccaacgggcagctccagcgtggagagaaagaaagaaatcattgactgggaggacctcagaatcagagctgaaagagacctcagaggccattgattccagttctgaagctttggtatgtcagcatcaccttgggagcttgttaaacgtactcatgtccagccccaccacacaccaaggaaattctaactcagaagatctgggtgggcctgggtgtctgaagcctcaagagcagcaaatgctgatgcatcccagatttttaaaaaccagtgatttggcctccagtttctcaacactggctataaaatgtaatgagctgggaccaggcgtggtggctcatgcctgtaatcccagcactttgggaggccaagggggtgagatcacttgaggtcaggagttcgagaccagcctggccaatatggtgaaaccttgtctctactaaaaatacaaaaataagctgggcatggcggcgcacacttgtagtcccaactactcaggaggctgaggcaggagaatcgcttgaacccaggaggcagaggttgcagtgagccgagattgtacagctgcactccaacctgggcaacagagtctcgctctgtctcaaaaaacaaacaaacaaaaaacccaaaaccaatgtaacgagctggggaaggtttaaaaataccaattccagggcctcatgctaccctgactaatcaggatttctggctataagccccaggcatcagaattatttaaaagctccccaagagataactataggccatgaggattgaaaacgactatctgggcagtgtttttcccttacagaagggaactaaggcccagagaggggtcggaacgtgccccaagtcacacagcaagtgagaaggattgctgcatagaacccaggtctccagcagtctgatgagagctccttgtgtgcgccaaggtacctgtgaggaaggaacaagttgggctcaggtcggttactggtgcccaaggaagaatgccatgccctggaaataactgtcactcttcagggaatcaagcacctaggttgggtcaatgttgctggtctgggaccacacttctagcagcgagggtccagatcccttttatttacctcctcctccctttggaatcccagtgtccaactgtcaagcaacaattcccagttttccacagtctctgcacatagttaggtcatggaaatgaatgcactttgtcatctggaccttagggagggatgctaagtgttgtgaacgaatggcatgttgggtagatcctgcccagattgtaagtgttctgagggcagttctgagcccccttctcttgtctctcttggattgggctgaacagtcaaaatgtgaagcatgcccaagaccctgcatggccttgggcaagtcacttccttgcaagaatcctatctgtaaaactgggataactaatattcacctcctagggtgtcatttggattaaatgagacattggaagggaagggcccagcacaggagggatgtgtaaaacgtagctgactgtctcaatttccttacagagatgccacaaacaaggaagagacactgaactcaggctgcctgggtccaatcttgctgtttcacttcttagacctggggcaagtggttaacctttctggccttgattttctcttctgtatgataacagcacatgccacaaagggttgctgtgaagtttaaattagaaagtgcatttaacatgcttagcacagtgccaggcacacaacaccgtaagcacaccataaacatcagctattattttggctactgttgttgttactattggtgctccagatccctggcctcctttgcaatcagcaaggtaaatgttgggagtcctattcctggtaatggttgggacttgcatgggactttccaccttaggaaacagacacatcatcattgtagtgaggattgcaaagtatg

SEQ ID NO: 1242730 - DNA, 4001 bp, Homo sapiens
actgaggtgggcggatcacttgaggtcaggagttggagaccagtctggccaacatgatgaaaccccatctctactaaaaatacaaaaattacgcggatgtggtgacgtgtgcctgtaattccagctactctggaggctgaggcacgaaaattccttgaacccagagacggaggttgcaacgagctgagattgtgccactgcactccagcctaagtgacagagggagactctgtctcaaaaaatgaaaaacaagaaagaaaaaaatatatgataaaggtgaggatgttgtttgtaaaagcacctggcccacaaccgacccttgactgttaccatcatcccaaataaagtcaagatactaattttaggcttggggtgggggactggctaagccaagagttcaagaccaacctggccaacatagcaagacctgtctgtactataagaaaacaacatttatacatttttttaaaaaatacttattttgttgagatttttctaccctaccccccattcaccccgaaataagacctccatcttcccagggcagtgggaaaggaccctttgaagcctgactcttagaggggctgttggagaggttgatacactccaataaatccccccagggcaccaggggatggagggtgggggtagggaaggtgtcaggctctggttccaaatcaaggggagagacctgagtcccccagctgctgcctttcctccctgtgggctgggggcaagccccaggctgttcctcccgcctccctacccccagcctggtcacacccgaggcccgactcacttgtgcaacccatacttgacttggccaaggagcatcatggccttctcgcccgtgatatctgggtagctggctcgctggaaggcggtctggatcaccttggcagtctcgtggttcactagaggggagggcagtggatgaggggctgcaggcccacaccaagccccctgctcccacccccaactggccttggccatgactcagcctctctgagatgaggctcccagcaggtcttaaagctgaggggttggactgggcctccctctgggtttaaggttgatggcaattctaggggacacagagagctctgaccctgaccccagctagagatcctgatcataccctagcctctggatcctgacacatgggaaccccacgatcctagcaaatggggcagccctgagcccagccgcacactaaccctagcctcacccagacgatgctgtgacactgtctgtagtcctgggggtctataattctggcttttgaacttggcgatactctattttagaaattgtatcatttagcctccctatacccttattatattgagcaagagactgaggcccagagagggcaggggagctggccaaagtcacacaacagtcagtgatggagcctccgtcacctgagctcatggcaacccctgactttggccatagagtgacccccaacaccaaatatacaccaacctcctaatctttaccccctgactcaaccccctaacctggctcagatctgaaccctaactcgaaccccagtgattctgggtctcagacaaacacaaatccctatacctggctgtttgcaatgcagctaggaccttctcaccaaagaacttgaccttgaaggcgaggtcaggagggggtgatgacagctccactcagcccatctccctcccagggcactcctctctctgggctagtgtggcagccggcttcagggctggcttcaggccagggaggctcctggcatagtgggtgtccatgaaaagacccctggcagggcagacagatgcactgatacttacacaccaggagggcaggcttggtgatgcggcacacgatgcctgcctcgtgcgaggtgcctttggagcaggcatgggcattgcccagcagggccagggtcaggactgtggcagccagcatggttatcaggcagtggtgtgtaagtggcccgagccgttcagcctggagcccgtatatgtatgtccgcccagcccccacggaacatgaggctcttccgggcagcagggtcttcctggccccagagattcacctccttcctgcccagcccctgcggcctcctctagagttcagagccagacattcaacaagagcaccccaacttctacttgtctcccctccaccatctgcaccatttttgccatcccttatgttatctggataattgcttaatatgtttccatgaattcatttattttttacttaaatacatatatctaggaataagctttctctctcagttgccataaatagaaagaggccaaaatacaatgactatgagaaaaagacattgaattcttgccagatactgttgcccgacaatgaccccaagcttgaagcctgctgttgcctgtaaagtaaaactcagtagaaaaagggagagggcttcatgggtgctagagaaactctagcatcgacctttcccttgctctgatttgaaagcttgaaaggataatgtcctcactgtagtattccatggcatttgacgctgcatctgggtaccccagaaacagtcctctatgtagactttccttgatatgcataaaataactctgggggggtatacagcctctgagatcattggctgcctccgggagaaactgggtatccgggggaaaggggcggagcagggggaatgtctgtggcatttcaattctgagttgtgtgaacgtgttatctttcaaaaaattacaacatacagtactttacctacagctggggccaagaactgccctgcagcaactgtgaccagatgaccaagtgctgcctcctcagagcccctaggaaggagccagggctgcagggatgtgggcaggatgctgtgccccgggcagggccaaggaaacatgagtcgggatggccttgctcagtcgcctctcagggggtcctgccctagtcccgagtttgcacctgctccaataccaaagctgcccagaagcacgtggggagccgggctgaccctcactgtttcccaaggctcagagacataagctgattgcccctgggcaccagcccttgggttcgtacccacagacctctggagccccctcactgagtgagcatgtaccatcggccctgccagggtgggggctggaggtgagccctttagcccaggcctccccagcaccccgtcctccgatcaggctggaggaacttcattcattaatgggctctatttctccagaaatgtgaggacttcccggcggctattgtcttcttggctgttgtttctgttcccttccttgggccacggagggcaatgaccgagggtgcccctggccagggtactggtggtcagtggctgggcctggagagaaaagggaggtgggccccatcctctagtgcagactgggtgctgggggcctcccaagggtggggataatggattaaaaaaaaaaaccaaataactaaaccaaaaaaccaaaagagcctatccctttaaacttagaatcctgcaccttagactcttaaaacttagtaagaattatactaatatcagctgtattttcgagataatgcttttttgcgttatctcatttaatcttttttaaattattttttagtctttttaaaattgtagtagaatttaatttactgcttagtgaaaacttgccactttaaccattttaaagtgtacaattcaggggcatttagtatgttcacagtgttatgcagccatgaatttaattccagaacattctcatcaccccaaaatagagccccacatccaataaacagtcattccccatcctgccctttcccagctcctggcaaccataaatgtgctttctgtctctatggatttgcctactctgaacatttcatgtaaatagagtcatacagtgtgtgtgatctttcgttcctgggttcactcttttctttctttctttctttctttctttctttctttctttctttctttctttctttctttctttctttccttctttttctttctt

SEQ ID NO: 1242731 - DNA, 4001 bp, Homo sapiens
atttcaattgccttatactgacactttgttacaattcagtttccaaattccactggcacagagggcccccctctcttcatgccttctgacagcccataactgagtcaagtgacagctgggaagccaacctccttacggagttcccaggcaccctgggctctctttgtacagatgcaatttacagtttacaatgctttattccattgtgaaaaaatacatgaaactaaaaacctcagtaacgcagcaacgttaaggaactgctttcctgtactctggcactagctctagcttgtggatagaatcatctgaaagagaagagatgggcagattttacatacacaaaggcccaacttcattatattcagatttttcaactatcttatgaaagtaacactatggacacaccatcctaaaagctgccctcagaacgcagagttccctagtggtgacaggcagaaagctgctcatgttctctcccaactttatgtggccctcataaagagctctcatgtgtggataagggaatacagagacgtgttccaagataaaattcaaaattcttggcttcattaccaataaatcctactgagattattccacatgcatctctctaaaaagcagcattcggcatacccacactcgccattctcccagagagcagtactaagaatatgacttaaatttcacattggagtgcctcccgtaacttatattcaagaaatagtacagctgattgcctgggaatttgcatgaagaacgaaataccaaagtaataaaatgcagaccaattcatagacagctagatctttcttcacatctgcaaaaaacagattcatcatctcgtggggccaaacacatatcatctagtggatgcctgaataaagatgaggcctgtacttggctctgagtttattaatccaaacaagactttgactgtcagcattctgcagttttcctgatggagaaatcaggcaccgagggcatagtacaggcaagtcacagtgagtgtggagcaggtgccaagggccactgaattctgacttatttgggatcagtgggaggaagggagcaaatgaatgcaatttaaacatcactggcttggccggagtctttctgtctgctcctctgtaagggtgcctgaacaaaggctctgtgtctagtgcccagcaccgtgcctggcacaaaaacggatatcagtaaatatttggaattcgtgaatagcaggtcctttcatctttacatccccaaagctccttcaaataagttcgtgcatttcatgctacgagatgggcaccatcaaccccattatattggtggggaaacagtggctcaaaagaatggactgaccgaccaagtcaagacagcagcgagggtcgcggtcctaaccacaccacagctgcaggacacttagatctcagccacgcccacccacatgcaccgccccccccccacctcctccgctgcttacacgacgcccccacctcgcgccccagtcccgccaggctggggacaaggcacagcagcgtcctctcggcctctcccaggccccaattcgacacaaccattccccgtccccagcccccggacgaggagggggtgcagcccctccaccccgccccgtcgccgcccctagcccgacctttttgtcccagatttgcagaggcttgctgccgatgctgtagaggatggagaggaagccgctctggaacgtgtttttgaacatctcgccggcggccttctcctaagccgcccccggagccgacctaggccccggagtagatacaggcaccgagcgtcgagggcacagcagcaggccggccctgttccgaagaagggtggttgagctcctggcctccggatctgcagccactgatggccggactcggacgcggcaacgctaagtccgcgatcttcagctcctaagctgcgagctcagaacggaaaccacagcaactaccgtccgcgccgcggtatttccccgccttcaatggaggcggagggccgcccgttgcttaaaatgaatccctccgcccatctgagcccgccccccgggagcgcggggcccaatcccgttacaaggaccacggacttccgtttcgttccgcctgtaagtcccgcctggtcccgcctcctcctgaaaagagctcagttgtcaaggaactatttttcttgccgtcgtcccagagatgcctttggaaaagcggaagggcacggagggttctggagttcgttgctggcacctgcgtggtgtcatgagaacgtggcggggcggtgagtgacgtgagggggcgtgacggccaggccgggagtagttgcccgcgcgggagaacaggggctgcgcagggaaagcggctttgaaaaagagcttcttggcgtcgggcggacgcccaacacatgcttgtcggccaagtacaggataaggttaaagggaactaaccaatattcagcactaactgtgataagcgcctaatatacatccctgcctgtcattattcacattgtggcatgcagtcaaagcgacactctgaggaaaatgtatcgccttaaatacattgattagaaaataagaaagcccgaacatgattaggccgggcgcggtggctcacggccgaaatcccagcaccttgggaggccgaggcaggcggatcgcttgagtccaggagttcaagaccagcctgggcaaaaaagcgagacccttcctctacaaaaaaatacaaaaatcagccgggcgtggtggcgcgcgcctgtaatcccagctacttggggggctgaggtgggatgatcccttgagcccgggaggaggagactgcagtgagccgagaccacgccactgcactccagcctgggcgacagagcgaaacccggtctcaaataaataaataatcctgaacattaagataaaggcagacattcataaacaaaattaagaaagttgagttgaaccaacagctgatttttattttattatttatttgtttatttatttttgagacaggatctcgctctgtcacctaggctggagtgcagtggcgcgatcatggctcactgcagcctcgacctcccctgctcagcctatccttccacccagtctccagagtagctgactacaagcgtgggccaccatgcctgcgttaattttttgtttttgtagagacagggttgcactgtgttgctcaggctggtctcaaactcaggctggtctacactccagcctgggcaacacagtctctgaaaaataaaaataaaaattaatacggctgggcgcggtggctcacgcctgcaatcccagcactttgggaggctgaggcaggtggatcacgaggtcaagagatcgagaccattctggctaacacggtgaaaccccgtctctactaaaaatacaaaaaattagccgggcgtggtggcgggcacctgtagtcctagctactcgggaggctgaggcaggagaatggcgtgaacccatgaggcagagctggcagtgagctgagatcacgccactgcactccagcctgggtgacagtgagactccgtctcaaaataaataaattaataaattaattaatacctagaatattttagaaaacataaagtaagctacattttgagtgtaaagggaaatctcaaatgttgacatagtcactgagcatctacctaaatattgtattttttgcctaggcctgtgctgggtggtatggctgatagaaaaggagtctgtagctaatatcatcattattagcagtttttgtccattatagcagtaagttgaacatttactatgtgtcaggcactatatattaacaccttagcatgtattaactcattcagtcctcacatcagccccctaaataatccagccagaatttctggacatagtgagaaaatatatgaatcttattactgtagaaagtcaaaaactttttatatgaaactgtcatttttggatgatttctggagaggctataccttagactgatgaacaatgtatcctttgatttttatta

SEQ ID NO: 1242732 - DNA, 4001 bp, Homo sapiens
aaatcgatcgggtgtgctggcgggcgcctgtaatcccacctacttaggaggctgaggcagaactgcttgaaccgggaaggcagaggccgcattaagcagagactgtgccactgcactccagcctgagccacagagcgagacactgtctcgaaagaaaaaaaaacactgaatactgatctaactaaaactggacacaggttcaacggcagactacggagttggggaggccccgaaggtggaagtgtttgtgtgtgtgtttgggatgaggggaaggaggtcaggggctactaaaaatgatacctactatacatgggttaaatcaatagacaacagaaatataataccaaattcaaaaggtggaaagaagtttctcctgaggaatattaaataaaatagggatgagggtgatgggactggctaacttttttttttttttttttgagacggagtctcgctctgtcacccaggctggagtgcagtggtgtgatctcggctcactgcaacctccacctcccgagttcaagcgattctcctgctccagcctcctgaggagctgggactacaggcgcgtgccaccatgcccagctaatttttgtgtttttagtacagacggggttttaccatgttgtccaggatggtctcgatctccagaccttgtgatccacccacctcagcctcccaaagtgttgggattacaagcatgagccaccgcgccaggaatggaatggctagttttcaacgtgccttttagaaatacttcactagccggggcgcggtggctcatgcctgtaatcccagcactttgggtggctgaggtgggaggatcacttgagcccacgagttcgagaccagcctgggcaacatagcaagatgccatttctaaaaaaaaaaaaaaaaaaaaaaatttaaaaaattagcgggcgtggcagcctgcacctgcagtcccagctactccagaggctgagacgggaggatcgcttgagcccaggagtctgaggttgcagtgagccaagatcgcatcactgcactccagcctagacaacagcaagaccctgtctttaaataaaacagaacagaacaaagtaaaacaaagagaatagggacgactcctgggttgtgttttgttagtctgtttgtttcttgtttgtctagtctttcaactgaagatgtgaatgggtgaagatactttcaacgagacggtttgtctggggaagaccaagaagggggaacagaaagatttcttcagtaagattcattctcaccccgttcgggttgagatccctaaggaaagaaagttctgagaggagaggatgggtggacgtcacaatgaggcaaaaagcatcaaagggggaactttctatcagaactttctaacaaccaggcggagagcggacagctctatcttggacggggtggtggccagcagctctctcgggccagggctgaaaaaaacctccaaggctcggactgccgccccgacttctgaagcagcggtgtcgttcggggctgaccgacgagcgtccctagcgacaaggggccgtgtccatgtgccggttcccgcgctgcaagagggggcggcggccggagctgcccaacgggaggggagcacagaaccgccacgcgcacacgcctcgggccggagcggccgaggatgaggggcctgagggagcggacgctcgagaacaggagcccccctggaccacctgggccacagggcagacgcccgcgggggcagagcgcgcctcacgtgaggcgtggggcggggcaattcgcttctcgcctcaggcggaatcgctcacccgacggcacgtagtcctcgtcctcctccgacgtagagaagtcttcggagtcgaattcctccatgttgctgccgctcgacgctggtcaaactcacaagaccgcagcagccgcctccaacggcaaagctctagggagagaccatagagccccggcggcggcgacggcagctagggcggcccccgacagcgctttgcacatgcgcagagagtactacgtggttgccctacgacacttccggccgatgcctccgggctggcgtccctgaagccctcgctgggagcccgaacccgcccggacgcggtgcatgctggaacttgtagtcttcggcgctgcctcgccgccttaatataataaacctgcttaaataaaattacatatctatggaaatacaggtgaccttcattaatcattaattcgtaatgccaaattcacttacttgctaaaatgtatttgtaaccctaaaatcaatcatcacggtactgtctggggttcttcccgggcatgcgcagagggtgaaaatttggagttggcggaggtaaggttcccagctgaagtttgaactgggagaagcgccgccttctagtcgcagctcctgtgctgtaaacaaagagtcctttccgcagtctgtttactgacacttttttttctgctttttgtgggtggttttgctttctaaaatggcccccaagcgtagtgcttaagctctgcccagtgttcctaagcgaaagaagaccgtgatgtgccttacggagaaagtccgcgtgttggataagctccaatcaggcatgagttacagtgctgttggccatgagctcaatgttaacgagtcgacaatccggtacatcaagaaaaaggaaaaggaaattcaccgatctgtccgtgaggccgctccggatagtgctgaagtgacctccatcgtgcgtgatgaagctatgacaaagatggaaaagatggaaaagcggctaaatttgtggattcatgagatgtcaatcgattaaaaaaaacatagtggacagcattgtggtgaggctgaaagccaaagatatctgtggtcacgttacccagagtcaaagaaatgctaagcccttctcggcgagtgctggccggctcgcgcgtttcaaaaggcgatacggggtgaaaaatgttaaacttgcaggtgaggcgagctctgcagatcaggaggctgcggaagaattttaaaaatacttgctaagtgttatacaggaaaagggttatgtgaaagagcaggttttcaatgcggatgagactggcttattttacaaggatgttggcaaacgaacctatataatgcaaacggcctccaaagcccctggctttaaatcatgccaggatcatgcacccttgttattgtgcgccaatgccaagagcgactaaagtgcaaactcctaatggtgtaaagaacccaaaatccacaagcacttaacgggaaatacgtgaaccatctgccagtctattggaggtggaacaaaaaagtgtggatgatgtctgattggttccacaactgcttcatcccagaagctgaacactgtctccagggcagaaaccttgccttcaagggttttttgttttgttttgttttgttttttgtttgtttgggtttgttttgttttggtttggttttgaaacggagtctcgctctgtcgcccaggctggagtgcagtggcgcaatctcggctcactgcaagctccgcctcccgggttcacgtcattctcctgcctcagcctcccgagtagctgggactacaggcgtccactaccacgcctggataattttttgtattttcagtagagacggggtttcaccgtgttagccaggatggtcttgatctcctgacctcatgatccgcctgcctcggcctcccaaagtgttgggattacaggcgtgagccaccgcgccgggcaccttcaaggttttgttaattttggataatgctacaatccattgctgcaaagaactcgaaaatgcacacgccaacataggagttctttttatgcccccaaacactaagtctctcatccaacccctcaatcggggcataataaaagcattcaaggcacactacacaagggagctttatatgaaggcctgtgaggctctcaggaccaacaaggaaaccaccatgctggactattggaagtcggtcactacatgcaacgttattgattatgtcagtacagcc

SEQ ID NO: 1242733 - DNA, 4001 bp, Homo sapiens
tggccacaaacaaattttttttaagaattattcaatgtgtataatttttaagcaaacagggccttgctctgttgcacaggctgatctgaaactcctagcctcaagcgatcctcctgcctcagcctctcaaagtgctgggattacagggaagaatttgcaaatttagaacttgtgaataatgagaatctactgcactttcttcctgtttctctcattcggggctggctgaattctgtcttactcatattttatctctagcatctggaaaactgcctggcccacagtaggctctcaataataaatgtatttccaatgagcgaatgagtcaattcagtggaagtgctcagctcacagcagtgatagctagtgtttgtgaagacacaccacgcgcctgccccgtgcacgctgtcctggtcaacaagggaaacagcagagtattgttcttttgcacctgagctcaagagcagactgcctgggttcaaatatgggacatgcttcttattaattaattatataacttcgagcaagatcattggcctctctgagcctcagtttccttggctatcaaatgcagtattcatagttctaccgtggaagttatggtcaggagtctaacttggccctgcacagaaagcctctagcatagggtgaacccttagtaaacagtagcttttattgtgaataattcccaaggcaacccgattttcacacccattttgcagatacaaaaactgaagctgaggatggttcagtgagtttccaaggtcacaaaggaagggctgcctatgggggggaatctatgcccatgttagtaacactgctgttatataaacataaggggtcagcggggcgcagcggctcatgcctataatcccagcactttgggaggccgaggctggagaatggcttgagcctaggagtttgagaccatcctggggaatatagtgaggccctatctctataaaacaaacaaacataagggctcatttttactagttgtaaaagggcccttttactagttgtaaaaaaggctcgttataaggcctctcactgcctaatcagctaggtttgccaaaatgaggaagacagctccagccagtctcctgatcttctctgggatcagggtggggaggaacccccttcctacccataaacccctaagagtcttcgctcacattccacactggtgtctttctgttccttgtccactttcgagttcaaccctttcagaaccagccctactgtggggggtgggggatggttagtttgttatcttgggtttgacagtacaaaggcagaggcatttcctgcttaaaaggcacatgagaaaggaggaggagggcgaactggaggaataggaggaggagggaatcatcagcattctgggttagaacaaacaaatgtcctccgtttttctccaactccttagatcaagggtcctcaaatttggctgccagctggaatctcttgcaaacattttaatacccagatgtccagtcccccacccagaccaatcacatctgagtctctgggggggggcgggggtggaactagggcatcggtatttttttaatgcttcccaagcaacgccaacgggcagacaagtttaagaagtggtgctctggaccttatcagcactcggctgccaccctggagtggctctgggcgacagtggctgctttccgcttcgaggacgcccggcttggggattcgggcatgctctgggaggcgagggctggggaggatgcgagcgtgccagcgacctggtgctctgccttgctctaggcccagctccgaggctgcgggtctctgggtcccccccacggctacaacacgtgctgccgccccgactcctccggttatctctgcagaccgcaagcggtgcccagcggccgccccgctgtccaccccgacctcagaggctccagggagacgcccggggctcaggaatcctaccttggctgccggcgctgccctccagtccccggaatcctgggactcaggttcgagctgtcgctgtcgctgtcgctgcgcctgtgaagcgcccactagagcgcaggcgccacctagtgggcgcggggcggctgcgcagggaccgcgctggcaggcgggagcgcagtccagggcggaaatgcagccagggcttcttcccacgtgggcggttttccagcgcgccgccagccctgtggccagatccggcctggggcgggaccaccttcacccgctgcggggcactgggatctaaacttggtgaactttctcttggggcacggagggacccctcggcctggtatccatcctccggttttccgggctgagcacaaggatctttcccttcatccagcagctttcagtgcaccccacctttggcactgcttctcttttaaatgtgctgggaccatccgaggctggggttctctccaacccagggaggcccttcgcctatcagcaaccattttttcctgccaccccctaaaccgtccctgaatgagagaaacagcctgctctgctggcttgctctacagaggccaggactggtggaggatgggtgtgtgccagcgacctcgtgctctgctctgctggaaggccttctctgagcagtggaaggggaaggggcggcttaagggaattgtgttttttgttttttgttttgttttgttttgtttttgtagagacaaggtctctctatgttgccctggtggctcttgaactcctggtctcaagcgatcctctcacctgcagcctcccaaagcactgggattaccggagtaaactatggctcccagctgcctggtattctttcaatgaagacatgccaaaacgcttacaaatatggtggacatttaatggtttatatttcatttatgtcttcatttaacaacgattaactgagcacctactatgtgccacttttctacaatcaagggatacaatgaagaacaaaacacaaaaatctctgcttttgttgaattcacatttaatgtaacacatgaatacttttaacacacccaacgatctaatgcaaagcgattgagctcgttgtgagataagtagaggatttattaaaaatatctatatttagggccaggcaccgtagctcacgcctgtaatcccagcactttggaaggctgaggcaagaggatcgcttgaggtcaggagtttgagaccagcctagccaacatggcaaaacccagtctctacaaaaaatacaaaaattagccgggcgtggtggcaggagcctgtaatcccaactactccaaggctgaggtgggagaatcccttgaacccggaaggaggaggttgcagtgagctgagatcgcaccactgcactccagcctgggtgacagagtgagactctgcctcaaaatcaatcaatcaatcaatcaatcaatctatgtttagggcgccaagggcagacattcctggtgatggatataagcattacagagttctatgggaacgtcttcacgttttcttgtaatcctggcagtttatctctgtggcaacatttggagataatgccttcagtggaaatttcaggtgatttgtgaaagttaggcctgcaatcctcctttccccctccccccggcccccactctgctcccccaggacgctctgtcattgttctagcccagtgtgagtttgtgtgtgagtgtgtgcctatttaacctttggactctctgtactggtgtaatctggtcaaagtgaatatcaagggcagaggaggacaaggaggagcaggaggagaaggaggatgaggagcaggaggaggagcaggaggaggaggagcaggagaaaggaggagaagcaggagcaggaggaagaggagcaggagaagaaggagcagaaggaggaggagcaggaggaggagaaggaggaggagcaggtggaggaggaggagcaggaggaggagaagcaggaggagcagaaggagaggaggagcaggaagaggaggagaaagagcaggaggaagaagaggaggagaagcaggaggaggagga

SEQ ID NO: 1242734 - DNA, 4001 bp, Homo sapiens
cagctaatttttgtatttttagaagagacggggtttcaccatgttggccaggctggtctcaaactcctgacctcaggtgatcaaccaacctcggcctcccaaagtgttggggttacaggcgtgagccaccacatccggcctcccaaagtgctggaattacagccgtgagccaccgcgcccggcctcccagagtgctggggttacaggcctgagccaccacacccggcctggccagcatattttttgtggcgggaggtagatgttatctttcatcttctctcagggcagaaaatctctacacatttccttcatgatgatgacacggtggtactatagcttttcacacttctaactaaaagaattttttttgagacggagtctcgctctgtcgcccaggctggagtgaagtggcgcgatctcggctcactgcaagctccgcctcccgggttcacgccattctcctgcctcagcctcccgagtagctgggactacaggcacccgccaccacgcctggctaatatttttgtatttctagtagagatggggtttcactgtgttagccaggatggtctcgatctcctgaccttgcgatccgccggcctcggcctcccaaagtgctgggattacaggcgtgagccaccgcgcccagcccttcaaaaagtatttttaaaagcctgcccatcacaccagcccaacgatgtttcagcaaacataggacttcattttgccagattcttcctgttctttggtatccctgagcacacagccggctagccccagatgtagaaggtaagaattagggcgacccattgagcacagaaacgcttgtgctggctcctgctcaaacctctgcttccccacatggagaatggacgcaaagagctgctgtgaccagggcctggcactcagggagcgctttctgtctgagtccttctgatttgcagtgatgctgtttggggcagggggtgcaactgtcactttttctggtgccctctgacccgacattccaagtcccgaaaggccgaacaggcatcgcacagtcccccctaccgagctggcgggaaagggcgcctgacgctgaggagtgccaggggcgggggaaagggtcctgggtcggtggtcgggggtccaggccctgggcaaggggtcctgggtcgggagtctaggtcccgggtccatggttgggggtcagaggtcgaggccccggggaaggcataccgggttgagatttggggatggaggccccggggaaggggtcccgaatcgggggtcggggatcgaggcctggggggaggggtcccgggtcgagggtcgaggcccggggtaaaggatctcgggttgggggtcgggggcctgggaagggtcccggtcggtggtcgggggtcgaggcccgggagaaggggtcccgggtcggtggtagaggccctggggaaggggttccgggtcggggatcgagggtcgaggcccgggaaaaggggtcccgggttggtggtctaggccctggggaaggggttccgggtcgggtatcgggggacgaggctcgggaaaaggggtcccaggtcggtggtcgaggccctggggatggggtccgggtcggggatcgggggacgacgaccgggaaaaggggtcccaggtcggtggtcgaggccctggggatggggtcccgggggatcgacggtcgaggcccgagctctcctgagtcctgcccgcggccccaggtgggcggagcccacgccagtgggagaagcggccccgccccgcgcgcgagtccccggaggacggccgcgacctcttaccgtccatggccacaatgacaggagcagcactcggagagggagaagggacgccaactccgggcggtgtcaggtcccggcggcgatcgaaccgaccaagctgcacccggcggggacttccggggtcgccgccccacttccggtcgcacgggatgctctcgcgagaggatggtggccggtcccgccagaggggcggggcgcggctgcgcggcgcgcggtcgccatggtgacgcacgccgctggcgcgaggaccttttgtgagtcgctcccggctccgcggccgcggaggtgtggggacccgggcttgcgtcggagggggcggtgggctcacccatgggcctttccaaaagcaaagagaaacccaggaaaggtaaaggaggcgcaggcgctgggctccccgcgtctccgcccctgggcgcgggcccagggcggggctgggctgggcggggcggtgtgagcgcaggcgccaggctcggcccggtgcgaaccgttcctgccgccgagtccgccacggacggcgcgtttcccgcctgaggcggttacggaaacgcggagactcgagacttgaagccagcttattctggacccacgcaggcgactgaagacgatgggacccactgccctgcattcggtaagtcccgggtctaacggatgatccatatatttcaggtgaggagcaaaagaagggatccacctattcagttccaaaatctaaggagaagttgatggagaagcattcccaggaagccaggcaggcagacagggagtcggagaagcctgtggacagcctccacccgggggccgggacagccaagcacccgccgccggcagcttcgctggaaggtaggagacggcgggagggagcgaagcgaggtcagtggcttggaggatctggggctggggtgaggagcctactgtaagaccctaccggatggacactagtagcaggcacgcgccgtaaagatgaaactggtttgttttgggaactttatgtaggaggtaaatatccagaaatcttagttgaaaacataagtttaatgaaaatgtaggtcagttcccgagtgataagtgcgtaccaggtggtcgaggggctggggcagtgtgcgtgtgtctcacctgaggttctcctcgagggctgggtatcttggtgccactgagaatccctgagcctccgcacactggaacagagcattgggaggccgtcccaggctggactgtagctctccgagggctgtggggataagtacattgcggagggtgaccgaggagtagaacctgggtgcgacaaaggtgtcttttataacagcctagtgtggccagacctttgggtgtgtgtggggaagatgaggccccaaaagtaggaagaagctagaatacaaagttttccatcagttttaccacgtggagctggaagcgttaaatattttaaacaacggaggtgctgcctggggcggtagttcacacctgtcctcccagttatttggccgaggcaggaggatcttttgagcccaggagttcaagaccagcttgggcaacatagtgagaccctgtctctacaaaaaataaatatttaaaaataaaaaacaagggcggcatgatgaggtctgtgcctaccaacaggggaagccagttcgcaggggaggtggcccggtcagagacccattgctgtggcccagtgggagccagcaaggccttgcagtaggaattgcagaagggtcaggcagggagaacccgcagagcctgccgtccgaggagattgggggcctgtgccaggaggaggtgttttaagtttcatcacaagaatgaaccactcggctgggcgcagtggctcacgcctgtaatcccagcactttgggaggccgaggcgtgtggatcacttaaggtcaggagttcaagaccagcctggccaacgtggtgaaaccctgtctctactaaaaatacaaaaattagctgggcgtggtggcatgtgcctgtaatcccagctactcaggaggctgaggcaggagaattgctcgaaccttgaaccgggacccgggaggcagaagtagtggtgagcgagatcgcaccactgcactccagcctgggctacagagtgagactctgtctcagaaaaaaaaaaaaataataaggagagaaccactcgggtcagacaagaaagaatgtcagggggatgactggcctgctaggcagaggagctgggcctggact

SEQ ID NO: 1242735 - DNA, 4001 bp, Homo sapiens
ctccccactccgactcccaacaaacccacactctaactgcacccattcccatttcccaaccaataccccaattatctgcgccccagttccccaatcatcccaccccatctctcacaccattgcatttaaccatcccatccttcacacatcacatctcttgctctcgctttctgccaacctgcagcatctcatgcctggagatcttcccatcgcgatccaggtcatagagctgaaatgcatctggggagagggtgggagggggaaaggaaggtaggtcttccctggctctcttccagcagccaccttccttccccccaccttggaggaggggggaggttgtcaatgccctcaggaagggagtgggagatccctggagcctgtccctggtgtgggtacatctgcattctcacttgtgcaggtcctcacaaactcacagtgaagtttgttccttctgctgttgagaggttcaggtttcttggggtcttgggtttctgtgtcctcatcttctacagggcgaaaatgagccaagaccctgacaaagcctgggaaatccactcgctggctcctggggagacgggacagaatggaaagaggtggtggtcaccttggccatcactttgcctccgtctctaacctcccctcccacccactcacacaccggttttcccgccttcacctccccacgcccagcaagcctcacccatcggggaagaagctttctataattcggtctcccagggggttcacggcgagcgcccctatctgctggagatccatgcggctgcaaagccaaatttcaaagagggtaaggcagagatgccagacggagggtcaaagagggacatggagtcagagagacagaggccagaagttatgaggccggctccccctcacctcaggtagcccttcttattcctgtccagtgcccggaaccggtggtgcaggcggagcaggctggcttgggagactgcgggaaggagagtggggtgggggtgtgtgactctgcagggccagctccagaaacccgccccaacaggccaggaagatgggccagaacagcgggggctggctggaaggggcgatcatcccggggaatcaggggttgagctggccggggcggagggagagtgacacgaccccgcgaagatccaggttcaagacccgggcggctcgcaacctcccgaaaaccaaagaaccaaagccatcccttccaaccgccgtcagctctgccttcagcttcgagccgggctggaggacacctgggtgcctggattcctctggactccgaccccgtgaacccggatcctccccagacttggaggctgggacccctaggttaacccgcccctaacccagcgatcccaggcacaggggccttggtcttccagctccggggagccccggaccccagacttgtaagttcgtccatccttcaacccaaccccttccctagccccagacgcctgggttcgccccgtcccctccgcagccgccgacgcgggcgcactcacagccggtctctcgccgaatactgtccccgtcgggaatgaccgcggcgtgggagctgcgcgaccccatggccgagctggaggcggaagggccggagcagccacccggacccacgcgttctctcctcccgccggagaggcgtggccgccccagtggccccagggggacgaaggccacaagcctggcgcgcggccaagctccagaaccccggcgtgcctctcctcccacccgcgacccgggcgaatggaaaacaatgtgcagggtggcgggtcagagggaggctgcgaacaacgggctgtttcagctccgagattttgcgatccgcacgggagaggctggtcgagtcccaggccccgcgtttccacgcctcccccggggccggttcccacggtgcgccctgacacctgagccacctcctccttcgcgggccccgggcgctcccaaccccagggcgctccccggcgtcgacgctgaggaagcctgggagacctgacctcctctgtagagaccacgccctgctggaaggcgggtggcctatggggagggaatcctggggggaggggggaagaggcatcgaagaactcccaaagacggggaagtggggaggggcggcgagatgaagggtgtgcgttaggttaagtggaaagagcactggtttgggagtccttgttggaatcccagccgtgcccgtgactctgggaaagtcagtaaatcttggtttcatcccttttgttcggttcacattgccttattgttgtttaattgagccaatgcttaaaattcaggagatttaacccaaaatccacattcttggcttttcctgagaaatcagaagttctatcaccaccaggcccagagctgtcttctggccacagtccctccaagcccaattcactcccttaggtacctactgatcccgtagagctccagactgggaatgacttagtcctctgaacagccctccagagccatgggactccttggcccaagagagggttacagacatcactgggactaggcttaaagcaagaatgacaacaagggctcttgtttaccacgctttgctaagcactttacgtgcatccgttcacacattccttgtaggccctgctgggctgctttcttctaattttacgtggtggaggctgccgggggcaagttgtgaactaattatgtaaagcgtgcattctcagtgcggtctctatctcaccccaacggggcaaaaaataaaacatattttttatgtacaaagcacagcatacatacagcacataaatagatatacagtatagctgtgatattgaaatttcagggcagacgtggaggctcatgcctgtaatcccagcactttgggaggtagaggcaggaggattgcttgagcccaggagctcaagaccagcctaggcaacatagtgagaccccatctctacaaaagaatacaaaaaaaaaaaattaaccaggtgtcgtggcacatgcctgtagtctcagctacttgggagtctgagacaggaggatcacttgagcccaggaggttgaggctgcagggagccatgatcacgccattacactccagcctgggtgacagagtgagaccctgtcttgaaaagaaaagaggccgggcgcggtggcttatgcctgtaatcccagcactttgggaggtcgagacgggcggatcacctgaggtcaggagtttgagaccagactgaccaacatggagaaacccagtctctactaaaaatacaaaattagctgggcgtggtggtgcatgcctgtaattccagctactcgggaggctgaggcaggagaatcgcttgaacccgggaggtggagattgaggtgagcctagatcgcgccattgcacaccatcttgggcaaaaagatcgaaacttggtctcaaaaaaaaaaaaagaaagaaaataaaatttcatggggtaggggtgagggtggggaaattaaaaagactaggggaggcgttgataatgaaaaaaaaacaggtcgagaaactcatttgtcaagggacaaacactagaagtgtccacttttgaaagtatctttaaaccgtttcccccatcataattgcacatacatacacaaatttcccaggggggaaaacatgcaagcagttcattgcaagggctcaagttcatatccaccctggagagagagaagctgaagaaacagtctatcctccagccccaggcagaggcctgcatcagataagtcttgaaaatattgatctaagaagtgcttgcttctttcagatacccccaaggattaagcaactggcataaggaatgcttgattctctttcagactccccccaaagactaagcatgcgggaaaccacactcctccctaatgaagcccagcaatcactgcaacccacagctgtgagtcaggctgtgcatgtagtttgggttcagttctgaacccaggaggagatgagagccctaagaagctgtgataagcaccgcaggccagcttgggatgct

SEQ ID NO: 1242736 - DNA, 4001 bp, Homo sapiens
ttgaaatgaagtcttgctctgttgtccaggctggagtgcagtggcacgatctcagctcactgcaacctcgactcctcaggttcaagcgcttctcctgcctcagcctcccgagtgacctggctaattttttgtatttttagtacagacatggttttgccatgttggccaggcaggtctcgaactcctgacctcaagtgacctcagtctcctaatagtgctgtgattacacccatgagccactgtgcccagccaggggtctttttaaaatttaacctgagagactgtttcaggccatgacaagaagtggggatctaacatgcctcatcatacctctccagcattaacaccaacacagaccttaagtctgataagaaacattttacaacctattctctctgaagcctgctatctgaaggcttcctctcagttgcagtgagccgagatcgcaccactgcactccagcctgggcgacagacccgtacttttttcttttcttttttcttttttgagatggagttttgctcttgttgcccaggctagagtgcaatggcaggatctcggctcactgcagcctcccggtttcaagcgattctcctgcctcagcctcctgagtagctgggattacaggtgcctgccaccatgcccagctaatttttttggtatttttagtacagacagggtttcgccatgttggccgggctggtcttgaactcctggcctcaggtgatccacctgcctcagcttcccaaagtgctgggattacaggcgcgagccatcgcgcctggctagatgtatttcttaaatgtatttgattgaagtctcatgtctccctaaagtgtataaaaccaagctgcaccccgaccaccttagacacatgttctcaggacctcctgagggctgtgtcaccggccatggtcactcatatttggctcagaataaatctcttcaaatatgtcacagagtctgactcttttcatcgacaatattacatttattttacacatagaaaagtatttcaattccaattagaagtttcatacttgtccaaggccatgcaagatagacgtatcttctaccatagctgatatgttggcaccataacttaatcatattgcacatgtgcgtggtgttccacatttttaaagcccttttagctgcaattatgatactgatcggttagatattttagacagtgatgagacatttcttcatttttcagaataaataaactaaactttaattgactggctcatccggtataaatagccttttctggatcagaacccaggttttggggatcccagggctgagaattttcaatgatcacactgtccctctcctgagctagagaaaacctacagctccttgcacctcctgtcttccactccccagcagaaaacagaggagaagctgcaggaagtacagaaatttgagctccaaagccaggatctgaacgagtcagttggcaccaggggaccatctacaaaatatacatcagaacagcctgatctgctctctgggctcttttggacccatttagggatagagctagtggggcttgggggctgctggtaagcagcttgtgttttattttacccagaaaattccccaggtgatctgatttatcccctctgcgcaaaccgccttcgccactgtaatctctagcttagctgccagaggttatctgatactcttgctccagcagctctgggtaatggctctgcattggagtcgtacacagaaattctcttcttaccttgtggcttgggcttccctgctgcttttgagaggctcactgctagccgggccatgcgcttttctcctctgactcaccaactcccctcttggcttcctcctcctacttgcttttgcataaccgtccctactcagagcacatttcactgtccctcccttctgccaaaaacaaaaaaggacccaccttgcaagacgggcttgagaaagcactcgctcccaggaagctgtgaaagtaacagctttaacactgctgagactcaaggggtggggagactgcttgaggtgggctgggagaagcaaatgaggaagcattttcccccagactggaggcatcctggcatgttgactactgaaaggcaactgtgaaggtcaactccctatgggcagagtggggaggtggggaaaaagagaaagagagagagagagacccagggagctagtagatgaggctgatagggaaatttcatgacacttacaagccgaaaggctacaaaatctcaaacctgatttttagaccttgttcttatctccaaggagaaaatgtgaaagttatttcttgcattacacctgcctgctcactccaccctgggtctagggaggtaacatttctcagcctctgtgttgtattcaatatcttcacccttgctacaagaggtaataaatattttctgggaggacatagatgtactggcttggtggtacaggagaaaaaaaagtcccctttaagaaaaaaagaaacaaattatcattaaagattacaacctctcccttgctgtgtgcccttgggcaaatcacttacctactccgtgctactttacacggttgtcatgagtctgaaacaatggatgcccgtgaataaacgtaaattgtggtggagaatggaagcctcagactttcaagtccaagatcttgccgggcaagtcataccacctctttgagccctagaatatcatcggtgttaaataagggtaacaatatctattttacagtattgttgtgaatgttaggattaatgcgtatgaagctcctaacacaataatatgacaatataagagttaaaaagtggttgaataataataccttcccaccgccacccacccccgcaactcagctgccacttccttttccagaccttggaagagagagagagcaggcagggagttgtgtgagctttgggatgatctttgccgatttccatcagctaagtccgctaagcacaaatgacaagaacctgtggtgcttgccttgacttgatttcaattgtgtggctcttcctcccttcctgtttctctctggcagagagaagagaaatttctcttcctccagtgaaggactttgggcagaggtgtaactggaagcactagaactgggcagtcggtagttttgcttttatgcacaaagagatgattcaggtgctggcacgacacagcgagatggcacaaggcttcatcatgctactcagaatagtatgtaataaatgaactgtttatttctgtaattttcccatttaatattttcaaatcgtggttgatgatgagtagttaaaactgggaaacaaaaccgtggataaagaggggactcctgtagttttattccagccctttctaacattcttttcgtgtttttccagcgccttcccaaatatagtgaggtcactcaaatacaccataaccccaagtaattcagatcacctgccatctttcccgtgctaggaattcatgctggcagaatgccaagcagctgaagaaaggcatcctctggtcactagtatacggtggtgaccagcatgttcagatactggacttccaagggtctaccacattccacagcactgggaagaaatttgaatgctggtgtctgatatccaggccttcttgtggaagtcctgcagcccacgtctctaaggcagcactgtccaataacagtctctgtgatgatggaaatgttccatatctgcactatacagtagccactgtccacctgaaacgtgctagtgcaaccatattggatcgtgcagtcaagtaagagatctaatctttttctttttgagtctccaaaatctgataacagatatagacctctgtagaaaaatgtacaattgctcatatacaaacacaaaatcatgtgcaatgccaaggaatcccaagtttaaaatccgtacaaaaggctgtgtgtacttgaagtgatttagacaattgtctcctggggaccactattcagcggagtcgctgatctcatctttgccc

SEQ ID NO: 1242737 - DNA, 4001 bp, Homo sapiens
tatttttagtacagacatggttttgccatgttggccaggcaggtctcgaactcctgacctcaagtgacctcagtctcctaatagtgctgtgattacacccatgagccactgtgcccagccaggggtctttttaaaatttaacctgagagactgtttcaggccatgacaagaagtggggatctaacatgcctcatcatacctctccagcattaacaccaacacagaccttaagtctgataagaaacattttacaacctattctctctgaagcctgctatctgaaggcttcctctcagttgcagtgagccgagatcgcaccactgcactccagcctgggcgacagacccgtacttttttcttttcttttttcttttttgagatggagttttgctcttgttgcccaggctagagtgcaatggcaggatctcggctcactgcagcctcccggtttcaagcgattctcctgcctcagcctcctgagtagctgggattacaggtgcctgccaccatgcccagctaatttttttggtatttttagtacagacagggtttcgccatgttggccgggctggtcttgaactcctggcctcaggtgatccacctgcctcagcttcccaaagtgctgggattacaggcgcgagccatcgcgcctggctagatgtatttcttaaatgtatttgattgaagtctcatgtctccctaaagtgtataaaaccaagctgcaccccgaccaccttagacacatgttctcaggacctcctgagggctgtgtcaccggccatggtcactcatatttggctcagaataaatctcttcaaatatgtcacagagtctgactcttttcatcgacaatattacatttattttacacatagaaaagtatttcaattccaattagaagtttcatacttgtccaaggccatgcaagatagacgtatcttctaccatagctgatatgttggcaccataacttaatcatattgcacatgtgcgtggtgttccacatttttaaagcccttttagctgcaattatgatactgatcggttagatattttagacagtgatgagacatttcttcatttttcagaataaataaactaaactttaattgactggctcatccggtataaatagccttttctggatcagaacccaggttttggggatcccagggctgagaattttcaatgatcacactgtccctctcctgagctagagaaaacctacagctccttgcacctcctgtcttccactccccagcagaaaacagaggagaagctgcaggaagtacagaaatttgagctccaaagccaggatctgaacgagtcagttggcaccaggggaccatctacaaaatatacatcagaacagcctgatctgctctctgggctcttttggacccatttagggatagagctagtggggcttgggggctgctggtaagcagcttgtgttttattttacccagaaaattccccaggtgatctgatttatcccctctgcgcaaaccgccttcgccactgtaatctctagcttagctgccagaggttatctgatactcttgctccagcagctctgggtaatggctctgcattggagtcgtacacagaaattctcttcttaccttgtggcttgggcttccctgctgcttttgagaggctcactgctagccgggccatgcgcttttctcctctgactcaccaactcccctcttggcttcctcctcctacttgcttttgcataaccgtccctactcagagcacatttcactgtccctcccttctgccaaaaacaaaaaaggacccaccttgcaagacgggcttgagaaagcactcgctcccaggaagctgtgaaagtaacagctttaacactgctgagactcaaggggtggggagactgcttgaggtgggctgggagaagcaaatgaggaagcattttcccccagactggaggcatcctggcatgttgactactgaaaggcaactgtgaaggtcaactccctatgggcagagtggggaggtggggaaaaagagaaagagagagagagagacccagggagctagtagatgaggctgatagggaaatttcatgacacttacaagccgaaaggctacaaaatctcaaacctgatttttagaccttgttcttatctccaaggagaaaatgtgaaagttatttcttgcattacacctgcctgctcactccaccctgggtctagggaggtaacatttctcagcctctgtgttgtattcaatatcttcacccttgctacaagaggtaataaatattttctgggaggacatagatgtactggcttggtggtacaggagaaaaaaaagtcccctttaagaaaaaaagaaacaaattatcattaaagattacaacctctcccttgctgtgtgcccttgggcaaatcacttacctactccgtgctactttacacggttgtcatgagtctgaaacaatggatgcccgtgaataaacgtaaattgtggtggagaatggaagcctcagactttcaagtccaagatcttgccgggcaagtcataccacctctttgagccctagaatatcatcggtgttaaataagggtaacaatatctattttacagtattgttgtgaatgttaggattaatgcgtatgaagctcctaacacaataatatgacaatataagagttaaaaagtggttgaataataataccttcccaccgccacccacccccgcaactcagctgccacttccttttccagaccttggaagagagagagagcaggcagggagttgtgtgagctttgggatgatctttgccgatttccatcagctaagtccgctaagcacaaatgacaagaacctgtggtgcttgccttgacttgatttcaattgtgtggctcttcctcccttcctgtttctctctggcagagagaagagaaatttctcttcctccagtgaaggactttgggcagaggtgtaactggaagcactagaactgggcagtcggtagttttgcttttatgcacaaagagatgattcaggtgctggcacgacacagcgagatggcacaaggcttcatcatgctactcagaatagtatgtaataaatgaactgtttatttctgtaattttcccatttaatattttcaaatcgtggttgatgatgagtagttaaaactgggaaacaaaaccgtggataaagaggggactcctgtagttttattccagccctttctaacattcttttcgtgtttttccagcgccttcccaaatatagtgaggtcactcaaatacaccataaccccaagtaattcagatcacctgccatctttcccgtgctaggaattcatgctggcagaatgccaagcagctgaagaaaggcatcctctggtcactagtatacggtggtgaccagcatgttcagatactggacttccaagggtctaccacattccacagcactgggaagaaatttgaatgctggtgtctgatatccaggccttcttgtggaagtcctgcagcccacgtctctaaggcagcactgtccaataacagtctctgtgatgatggaaatgttccatatctgcactatacagtagccactgtccacctgaaacgtgctagtgcaaccatattggatcgtgcagtcaagtaagagatctaatctttttctttttgagtctccaaaatctgataacagatatagacctctgtagaaaaatgtacaattgctcatatacaaacacaaaatcatgtgcaatgccaaggaatcccaagtttaaaatccgtacaaaaggctgtgtgtacttgaagtgatttagacaattgtctcctggggaccactattcagcggagtcgctgatctcatctttgcccttggaagtttaccatctttactgtctggggacccacctgagtggtgaagagacctggggtcagctactgacctagactctgattttctcaggggtcaaaaggatctttctgctggttatactacctactcc

SEQ ID NO: 1242738 - DNA, 4001 bp, Homo sapiens
cactgggagctttctgataaggagacttacattcagcacagtggacaattggccaagggtgcaaagttagggagaaccagtcagccaggccctgtgatatgcactttcatcttcatgattgaatgttatcctcccaagtcccttggaggtagaaataaccatccctatctgttttaattgaagcagtggggctcagagacattaatacccagtaagaaagaggcagggcaggggcttaagtccaagagccagactcccagtgcagggccctgtggtgggtcacactcctaagcctttgtccagtgaactcttccatcctggaaggactgtccccttcccctctaaattcttccgttttttgattcttttctgggggcacatatttattacatgtttaatttttagaaaaataatacaaacaggtcacacgaaattaaaaaagtagagatgagggcatcgcagacttggcctcccaaagtgttgggattacaggcgtgagccatagcgcctggccaaaatgcaattcttgactgccttgcctctgtgtaaaaggagagagaaaggaagtcaacatttgcatttgctagacattggacacagtggcttacgcccgtaatcccagcactttgggaggcctaggtgggtggtcaccagacgccaggagttcaagaccagcctggccaacaaggcaaaacctatctctactaaaaatacaaaaattaggccaggtctggtggcaggtgcctgtaatctcagctacttggaggctgaggcaggagagtagcttgaacccaggagacacaggttacagtggccgagattgtgccattgcactctagcctgggcaacaggagcaaaactccatatcaaaaaaaaaaaaaaaaaaaaaaaaattaggccaggtgcggtgactcatgcctgtaatcccagtgttttgggaggccaagatgggtagatcacctgaggtcaggagttcaagaccagcctggccaacatggtgaaaccccatcgctaaaattagctgggcagagtggctcatgcctataatcccagctactcgggaggctgaggcaggagaatcacttgaacccaggaggtggagattacagtgagccgagatggcacaattgcactccaggctctgtgacagagtgagaccccatctgaaaaaacaaaaacaaaaacaaaaatttgggcccagtgccatggctcacgcctgtgatcccagcactttgggagcctcagcggggcggatcacctgaggtcaggaattggacagcctggccaacatggtgaaacaccgtctctagtaaaaatacaaaaattagctgggtgtggtggcgggcgtctgtaatcccacctactccagaggctgaggcaggaaatcacctgagcccaggagacaggttgcagtgagccaagatcaggccactgcacttcagcctgggtgacagagcgagactccgtctcgaaacaaacaaacaaacaaacaaacaaaaaaacatttcctaggcacctgtactgtcctggggcccagagggcctttcctaaagcctaacatcaaggccctagaggcagtgaggcacgactccacttcccctgagtctggttgcaaattaactcaccaagctattttttctcaagaatttcatggagagcttttgaaagccacaccctttgagacccaagtatggaataagaacccgcaccccgacccctgccctgcgcagtgaggattcccgcgtgcagccgaagccccagcaagacacttccaaaccagcgctagcaggggagatgaactttccacgttgctgatggaaaagccacccccagctcttcccgccaacccaggtctctggtgcaggacagaggagcgtcacagctgggccactggcccggcccccagcccaaccgagtgtggggacacctccggtggagaatgaagaaccaaagtacctcaaagcttggcgtgtctgccagagctggagcagcagccagagggacgcctctccccctgggctcagcaaaagctcccagacgtcgtctcttccaagttccaccgcacagccagctctttctcttcactgggaggttccgcaggggctgacttgctccttaaggtcccaagactattaagggacacccagtgaggctgggaaaggggctctaagaggcatggacgaagagtcgggggtaaccaagccactggaagctcctggagactcgaggcagagcgaatctgggaacagggcaggagtcccagaatgggatgttgaggatgggggtgtcctggggctaccacagggaaggacccggcgcagagctccctccggagcccggcactgcggcccgcgccctctactccccgcgcgccggccaacaaccctcggcgctgccccgcaatcttcagcgctgcctggtgaggagctttcagacgtggctgcggtcccagggtggccggcgggagccagggaaatgggagaaggaaggaaggagcaggttttgcccccagctccctctccccacccccgaccgaggggccatgtctcggggaggggcgctggccgagggcagagcaggagggcccaggtgggctggggctctaagaggcgcaccttttagccggggatgtcaaaggacgctggcagagtcacttctcatctaactgaccacaaatgaacgttgtaacccttcctcacccccccaatcgccagagaacctgggagctcctgggaggacaaaggccctagtgaaggaagtcgaatcttaatcttggccctcctcgctcttgggggcatccttgcagccaagggacttggaatccaaacccttcccaaggccccaacctcagccctaagccaagacccaggcaccttgatgacacaggaatccgtgctgcctcccggtgcagtgtcccagctgggaggagttgaaagaccaggtggccttaggagctgtgccctccctgccctagcctccgcccagaggcgcaggcttgataacatgttccaatgaatacaggatatgtttcagtaaataaaagctccccacccaccccttacaaataacagctcagcctggcctggtggcatatgactgtaatcccggcactttgggaggcaaggcaggcagatcacttgaggtcaggagttcaagaccagcctggtcaacgtggcaaaaccccatctctactgaaaatacaaaatttagccgcgcatggtagcacatgcctgtaatcccagctactaggtaggctgagacaggagaatagcttgaaccccggaggtggaggctgcagtgagcggagatggggccattgcactccagactgggtgacaaagcgagactccatctcaaaaacaaagaaacaaacgggcagagtccagtaatctgaaaaggatagagcattgggaggtcctttaatccatggtggtatctgaaacgaggagtccctgctgctgggagtagaaattagcagtctttcctggctgtggtttggcaatgaattaagatccttaacaatggtcataagttttctgaatgtatcttaaggaaataaaccagcaacaatgatttctacacaaggtttataaaagtgttgtttgtgatactaaaaaggttacatacaacaaaaaagattagaaagatgtgtgccagaatgccaaccataataacttctgtgatcaaactgctgtgatcccagcactttgggtggccaaagcggatggatcacttgaggtcaggagttcgagaccagcctgaccaccagggtgaagccctgtctctactaaaaacacaaaaattagccgggcatggtggtgggcacccgtaatcccagctactcgggagggtaaggcaggagaatcacttgaacctgggaggtagaggctgcaatgagctgagatcatgctgctgcactccagcctgggtaacagagtgagactctgtctcaaaaaaaaaaaaaaaaaagaaaaagaaaaagaaaagaaaaaccacctact

SEQ ID NO: 1242739 - DNA, 4001 bp, Homo sapiens
tacccagaacaatcttgttcatgtatttctggacccatttccccgcccaagacactagaagcagaatggtgtctgtctcattaaagacagtaggtatagagcactgaggttaagagtgtgaatcccacttgaccatttactgagcgatcttgtgcaagttacttccttctgtgcctgcttggttaaaaaaaaatctggaaggtcaggtgcggtggctcacacctgtaatcccagcactttgcgaggctgaggagggcggatcacgaggtcaggagtttgagaccagcctgaccaacatagtgaaaccccatctttactaaaaatacaaaaattagccgggcgtggtggcgggtgcctgtaatcccagctactcaggaatttgaggcaggagaatcgcttgaacctgggatgcggagaggttgcagtgagccgagattatgtcactttcactgcactccagcctcggtgacagagcgagactccgtatcaaaaaaaaaaaaaaaaatctgtaaagtgggggaaacaatataacccaactcatgggcttgattgaaagagtgagtgagtggatatttgtaaagcagaacaaagtctggcgcatagtgcacttatgagtatttgcttagcaatcttccttcctgggccacacttatattctatgaatccaagggaaagtctttgaatgaggaaaacccaaggacaatggctctaccagattcaggtgccccagtgccccagcaacagaatgtggcaggcacagacagggtccccacaagggcaaacaaaacagaagacgctggaaagtcatggctagaggcctggcttgtgttttttctgagatggagtctcgctgttgtccagactggagtgaagtaccgcaatctcagctcactgcaacctccgcctcctgggttcaagtgattcttctgcctcagcctcccaagtagctgggattacaggcactcaccaccatgcccagcttatttttgtatttttagtagagatggggtttcaccatgttggccaggctggtcttgaactcctgacctcaggtgatccacctgcctcggcctcccaaagtgctgggattacaggcgtgaaccactgcgactggccttagaagcttggcttctgaagccggattgggttcaaatcctgtctctactaccagtgaggggtgtgacttagagcaagtcactctctggctctctatactccagttgactctgtttgtagaacaaagccagaaaagttccggcctctcaggctggagaggagcccagccccagctcccggagcagcatagcaccctcagaggccctggtacttggcctactcgcttgtgggtttaagtcagccaactcctttctgctcttcaggcctcagttttcccatcctcaaaaatgggaaacttgactgccttgcctctgtgaaaaagggaggagaaaggaaagtcaacatttgctaggcacctgtcctgaggcccagagggcctgtcctgaagcccaagatgaagccgtcagaagcagtgacgcaggactccaattcccctgggtctggttccaaatcaacccgccaagctaccgtctctcaataattctatggaaaaagcccttggagagcttttgaaagtcatgtcctttgaaactcaagtatcgagacaaaaggggttctcccctcgcagtgaggattctcctgcgcagccgaagccccagcaagacacttccaaaccggcgccaacagcggcgatgccctttccacgttgctgatggaaaagccactcccagctcttcccgccaccccaggtccccggtgcaggacagaggagcgtccccagctgtgccaccagcccggcccccagccgacccgagtgtggggacatcccccgcggagaatgaagaaccaacgtaccccaaagcttggcggctctgcccgagctgcagcggcacggtgggggacgcctctctccctggactcagcaaaggctcccaaacgtcgtctcttccaaattccaccgcacagccagctctttctcttcactgggagggtccgcaggggctgacttgctccttaaggtcccaagactattaagcgacacccggtgaggccgggaaaggggctctaagaggcatggacgagagttggcggtgaccaagccactggaagctcctggagactcgaggtagaacgaatgtgggaacagggcaggagtcccagaatgggatgttgaggctgggggtgtcctggggctaccacagggaaggacccggcgcagagctccctctggaacccggcactgcggcccgcgccctctactccccgcgcgccggccggcaaccctcggcgctgcccggtgcagcccgcccgagcgcacacaatgaggcgctttcagacgtggctgcggtcccgaggtggccagcgggagctagcgccgtgggggaaggaaggagccggttggcccacccccgaccgaggggccacgcctcgggggaggggcgccggccgagggcggggcaggagggcccaggtgggctggggctctgagaggctcaacttttagcccagaatgtcaaagggcgctggcagagtcacctctcatctgactacagaggaacgttgtaccccaccccaccccaaatccccagagaaggggggctcctgggaggacaaaggccctagtgaaggaagtcgaatcttaatcttgaccctcctcactctcgggggcatccttgcggcgaggtgacttggaatccaaacccttcccaaggccacggcacctggatgacacatggacccggtgcagtgtcccaactgggaagagcggagagaccaggtggccttaggagctgggtccgcagcttttcccctcctcctgcgcattccctgccctagcctaggcccagaggcgcaggttcatagcaggtccagataaagacatgatacgtttcaataaataagatatttccggccagggctgggcgcggtggctcacgcctgtaatcccagcactttgggaggccgaggcgggcggatcacgaggtcaggagatcgaaatcatcctggctaacacagtgaaaccccgtctctactaaaaatacaaaaaaattagccaggcctggtggcgggcacctgtagtcccagctactcgggaggctgaggcaggagaatggcgtgaacccgggaggcggagcttgcagtgagccgagatcgcaccactgcactccagcctgggcgacaaagcgagactccctcgcaaaaaaaaaaaaaaaaaatccggccaggcgcggtgtctcacgcctgtaatcccagcactttggggggccgtagtgggtggatcacgaggtcaggagttcgagaccagcctggccaacagggtgaaaccccgtctctactaaaaatacaaaaattagccgggcgtggtggcaggcacctgtaatcctagctactcaggaggctaaggcaggagaactgcttgagcccaggaagcggaggttgcagtgagctgagattgcaccactgcactccagcctgggcgacagagcgaaactgtttcaaaaaaaaaaaaaaaaaaaatcccctttacaaataacagggcagagcccaggcacctgaaaaggatgaagcatttctaggtcttgtcaaattagtgatgggatcttaatcaagaactccctgctgctgggagaagaaataagcagtccttcctggttgtggtttggcaagatgaattaagattcttgacaatggtcgtaagcttttcggattggtaattcctttctaggagctatcttaaggaaataaaccagaaacaaggatttatgtacagggttcatataagtgttgttcatgattttgatactgatttttttttcagatggagtctcacttttgtagcccaggctggagtgcaatggcaggatctaggctcactgcaacctccgcctctcgagttcaagtgattctcttgcctcagcctcctgaatagctgggattacaggtgc

SEQ ID NO: 1242740 - DNA, 4001 bp, Homo sapiens
ccacccagaggcagtgactggaggcgtcttgaccgtcagtcggctcctcctcaggggcccccaagggctgggctgcctcctcctcccccgacctgagactggagaggaccacgtcctgagccacaaacaactcgcagggaccatgccaacccacacgctaggagctaggagttggtgcaagagccaacaagggtccccagggcggaagggccaaccaagtcacctgtgcagggtgtctgaaagcttctgggcctcctgaagcagccgctcccgccgctgtgcaaacaacaggctggaatcaggagggctcaggcggccccgccaccgccccccagcaaacccgcagcccctacctcgccgtcgacctgcttcttcagggaggctaaggacacacccagcaggtccagctggccaccgcctcgccatgggacgtggaggagagagccctgtggggaagggaggacaattgcctctgggcccctcctaggtcacaggattcacgtcagcccccatcagtgctcagggacccgggtgggacaaccccagtaagctggccagtgaggggtgggagactggacaggggtgccaaaggaatgaagccatccagatgggtcagctgcaaagggaaattgggggcagctttaggagaaaggaggaaagggcaaaagcaggaggggaagcaaggaggccctctccacccgaggccatacaaacaggctggacagcaacctgctgtggggaggctgtgtcctctaagtctacgccccatgacgcagcctccccctctgcacccctggggctctgcacaggacccgctttaagcaaatggcaggggtgaggggctccaaggaccctttcctgagcagcactggcccacccaccgtgcaggaaggccacagccacgcacctgcacccccggggccatggggtcagcacgcagcaccagataagcccggacgccctccgtggatgtcacgtggacgtagtcctccaagatggggggccgcctcaggacgggattgcgggcagctggtgaggcccgtgtgagacccacgtcggcagcagcttctgagactctggagagagaccggggctcagtggcagaaactcaagcgtggggtcacccttggatatgggtgtccgagactgctctcagccatggaaccctccccaccccccaggcctcatccagggcacgggatgggctccatctgagtcccactggacagatgggatgggacgcccatgtccaagccacacacccgtggccccaaagctctgcgaggtcctcagggctcggcggcggggtgatgtccgtcggcgaggagtcgggagggggcggctcctccatctcctccgatctgaagttcagcctcttgaccacctgcagcctaggccgtttgatcctgggggctgggggagacacatgcagggaaccagaggcctcctcagcctcgcgcccactccggaggccctggggcaatgccgccaacctaccgtggggcagggacccggccggctgcaggtcggcgtccacctgcctcttcctggcgccgccctggctgctgcccacagatgcggctggggcgggactggaggccgcgtcccctctggcaagggcctcctcgaacgtccgcgggggtcggcccgcggtgaacagggggaccccggagggcgacggagtcgacgcccctgctgggagaggagattgtcagcggccgccccgagacagcagatcccgccagcggcgacgtggaggccccttcggcccccggcacgccctccccgaggtcgccactgtcccggctttcgcagctcctccccaacggccgggggccgcgccccaccttccagctctgccagcacctccagctcggccgcgaactggttgtggaaatcatcctcgacgccgcacagctcctgctcgtagtcctccataccgtccgcgagcccgagctcccgctccgaacctcccgcgccgccgccgccgtcgcgcactgcccgccccgagcgtgccgggcgccgccaatcagcagccggcgtgcccggcggcgcgcgccattggttggcgtggcggaggcggggctgcgcgaggggtgggcggggcgagttcctgctccgcagcccccgcgtcctgtcctggggagctcgccattggccgccgcagccgcccttccgcggcgggggcgggccgggggcgggccgggggggggggcggggctgcgcgcgcagcggtgcagggcggaagcgctgccaggcgtccggagcggagcttccagggtctctgggtcgccagcgcgcgggcgcgcggctggagccggcgccgggcacggcatcgggggcctggactgcacggcccggcagcaggttggtcttggcgtgggcgtgggcgcgggaggggctcggagccagggtcggcctgcccaccgggcctgtgcggggcgcgggtctgcgcggactgcggggagcgaggaggccccagccctaacccgcgctgcgggcagacctggctgccgggcctggtagtgctgcagcccctccccgcccccaccgtcgggcagaggcattcacgtgcatcccctggaggggagggtctgtggggaggatctgtggggcaggtttggaacgggctctttctccaggcttaggtcaggcagggcccttcaggtcagcccggagcaggctgactccttgactccccagctgacgccctggggactgatctcggggactgaggatgcaggtgcacagtagggctgcggacccggctcggtggcttcgcaccggagcccgggtggggcggtgcgggtacctctgtatgctgggctgggggcgcaccacgtgctcacagcacacgcacccacgcgtggctcggcaggccggccatggagccaggcagcgtggagaacctgtccatcgtgtaccggagccgcgacttcctggtggtcaacaagcactgggacgttcgcattgacagcaaggcgtggcgggagactctgaccctgcagaagcagctgcggtaccgctttcccgagctggccgaccctgacacctgctacgggttcaggtagggggggcggccggagccccacggtggcgtctgtggaggaaagtggctcagactctggactctgtcccactccaggttctgccaccagctggatttctccaccagcggggcgctgtgcgtggccctaaacaaggcagccgccggcagcgcgtacaggtgcttcaaggagcggcgcgtgaccaaggcttacctggcattggtaagacctggtcagtcctggggtggggcgtggggactcaggattcccaccccacttgggcagccctggctcagagcctcccaccacgctctacgtggttgcttggtgttaggtgggctccccggcagcactgggctgccccgtgaactgcgtgcgattctccctctcctgcagctgcgggggcacatccaggagagccgggtaaccatcagccatgccattggcaggaacagcacggagggccgggcccacaccatgtgcatcgagggctcgcagggtgtggcaggcagggacccaccgggcgggcatcgtgggttggggtgggcctgggcaggcagggacccaccgggcgggcatcgtgcgttggggtgggcctgggccccgggtcagtcccactaacctcacacctgccttctgcgccccaggttgtgagaacccaaagccaagcctcacagatctcgtggttctggaacacgggctgtacgcaggcgatcctgtctccaaagtgctgctgaagccgctcacgggtgtgtctggggtgggcggtgtcctggtggtgacagaagggaaactgaggcacagggccacgaagcttatgttgggccaccctgagcatcagggcagagctggcaacaagcactcctgcgttcttaactccacgccctgcagcctctcagcttctcacctgacacagggtccctgctggctcctgactgattccttgggggtctg

SEQ ID NO: 1242741 - DNA, 4001 bp, Homo sapiens
tttcctaacaatacactgggcataaacacctattttgaaaggctgttgcaagaacgagtaatgaatgtaaagcttttagcacattgtctgacacatggtaagccttcagggtcaagctatcgatttcccagagaaaggtggcattttcttagtattcatcaaatagaatgtcttaatactacactgtgttagcatattaatgtttataacggactaaagcattctacgaaagcagcaggtcatcagaataaaatcaagttttcataacagtagaattcaaacatggcagttgtggttcaccaaactgcttcagggattaagttctggaaggtaatttctctaaatatgatgactatgtctctatgtgcctttctaccaagtgaacaactcagaacgttttacatacaaccgaatacagattatttttatttgtagtgttatcgtggttttgtaactgaaggggacaggtctatacttttgaaggggatcttgtctcttgaaaggcttatgttactaagtctaaaatcctgtttccaaatgagaatcttgctcccctccaaaaaggggcttatggagggttggtggaattgaatgcttccaaactttacattagtgaagtgtgttcaaaaacgtgtgtggatgctatgcatacacgtgatacttcccatcacattttaggattcccacgttggagggaatcaattactggtatttgtagcaatgggtggaaaagatggcttcagtcgatctgagttactgcagttttctccatcttctgctactctgcagccccatcttagcctgtcctcctcttaatggtacggccccctgtactcccccaaaccctttcctttctagcccggcgtagagtctccctctgtgctcttcctcccacccacccccatcttctccacccactccctctcggccccctcccaccctttctgctagagctacaaacacttcctatttctagtcccacccactttctgggacttctcaatccgcttcccccctcttctccacccccctccaaattacaagctgttttaaccccttttcctgcctcccagggaaactattctttaaaccgccttcctccacaccacccactggagtggtcttccaaaccgttcaccctcttcccaaagattactctttaaacgtcctttctctaccaccctcgttctccaaattgttcccggttctcaagtactccactcctccaggaccccaccccactcgtctctcggcttccctcccacaaaagaacctggaatgactctccaaccacccttccaattacctctcccagaagcctcccccctccacgattacaaatgttacctggaacaaaacctcacggtcctaacccccaccccgaactcccctttctgctcttcccgctacttcctaggttccagttctactccgctcccgcaagcatagcgggctgggctccctcccaaccccgggaagagccccttcccgcacgtacctcgagattccggccctcgccgcccccttctccgtcctccgcccgcgctcggccaccctttccgcccttctcccgctccgccccgctcgctcccttccttccctccgccttccgtctccacaccgctcccttcccccacactcctggccctcccaccccggaggcccctccgggcttgcccccacctccgcgccgccctcccgccgccctcccccttcccggccacccctcccccgcccgcgctccccgcccctcggctcgccattcttctctccgagccgcgcgccccgcccggccccggctccctagcttcccgctccctcgcgccctcgcccccaatcccggctcggccctcgctccccgcagcctcccgtgccccccgcccgcggcctgacctgcaatggcggccgccgagcgcggcgccgcgcggccaacgggcgacaaccgaacctcccgccgccgtcgccgccgccgcgagcactgcctgcgcacttccgactatgcgccaggagcacttccggggcagagcctgagagcgcgcgcgcacgtggggccggggcggagagaggcgagcaccgggaaggggagcgtggggccgctggtgagttggggaaggggcgtgggaagcggctgcgagagctgggggggtcttacaaggtggccggcccagggtcggcgtccggctgagctccttgtcccgagggtctccttgtcccgaggcggggtgggggctactctgtagactcggggagagggaaggggaggcgaagaccgcgcgcgcctcagacgccccggcccgaccgaacgcgcttgctctgtctgcgggttcctaaccttgaagctaggccagtgaggggcgaacaagacctggtctctactctcggccagtatatatgttggcgggcgtcggggggacggggtagggtaagtgacagacgtcagaccaggcagccagattaagtcaaaccctgtcgtttcttcctcaagaggagctcggttctgcctgccccatcagcctcactgtcactacctcagtttaggtctgttgtttgcaaacttagcaatagagttgaggagagatgcttgctaaaatgcggattcctaggcgccccgagataggaactctggagctatggagtaggaccctttttgattttttgctgaagcctccttattattcaagccattctgagcttttgaagattgagtaattcttgtggggggcattgttagcagccatttggaaatgaacttcagggagatgttgttggagccttccagccagaacagtgatattaaggaactgaatactatatgtgacatactgcagttaacatatagcaataatgactctcttttcgccccctaggaatgggtgaatttaaggtccatcgagtacgtttctttaattatgttccatcaggaatccgctgtgtggcttacaataaccagtcaaacagattggctgtttcacgaacagatggcactgtggaaatttataacttgtcagcaaactactttcaggagaaagtaagtcatttgggagtctgatatggtgttttgatgttaatttcttctgaagttcaagaagcttgtatgtcttttataatcaaactgattgagtgacttcctagcccctctgaagttgcttagaactaccaaacttctgagatctcctaactgataagagaagctcagtttcaatctgtgtaatgttgattagaagggtcctacctagaaatgtgacatctcactgcctgtcattggaaactgaggtttgctggatcttttggacacaggaagggaaattgttggtatatcagtctcaacaccattgcagctttggtaagcaaaatttcctgcagggagtatcagtactgtttcattgtcaattcagaaaaaatgataacacgttttaatatcagaaactttttggtgatgtgggaagatggattccaaagttcatctgtctgagagaatgtagacctacatgtctacatttgggagtaaaggagatttaaaattaggtaaaatgtcctttgggtgtatgcagaggtctattagtcctttttcttctcccctccaagggcactgactagtgattttcttcgggtgcaacatcttagttcatgttgaatgactgttatgtactgggtgctgtgatataaatgagtagatgggcaaatgagtgaattcagtgcccagcagcctggtacctggaatttaggcattctgtaaatgtttctcggtgaatgagtggcaaatactgggcactaagacaaatgtcagaggccctaactttacggagctcaaagaccagtgggagaaagataagtgtacagtttccaacctgtaaaataaatatgataaaccgaaacacaggcatagaaccttcattgaattgccttcagggaaggcaattcagagaattgccttccctgagaggtgggtttaggaaatgtggaaagggatgatttactgagctcacccctgaagaactaat

SEQ ID NO: 1242742 - DNA, 4001 bp, Homo sapiens
taaaatgtggcagaagaaagtgtgatatgtatccaattaaaccgaacatatggcttatagcaaaaaagaggctttgactcaacggtttaacctcaatacaaataactaaattttaataaagctaaacaacgttttagaaattttgtttttttttcaaacaggaaaccaagcctttaaattctcaacccttaaacattcttttctaaactggggtgaaatcaattatttcagagtgtaaatattcacaattttctattttttgctaggccaacagttggcatttattgagcttttgttttttgatcccagggtggatactttgtttacgaatatagtgaagcactcacttgtcatacagacctggattctgtgattttgccacctatcccatatgtgacagtgggtagtttaacctcacgtgttttcctaacaatacactgggcataaacacctattttgaaaggctgttgcaagaacgagtaatgaatgtaaagcttttagcacattgtctgacacatggtaagccttcagggtcaagctatcgatttcccagagaaaggtggcattttcttagtattcatcaaatagaatgtcttaatactacactgtgttagcatattaatgtttataacggactaaagcattctacgaaagcagcaggtcatcagaataaaatcaagttttcataacagtagaattcaaacatggcagttgtggttcaccaaactgcttcagggattaagttctggaaggtaatttctctaaatatgatgactatgtctctatgtgcctttctaccaagtgaacaactcagaacgttttacatacaaccgaatacagattatttttatttgtagtgttatcgtggttttgtaactgaaggggacaggtctatacttttgaaggggatcttgtctcttgaaaggcttatgttactaagtctaaaatcctgtttccaaatgagaatcttgctcccctccaaaaaggggcttatggagggttggtggaattgaatgcttccaaactttacattagtgaagtgtgttcaaaaacgtgtgtggatgctatgcatacacgtgatacttcccatcacattttaggattcccacgttggagggaatcaattactggtatttgtagcaatgggtggaaaagatggcttcagtcgatctgagttactgcagttttctccatcttctgctactctgcagccccatcttagcctgtcctcctcttaatggtacggccccctgtactcccccaaaccctttcctttctagcccggcgtagagtctccctctgtgctcttcctcccacccacccccatcttctccacccactccctctcggccccctcccaccctttctgctagagctacaaacacttcctatttctagtcccacccactttctgggacttctcaatccgcttcccccctcttctccacccccctccaaattacaagctgttttaaccccttttcctgcctcccagggaaactattctttaaaccgccttcctccacaccacccactggagtggtcttccaaaccgttcaccctcttcccaaagattactctttaaacgtcctttctctaccaccctcgttctccaaattgttcccggttctcaagtactccactcctccaggaccccaccccactcgtctctcggcttccctcccacaaaagaacctggaatgactctccaaccacccttccaattacctctcccagaagcctcccccctccacgattacaaatgttacctggaacaaaacctcacggtcctaacccccaccccgaactcccctttctgctcttcccgctacttcctaggttccagttctactccgctcccgcaagcatagcgggctgggctccctcccaaccccgggaagagccccttcccgcacgtacctcgagattccggccctcgccgcccccttctccgtcctccgcccgcgctcggccaccctttccgcccttctcccgctccgccccgctcgctcccttccttccctccgccttccgtctccacaccgctcccttcccccacactcctggccctcccaccccggaggcccctccgggcttgcccccacctccgcgccgccctcccgccgccctcccccttcccggccacccctcccccgcccgcgctccccgcccctcggctcgccattcttctctccgagccgcgcgccccgcccggccccggctccctagcttcccgctccctcgcgccctcgcccccaatcccggctcggccctcgctccccgcagcctcccgtgccccccgcccgcggcctgacctgcaatggcggccgccgagcgcggcgccgcgcggccaacgggcgacaaccgaacctcccgccgccgtcgccgccgccgcgagcactgcctgcgcacttccgactatgcgccaggagcacttccggggcagagcctgagagcgcgcgcgcacgtggggccggggcggagagaggcgagcaccgggaaggggagcgtggggccgctggtgagttggggaaggggcgtgggaagcggctgcgagagctgggggggtcttacaaggtggccggcccagggtcggcgtccggctgagctccttgtcccgagggtctccttgtcccgaggcggggtgggggctactctgtagactcggggagagggaaggggaggcgaagaccgcgcgcgcctcagacgccccggcccgaccgaacgcgcttgctctgtctgcgggttcctaaccttgaagctaggccagtgaggggcgaacaagacctggtctctactctcggccagtatatatgttggcgggcgtcggggggacggggtagggtaagtgacagacgtcagaccaggcagccagattaagtcaaaccctgtcgtttcttcctcaagaggagctcggttctgcctgccccatcagcctcactgtcactacctcagtttaggtctgttgtttgcaaacttagcaatagagttgaggagagatgcttgctaaaatgcggattcctaggcgccccgagataggaactctggagctatggagtaggaccctttttgattttttgctgaagcctccttattattcaagccattctgagcttttgaagattgagtaattcttgtggggggcattgttagcagccatttggaaatgaacttcagggagatgttgttggagccttccagccagaacagtgatattaaggaactgaatactatatgtgacatactgcagttaacatatagcaataatgactctcttttcgccccctaggaatgggtgaatttaaggtccatcgagtacgtttctttaattatgttccatcaggaatccgctgtgtggcttacaataaccagtcaaacagattggctgtttcacgaacagatggcactgtggaaatttataacttgtcagcaaactactttcaggagaaagtaagtcatttgggagtctgatatggtgttttgatgttaatttcttctgaagttcaagaagcttgtatgtcttttataatcaaactgattgagtgacttcctagcccctctgaagttgcttagaactaccaaacttctgagatctcctaactgataagagaagctcagtttcaatctgtgtaatgttgattagaagggtcctacctagaaatgtgacatctcactgcctgtcattggaaactgaggtttgctggatcttttggacacaggaagggaaattgttggtatatcagtctcaacaccattgcagctttggtaagcaaaatttcctgcagggagtatcagtactgtttcattgtcaattcagaaaaaatgataacacgttttaatatcagaaactttttggtgatgtgggaagatggattccaaagttcatctgtctgagagaatgtagacctacatgtctacatttgggagtaaaggagatttaaaattaggtaaaatgtcctttgggtgtatgcagaggtctattagtcctttttcttctcccc

SEQ ID NO: 1242743 - DNA, 4001 bp, Homo sapiens
agatcttgccactgcactccagccagggagacagagtgagactccatctcaaaataaaaaaaaattaaattaaaaacataaaattaactaactgaagctcttgtgcacatacatgtcactgcctggcctctgggtgaccagtaccaagtgggcctaaccagcctgctgtgcaatccaagtcagccattgcccctctctgggcctcagtttccctgccagctttagcagaatggtaggaaggcacaattacaacctgcaaatgagacctaagaaacctactatgtgcctgtccctacacgggagacagacaagaagacacttgttccctgccctcaagagaacgctctgtctagacacttagactaagaccttagaggtttttttttttttttttttttttttttttttggcagagtcttgctctgttgcccaggctggagtgcaatggcacaatcttggctcactgcaacctccgactccggggttcaagcgattctcccgcctcagcctcccaaatagctgggattacaggcacccaccaccacacccagctaatttttgtattctttgtagagatgcggtttcgccatgttgcccaggctggtctcgaactcctgagctcaagtgatccacacgccgcagcctcccaaagtgctgggattacaggcatgagcctggcccagaattttttttaaaaagtgagaatcaacaatgaaacaggaacgtctccaggcatttggcgtgtgtcaggaattagggtttcagaaaggatacccaaatgttagtttccacaggaaaggctcattcaaagatggatggatagaactcagaaacaaatccttatggagaggagtgttttacctaaaaccagaaatatggatctaaaattttaacctttggggtaagttttggcttaggaggtcttccccgcacccgtgcaggggggagccggatattctgaaaagactagatttgacaaggggtgtgcaaagcacaactttaacagacacaatgatggggtctgactgcaaacacaaaatcgacagaatcacatgctcttgtcgtcagttactcttagcccaaaaaccgtttacttcttcctactaagccttctctgatgacacccccgtgaagtgctctgttagtggctagaccgtgacctccttgagccatccagagcttggcactcagtaatgtcagaatgaagggcaccagcctttcccgaacttgcagatcctacaaatcacccgagggagtggttaaaatgagattcctggaccacacccagacccactcaatcaatccttctggacaaaggcctagctgtctgttctagtaacaagcatccttccgatctggatacttaattatatcaactcaacacgctgggggttcggacaagttgcaggttcgaaattacaatcgtgagctcaggtaccccccgactccaaggctttcgtgctttgctgccaggaacccccagggaccaaaacgtcacggggactgaggcccaaggtcacaacgattggctactggtaggaccgggtctcagaaccaggtctccccgatcccaagctcggagccgtttctcctcagcgtggtgtccccggggcctcagagtagggccggctgcgcaagggacgaggcagccggggaacggcagaaattcccagtcaggaccccagggaggttagggccggccctggcccctcacaccgacttctcaggaataaaccagccggggctttcagcggggcggccgtggctgcgttcccatcgaggaacggggtgggaagagaaaatgagaggatgtgggaacgagggtgggccgggaggggacagttgagggagctctggcgctcagctggcccccaccactctcacctgccgcctgggctcgctcccggcttctctccagccgtcgactccacgccttgcgcctctcgcgagaggaggaggctccacggagcgacgacttccgccctccttagggccgtggtcccgtagctaccggtcgcgtcgccgtgggcgacgtgcccgcttccaaaatggcggcggcggcggtatctggtgcgcttggccgggcgggctggaggctcctgcagctgcgatgcctgcccggtgagggggctgccaagccggggagaggcggggagcgcggagggggcgcgaggccggcttcagctgggttcgacggtggggggaagaggccgttggggcggcccacgagcaaggtgaggtgaagggcatcggcgcgggctcgggcgagccgcctggctagcttcggccctgctccgctgtctgtgaggggcagatgcagcggggcagggcctgtcacccccatttcatggagttggcagagcctcagagagggctcggggtacgaaagtcacgcagcctgagcctgttggttacagaactggcagtcgcagacccattctcaagtccattgccaagtccactggaaggacaggtggacacggccacagagagcctagtccattgtttcccgaaagccagccgtttcctcaccacttcacgaattctgtgatactctcttaccacctttgccactatgtactcagtatttttatttttaaataggagttcttaaagaggaaactttatatcattgtcataaatggaaaactaatatcgccttccttaattagaacgtatgcattaacactttagcatacatacataactgatgaaacgttcacctgtatttcacctaaaatcttctcatgaccctcagtggtactacagtcatactttgcatctgctccttccttttcaaagttttgcggatatttgtgccgtatctttcagtacatgtattaaaatattgatattttggcacatactattctgtttcttttttttcttttttttttttttctgagacagggtctggctcctcagcctcccaaggagctgggactacaagtgcgtgccaccctacttggcttaattttgttgttgagacagagtctcactctgtcacccaggctggagtgcagtggtacaatctcggctcactgcagcctctacctcctgggttcaagtgattctcctgcctcagccttcctagtagctggggttgtgccaccatgcccagctaattttttatttttagtagacggggtttcaccatgttggccaggctagtccaaaactcctgacctcaagttatctgcctgcctcagcctcccaaagtgttgggattacaggtatgagccaccgcctagcccccttttgttgtatttatacaaaattccaaactaaagatgtgtagtaaaagtaatgtctatgaccccgcaaatccaccaagagaaatgaaggtatgtgtctacaaaaaagttagtacaagtatattcatagcaattttattcatagtagccaaacacagaaacagtccagttgtctagcaacagaatagtattttttttatggaatactattctgcaataaaaactaaaaatcagtcaaagagaaagctggacactaaagtgataaggaccatttttaatcagtaataactattgcaatagggaaaagagtctagcatgaacggagcccaaccttgagtttagagcatgcagaagtcactgggtgtttcaaagaaaaaatgagggaggagggaggaaggcaggtggggactcagtagagtcaggatagtgaataattataaataagattggtctgctagctggcagttaacaaagttaggattctgttttcccacagggagacaagccctatccttcttaagtgttagcctgaacaaacagtaaaattttttttgacagccttgagttttctcaggcaggcactttaaaggggggtagggttatcttaagggatgtggccctgagtgatgcttatgttagtgtgtgttcaagtctttataggccaaggttgaggcctagataagaagagggctcagaggagcctggttagagcctgatcaaggagagaatctttgccagatatactga

SEQ ID NO: 1242744 - DNA, 4001 bp, Homo sapiens
gctggaaacgaggtgtttcccggccctacattttgcatattccatccccccatcctcccagacttgctgtgtgaccttgagcaagtagctgacagtctcggagcctcgattctcagcccgaccttaggggttacagaggagactttggtcacctaccgctgttccccgggctcccgcgcgcgctgctggtggcctctccctcccgccagctctggggccgcggcaagtctgtggcagctcgtccgctggtcatcctacctccccgcctccccgcagttctttttccctttcactttctttctgcagcgctgagctcgggccaggctgtggagcaaccaagcacctactgtggccaccacgtgctttatcagaagtggcatcccaactgcctggggcatccaagaggtccctgcctccagtcggttcctcacagtggccagccccacttcggggagagtcccaggccccgggccaggagccaggagctagggagccacttgggcaagtgatctgcaagtcctgagttgcagggagcttgtccccacccctgggtgggtctctgtttctctccaactcagtccaaccgtgaaagtggcaaaccacctccgagggcacatggcccctgagatgagctaactgagctattcactcctctgatgctggccctagggaggaagagaaaatccctcaggtaccttccatggatggaaaacctgtgttaccatgaccacacccccagccgtggcaagagccctgccggtccttttcagaggtcttggattcctgctgggtcctccaaggcatgagactttgaggtggtcactttcccttttcaggcctgaatttcctcatctggaattgagggagggggcaaggttacctctgacttctccccctccaacactttcccgtagcaacttaaggctgcacccaaccacaccggcagacctgtcatcagtctctgggttcaaagcaaaccatacatttcaggggagtctgagaaaagggataccacccctttaaccatccaacaacagcaatgccaataaaattgagctcctatgagctcaattccagttcctataaaatattggacactgtgctaggtccctcatcattaccctttcatacaggctttcccacaggtccattgtacactccaggaaaattgactcgagaatgtaaacgacttcttcaggggcacacccttcccagccaacggtgtagctgccatgctgccttcagagccggtgccaggtgtctgcactgtgctcttcccaccatctgttcccccgtcccctgaccctttttaaacaacaccattaggaaactggggggagggcagcatccgccagctctccccagctgctgagggctcaacagctacacctcaaggctgactccaattttggtttccctgcttctctgggtatggagtggagtctggcagaggtcccgtcctgcagaggcacccctcagtatttacccaaagggaggcgagaagaccttgctgtgggccgagccaggccagcatgctgagagttagtgacacactgcccgaaagtctgacttctagaacctttcggtgctgatacatggttcatactccagacacctggctgacctgaagtctccctccggtggaaggaaatagacaactctttcacatcttccaatggcctgccccagcaggacacagactcctgttcccatcctcacccccatccccaattcagaatggtttctctgtttatctggaatggcaggaccagctgagactgcacgctaaattaagatgctttcccggcctttttaccttggggctctgacaggtaggacccagcagggcgtggagccaggcaacgcattgtgtaggaatcccagccaggcagcagctcccggagtctggcagcccctcctcgtgccctcagcttccccaaggatgccttcggatgcccagctcagaagcacacagcctcatcactagcctcatcactaaccagtcaccagttgggagcccgccaagctaagccaacatgcaaagaaacaagtgagggatcatcaaaaaaactctccctgcaaggtggccccaagcggtcagatttctgtttctgaacaccctctaattttaccacactcccttaagccctccccacacctctgaaattaatttcacttccttactgtggactgaatttggtgaagacagaaagttgcacagaaagtctgttgggggaaccttcaacagtctgacgttcagaaatgatgatcacaatggaaccgcactggtgccagctgccaatatctgccaccttctgcaggatggggccagtatcatagccctccgcccagatgcctcaagacaagctgagagcctctgctggggacttcttagatgctgctctcctctaccatgcctactcccacaccaaattgccctgaatttctctggagatcataagtggcccacctgtcattttcatcccaagacattggactaaaacataaattataccaaaagagtgttaacccaaatatggtacccttgtagtcagatggtttggggtgacccgccaaagtgatgctaaataatactgactcccatagggagaaagttagtgtcttttccagtctctgcccatcctcctggtggtatcaaggaggaagtctcagcttggtgtgaacatgtctttaacacctcttctaatatatgatcactctgttttatagaaagcagctctctagcctcagagccttctacagtcaacagtatcttgctataatctaacatcactctgctttcttgttaaatggttacctcctgtttttgccattttttccctttataatgggacgtaaagttttatttgaatataaagtagatggctgggccaggtggcttgtgcctgtaattccaacattttgggaggccgaagcaggaggattgcttgaagccgggagttggaggctagcctgggcaacatagtgacaccctatgtctacaaattgttggggttttttttgtttgtttttgtttttttttagacggagtttcactcttattgccaggctagagtgcaatggcatgatcttggctcgctgcaacctccgcctcccgggttctgggttcaactgattctcctgcctcagcctcccgagcagctgggattacaggcacctgccactatgtccagctaatttttcttttcttttctttttttctttttttgagacggagtcgcgctctttcgcccaggctggactgcagtggcgctatcttggctcactgcaagctccgcctcctgggttcacgccattctcctacatccagctaatttttctacaaatgattttttaaaaattagccatgtatgatggtgcacaactatagtcccagctactctggaggctgaagtgggaggatcgagtgtgcccaggagttggaggctgcagtgagctatgatcatgaaatacactccagcctgggcaacagagtgagatcctgcctctcctaaagaaaaagaaaagaaagataagtaaaaaaggtgagtggttaaaaaaaaccctgtcataaataatagtaaagtgttatgtggaaaacacaaaaatgatgaaggtggtactgaaatgaaggtttggaaacatgacttgtgtgcctcatgcatttttgctgaaagagcactggacggggaacttagtagcaggtgtgtgaccttggcctctttacttcctctctgtggtcctcagtttccccatgtgtgaaatgaggatgatgcccttctttgtaaggtgattactttgaagccttcactgttttcagaagtccccgggtgaggagtggggtagaaattgacaaataagaaatgctgagtcaatttgaaacagccttgcttagtggggctaacaaacggatatggtgaatgtcagaaattctaagaatgaccaggcacagtggctcatgcctgtaatcctagtcctttgggaggctgaggtgggcagat

SEQ ID NO: 1242745 - DNA, 4001 bp, Homo sapiens
ttttgattagttcttcaggggtgagctcagtaaatcatccctttccacatttcctaaacccacctctcagggaaggcaattctctgaattgccttccctgaaggcaattcaatgaaggttctatgcctgtgtttcggtttatcatatttattttacaggttggaaactgtacacttatctttctcccactggtctttgagctccgtaaagttagggcctctgacatttgtcttagtgcccagtatttgccactcattcaccgagaaacatttacagaatgcctaaattccaggtaccaggctgctgggcactgaattcactcatttgcccatctactcatttatatcacagcacccagtacataacagtcattcaacatgaactaagatgttgcacccgaagaaaatcactagtcagtgcccttggaggggagaagaaaaaggactaatagacctctgcatacacccaaaggacattttacctaattttaaatctcctttactcccaaatgtagacatgtaggtctacattctctcagacagatgaactttggaatccatcttcccacatcaccaaaaagtttctgatattaaaacgtgttatcattttttctgaattgacaatgaaacagtactgatactccctgcaggaaattttgcttaccaaagctgcaatggtgttgagactgatataccaacaatttcccttcctgtgtccaaaagatccagcaaacctcagtttccaatgacaggcagtgagatgtcacatttctaggtaggacccttctaatcaacattacacagattgaaactgagcttctcttatcagttaggagatctcagaagtttggtagttctaagcaacttcagaggggctaggaagtcactcaatcagtttgattataaaagacatacaagcttcttgaacttcagaagaaattaacatcaaaacaccatatcagactcccaaatgacttactttctcctgaaagtagtttgctgacaagttataaatttccacagtgccatctgttcgtgaaacagccaatctgtttgactggttattgtaagccacacagcggattcctgatggaacataattaaagaaacgtactcgatggaccttaaattcacccattcctagggggcgaaaagagagtcattattgctatatgttaactgcagtatgtcacatatagtattcagttccttaatatcactgttctggctggaaggctccaacaacatctccctgaagttcatttccaaatggctgctaacaatgccccccacaagaattactcaatcttcaaaagctcagaatggcttgaataataaggaggcttcagcaaaaaatcaaaaagggtcctactccatagctccagagttcctatctcggggcgcctaggaatccgcattttagcaagcatctctcctcaactctattgctaagtttgcaaacaacagacctaaactgaggtagtgacagtgaggctgatggggcaggcagaaccgagctcctcttgaggaagaaacgacagggtttgacttaatctggctgcctggtctgacgtctgtcacttaccctaccccgtccccccgacgcccgccaacatatatactggccgagagtagagaccaggtcttgttcgcccctcactggcctagcttcaaggttaggaacccgcagacagagcaagcgcgttcggtcgggccggggcgtctgaggcgcgcgcggtcttcgcctccccttccctctccccgagtctacagagtagcccccaccccgcctcgggacaaggagaccctcgggacaaggagctcagccggacgccgaccctgggccggccaccttgtaagacccccccagctctcgcagccgcttcccacgccccttccccaactcaccagcggccccacgctccccttcccggtgctcgcctctctccgccccggccccacgtgcgcgcgcgctctcaggctctgccccggaagtgctcctggcgcatagtcggaagtgcgcaggcagtgctcgcggcggcggcgacggcggcgggaggttcggttgtcgcccgttggccgcgcggcgccgcgctcggcggccgccattgcaggtcaggccgcgggcggggggcacgggaggctgcggggagcgagggccgagccgggattgggggcgagggcgcgagggagcgggaagctagggagccggggccgggcggggcgcgcggctcggagagaagaatggcgagccgaggggcggggagcgcgggcgggggaggggtggccgggaagggggagggcggcgggagggcggcgcggaggtgggggcaagcccggaggggcctccggggtgggagggccaggagtgtgggggaagggagcggtgtggagacggaaggcggagggaaggaagggagcgagcggggcggagcgggagaagggcggaaagggtggccgagcgcgggcggaggacggagaagggggcggcgagggccggaatctcgaggtacgtgcgggaaggggctcttcccggggttgggagggagcccagcccgctatgcttgcgggagcggagtagaactggaacctaggaagtagcgggaagagcagaaaggggagttcggggtgggggttaggaccgtgaggttttgttccaggtaacatttgtaatcgtggaggggggaggcttctgggagaggtaattggaagggtggttggagagtcattccaggttcttttgtgggagggaagccgagagacgagtggggtggggtcctggaggagtggagtacttgagaaccgggaacaatttggagaacgagggtggtagagaaaggacgtttaaagagtaatctttgggaagagggtgaacggtttggaagaccactccagtgggtggtgtggaggaaggcggtttaaagaatagtttccctgggaggcaggaaaaggggttaaaacagcttgtaatttggaggggggtggagaagaggggggaagcggattgagaagtcccagaaagtgggtgggactagaaataggaagtgtttgtagctctagcagaaagggtgggagggggccgagagggagtgggtggagaagatgggggtgggtgggaggaagagcacagagggagactctacgccgggctagaaaggaaagggtttgggggagtacagggggccgtaccattaagaggaggacaggctaagatggggctgcagagtagcagaagatggagaaaactgcagtaactcagatcgactgaagccatcttttccacccattgctacaaataccagtaattgattccctccaacgtgggaatcctaaaatgtgatgggaagtatcacgtgtatgcatagcatccacacacgtttttgaacacacttcactaatgtaaagtttggaagcattcaattccaccaaccctccataagcccctttttggaggggagcaagattctcatttggaaacaggattttagacttagtaacataagcctttcaagagacaagatccccttcaaaagtatagacctgtccccttcagttacaaaaccacgataacactacaaataaaaataatctgtattcggttgtatgtaaaacgttctgagttgttcacttggtagaaaggcacatagagacatagtcatcatatttagagaaattaccttccagaacttaatccctgaagcagtttggtgaaccacaactgccatgtttgaattctactgttatgaaaacttgattttattctgatgacctgctgctttcgtagaatgctttagtccgttataaacattaatatgctaacacagtgtagtattaagacattctatttgatgaatactaagaaaatgccacctttctctgggaaatcgatagcttgaccctgaaggcttaccatgtgtcagacaatgtgctaaaagctttacattcattactcgttcttgcaacagcctttcaaaataggtgtttatgcccagtgtattgtta

SEQ ID NO: 1242746 - DNA, 4001 bp, Homo sapiens
cccaataatgtgtactccacgagggcagggatctttgttttttttcactagtatttttcaagagcctggaatagtgcctggcacatgacaggcattacacagattatttgttgaataaatgaggtaacactcaacttcttatatttctctgcatcaattgtgctattttttgcctccatgcctttactcaggtggctcttagatccaaccctagattgctctaggaagagcttttttctgacacctctccttggttagacgcctcgcttctgtgttctatctccatcttatcacatatcttaactatctgctcatgtgtctgtctcataattaaactgaagaactccatgagtcagggatttttgtcctggttcgtctttgctgttccagctcctagcccagagtttggaccatattaagtattcaaatggtttgttgagagaattaatatatcaaaaactaaccattctcacaggaccattctcacatggttcccccttcagtgttcaagatctttcctttttcagtgttcaagatcccagaccttctggtcacttttgccctgagtatttactcccaatcaaaagttatttctccttccctcaactccagagtggtttctaaacctcttatgtatctcaacttacatgatatgaaagctacttctcacaatcacagacttttggtgtgagaaggatcttatatgcactttgttcaacccactcaccttaagtttgagtctcctttataacatcctcaccaagtgctcacatatgcctggtacttttgtctgggaatgtactgccttcccaagtggccatttagttttgggagctctcccaatataagattcctcctcacattaattggaaatgttttccttgtaactttgaactatctccattttgcctctcccatgtcaactctttaaaacttaaaatgatttattttttccttccctgtaaggtttctctgtgaattcctccaatgatgagtttctagaatagattccttcaactaggatagtttccacttctctaactagctaggtcacttctctccaaatgatcaacttcctccaaacctgttcagaagtgactgcagtgctcccggtaggaagtctgctcccggaaacgagcagttctctccttgtcctggttctgggctgtatcagccttgaactcagtcacatcaaacgtctgtctcacggaagtccacacaacattcaccgaaacccctgaggcttttttttttttctttcaaatcttgtgggcttctgagaggtataactgcagttgtctcgcctggtaacctgggtacccggtttgtgggtccaaatgtagaccatttgggtagatctgatttttaatttaaaaaaagggtttttttttgtttttgtttttaaagaggcaggacctctctgtcgcctaggcttgtgtgcagtggtgcgatcaacgttcactgcagcctcgaactcctgggatcaagcgatcctcccgtcccggcctcccaaagtgctgggaccacaggtgtgcgccacggcgccccgccctctctggttttcatgaatgagtgtgtccctaaaccctcctaaggggaggacagtgccgtatctctctccttcttccccaaggaggccatgccttgcctttcaatcttgatcaaagcgaggttgaaaagcaaacaggcgttcagctttgcacttcacacccacatctcccgccccccagcagcttcatcagcctcccgccctccgcggcccggcctcaccagccgcagcatcttcacgtggcctttcacactgaagcagaaggggcgatgttttattttcggctgcacgttatccatcgcgtctgcagacccagcagcagcactttccctcaactcttctcagctggctgcctgagtaggttctgcgaagcgatagcaaccgccaccgcggcggagcaccgccctcccctacttctcgcccagctcggcttcccgctctcttgcgcgcatgcgcacggcgccgcgttcgctctcgcgcatgcgccccaacgggatcccgcggccgtccgctctggcttgtgctgtctttcagttatcgcgtagcacattagcggacctagagctgggcacatattagcggacctagaggtgggcacgcaggccagcgccctgttagcccgccgtgttctggcctggcgttaatgacggcagcactccagctctcctgaggagtcttcctgtcgggaaatcctcccagggttgggagcagaggagagggagggggctgtagaaatggcggccccatctcccaacaacttgggcattgtgaatatcacctccttaaaggggatctcctttggtcatcccgtctagagcagccaccataacttctgagcgtttattgctagctgatatatatcagaaaaatacaaattccacaaaagcagggactggtctgcttctctccctgcagggcccaggttctggcacatagttggtgcagaaagtgtgcagcctcaggtcctatccaagcccccagggcatcacactcgggacttgttctgcatatttttacttttgcctcccactggtactagttcttccgtggaacagcctgagtcccttcagatacttaatgttttttctcaagtgctgccatgaagccagatctccaccgtcttggggcattcctttttagggatgggaagtatatgtcgctccttttatgtgatttacattctatcttggataatttggccatcaccgtagttcattcagatctgtttggatcctgcccatctcagcttcagtccatttcattcttttaaatctgatcgacagttacctccaacagcttcatcacaaatcactcacaaaaatggccttaatcctgaagtttatttacggagagcacacttgctaggtgtgtggcagatatacaggaagcacaagatgaggcagcagatctagaggcaaatgacttccttctccctgcctagtggtgactgccagcatcacgccctcccgggagaggtgagaaacccctccacgcaagcactggaaccttcacagtcaagagtggcaacagctccggttactggacttgggcctgttgaattctaatactctgtgactccacatctgggctgaatttttgctgagtatgatggaatttacatgcttcctccctagcccctacttgtctgtatagttggaatatttggttgcctcctctggagggatctagtacgtttagagtctagacgctggaactgtcaaagttcagaggaaagagctccagctgcaaagcaagagaaatgggctggaattctagcttcaccccttaatgaatgcttctgatttttttttttttttttttttttgagacgtagtctcactctatcgcccaggctggattgcagtggccacgatctcagctcactgcaacctccgcctcccagactcaagcgattctcgtgcctgagcctcctgagtagctgggattacaggcgtgcgctaccacgcccggctaatttttgtatttttagtagagacagtttttggccatgttggtcaggctggtcttgaactcatgacctcaagtgatctaccttcctcggcctccgaaagtgctgggattacaggcccgagccaccgcgcccagccgcttctgatcattaaaaaaaaattttttttttggcggggggaacgaagtgtccctctgttgctcaggctggagtgcagtgcagtgatctcggctcactgcaatctctgcctcccaggttcaagcgattttcctgcctcagcctcctgagtagctgggaatacgggtgccccccaccacacccagctaatttttgcatttttagtagcgatggggtttcgccatgttggccaaggctggtctcgaacttctggcctcaggtgatctgccttccttggcctcccaaagtgctgggattacaggcgtgagccaccgtgcctggccaaaaaatttatgttttaaaaag

SEQ ID NO: 1242747 - DNA, 4001 bp, Homo sapiens; identical to SEQ ID NO: 1242746

SEQ ID NO: 1242748 - DNA, 4001 bp, Homo sapiens
aaacacacacacacacacacagaggcatacacatacacacacaggcatacacacaaataactaatcacccatggccccatcacttcaaattaaccccttcagatcacttttcatgcagactacagcacggagagcaggagggcccacttcaaagggagctgagctgctgcttcttatcagcaaaaggcagactatgaccttctttgtctggtgcgtttctaaggaattgggaaaacctaaatgtaggttctatggaaacaggctgattttcgtgtccttcctaaacttttttttttttttttttttttttgagacggagtctcgctctgcccaggctggagtgcagtagcgccatctccgctcactgtaagctccgcctcccgggttcaattgattctcctgcctcagcctcccgagtagctgggactacaggcgcccgccaccacgcctggctaattttttgtatttttagtagagacggggtttcaccatattagccaggatggtctcaatctcctgacctcatgatccacccgcctcggcctcccaaagtgctgggattacagatgtgagccaccgtgccctgccgtccttcctaatctttaagcacaagacaagtgtttaaaggactagacaagagaaaatgtaaagaataactgcaaagcagattaagacccatcaacaaaacggtccattaactcaaaagtaacacaatacggccaggcgcagtggctcacgcctgtaatcccagcactttgggaggctgaggtgcgggggatcacgtgaggtcgggagttcgaggccagcctgaccaacacggaggaaccccgtctctactaaaaatacaaaattagccgggcgcggtggcgcacgcctgtaattccagctactcaggaggctgaggcaggagagtcacttaaactcgggaggtgggggttgcagtgagccgagatcgcgccattgcactccagcctgggcaactacagtgaaactccgtctcaaaaaaaaaaaaatattaagacaatacacagacagggaaacaaatgtacccgcaacggttctccagaccttaacactgctcagacgcacgctgcagggtgacatgcggaacgcattccaacctctgacttgctgcttattgtgtttgcctgcacattgcaaattcaactcggtgcgaagggagactgagtacaaatactcgtcactcccaagatcacctgaaagtcgggactgatccccacacagaaagatggcagataaaggcgctcagtcattctcactgaaagacagtgacccggctgcaatcttaactgtttccatctcccagggggtcaaaaacgcaaacaaaattagttgctcgtgtaggatgacaatttttaaaagtcacctgaacagaaagccacttgcacccctttagggccagtctgggggacaccggagggaatgaacgtgcgccacggctgccccggcgcccctcagcgccccacattccgcggggtctggcgagctccgcctcgcccacgcagccctcccggccaccgagcccggcgcggcctccgaagactccagaccccaggcgcccccgccagcccggccccgccgaggagccccggggcgcgttcccgagtccaccgcgcctcggtcgcctccaggaccgagacacgcggcgccgccagaaggctcacgagggcgcgggctgcggggcgcacgagggctcagtttccccgcctgcgccctgcccggcctcacctggcgcgcagccccaggcccagccccgttcagcagcggcgtccccccgccgggccgcgccgtcctccgcagcagcggcgccgcctcctcgtcgtcccggtcccggccggaccaggacaccttcttagagacgttggccatggcccgccgcggagcgacaccggccgggaagcgccggctgcccccgtgtttgttctcgtgacccgcgccggcggccacgtgacgcgcgacggggccacgtgatgagcgacggcgaccatgtgacctgcaacggcaaccaccgaggcccggtcgcgcgggggctcctgggagccgcgctcccggcgggtcgtggcgccgcccgccctagagaatcgccgcggccctgaggaccccgttctgcccacgcgactgcaaaggcggccccgttgggctgagcgccgagtgcttgggaggcgaatggccgcccccgggacctcgggcccgggagtcggggcgagggaagcgcccggggcctgagggcaggagccggctggaggggctcccccaggcccggtcgcccgcgccgatcgtgacggagccgcggtggggaagggaggagggaggcaggggcgagggcaggcctttccttgccataggcggcggctaaagacgtgaaggatgaaattagaagtcccgaagcatgcatccgccctcgcagtaggcactcgggcgagggtcggagtggaggcttcctccaggcagccccagagggtcctcccgcctaatgagaaaagaacagaaggcgagtcctcttcaacgatcaggccccagagacagtacaggagggtcgcctctggaaactgccggctactacgcagatagctgtgaattagccaaatagccgcccggaccctgtacccgcaccagggcacagcccatcactaatcaatggtatttccataaaccaaagagaattcttgacagctttacatcagcccccaccctgtccccaccttctgggtcatttatttatttattttgagacagggtctccttctgtcgcccaggctggagtgcggtggtgcggtcacagctcagtgcagccttgacctcctggactcaagccatcctcccgcctcagcctctggagtaacagggaccacaggcctgcaccaccacacccggctaatttttgctgtggagctcacagtgtgttgcccaggctgttctcaaacttctgacctcaagtgatccttccacgttagcctctagagtaaactctttatattttgtgcctcatcctcttccttttaaaaggtcgatatttttattattgagacggagtctcactctgtcgcccaggttggagtgcagtggcccaatctcggctcactgcctcccgggttcatgcctcagcctcccgagtagccgggactacaggcgcccgtcaccatggccggctaattttttgtatttttagtacagatggggtttcactgtgttagccaggatggtctcgatctcctgacctcgtgatccacccgcctcggcctcccaaagtgctgagattacaggcgtgagtcacggtgcccggcctttttttaaattattattattatttttttatttttgagacacagtctcactttgtcacccaggctgaagtacaatgacaagatcatagctcactgcagccttgacctcttgggttcaagggatcctccttcctcagcctcctgagttgctaggactcttcgtatgagccaccatgcccggccatggttggcatttcttttttctttttccttcttttttttttttttttttgagacggagtttcactcttgtcacccaagctgtagtgcaatggcgctatcttggatcactgcaacctccgcctcctgggttcaaatgattcttctgcctcagcctcccgagtagctgagattacaggcacccgccaccacacctggctaatttttcttttttttgtttccttttggttttttttgagacagagtgtcgctctgttgcccaggctggagtgcaatggcgtgatcttggctcactgcaagctccgcctcccgggttcacgccattctcctgcctcagcctcccaagtagctgggactacaggcgcccgccaccacgcccggctaattttttgtatttttagtagacccggggtttcaccgtgttagccaggatggtctcaatctcctgaccttgtgatccgcctgccttggcctcccaaagtgctgggattacaggcatgagtcatggcgccaggc

SEQ ID NO: 1242749 - DNA, 4001 bp, Homo sapiens
ttctcgtgggcaaaatggacacttaatgctttagcatttattattctttctagttatgtgacaggcactggctgatgacagtgactgtgcaagcagccctgccctggctatcctgaatgcaaatgaaagataacaggatgaaacctatacaatgacagtccaaggccagagccagtgatcaggctgcaaggcggcaaaaagcaggatgacaggacggtgcgatttccaagcagtttccgtgtagaatggttcaattctagccctgagtttaaggctcaaaacttgtccatttgttttgtttgtttgtttgagacgaggagtctcgctctgtggcccaggctagagtgcagtggtgccatctccactcactgcaacctctgcctcccaggttcaagcgattctcctgcctcagcctcccaagtagctgggattacaggtgcacaccaccacgcccggctaattttttttttttttttttaagacggagtctcgctctgtcgcccagcctggagtgcagtggcgggatctcggctcactgcaagttctgcctccccggttcacgccattctcctgcctcagcctcccgagtagctgggactacaggcgctcaccaccacgcccggctaatttttttgtatttttagtagagacggggtttcactgtgttagccaggatggtctcgatctcctgacttcgtgatcctcccgcctcagcctcccagagtgctgggattacaggcatgagccaccacacctggtcttaatttttgtatttttagtagaaacagggtttcatcaagttggccaggcgggtctcgaactcctgacctcaggtgatctgcccgcctcaagcctcccaaagtgctgggattacaggtgtgagccaccgtgcccaaccaaaacttgttaatttcaacactaagattggagatcctaagcttcctcccaccacccaatgtccctcacaacttggttccacaccccaggctggcagacaccaggaccaggagagatgaagaaaagcatcattaatcccccatctaaaagcagttcctcccccaaagccagtggataactccctggccccacccttctgacctgccctaggcgccggagagcatagcctcaaggctgagggccttttcctatgaattctagacgaaaatgccgtgctagactcccctcaacaccagttctcccaccgccacctggcctgcacctgtgtcccctcagtgttggaggtcgtggagggaatcacttctgactagggccgggctgtggcctcccactgcccagagtactttcattgtacggcttggacctaaacttttcccggccggcagcggtcggagggcaggctctactcattagccgggggccccaggcctgggcggagcagaccaccttggggagactggctggggcacggtgccccagcgctcaggtccggcccttaggcctctggccgagttagggtcggggccgcgctggtataggcgcccaggcctctcccctctgagtgtgcccctgcccctttctttttcatgcactgcatgaaaaagactctgtccgagggcgccccggcccacccgaccaccccagcctgggagccgcgcgccctggaggggttctatagctgcagtggccgcaaggtccgctcccccaggtgagggggaggggggaggggcgccccgccccgagaggcaaggcaggtgggggaggggcgccaggggtttcggagtctttgtccctggggaggggggaggggcgtttaacccttgggagccccgaaggaccctatcacctcggaggcttgggcgcggaccggccgaccccctcagggactcgcccatccaggtggccgcagcccgagttcgcacgcacccctacccacgccgccaccaccctgcacccggccccaagaggcgtctctccaacacgcacactagccccggactcacctgcgaaggagataagggaaattcctaggccgagtgtcgggacaggggcggaggcgggggtcttaaagaagcggtgacgtcactggaccaccgccccggaggaggggcagagaccctgtccctgacggcagcgggcgtgcgaatcccaggcttgtcagaggggggcgctggaggctggggtcgctgggcccgcctcgggctggcagacgtccagactcacccagggtgagggcgccaggcttagggtagaacagagcttgagactccgcttcaccacttaagcagcgcggtgacatggggaactcacctaaccttcccgagccttcgtttcctactctgcaaaatggagataacaagtctgcattttattatgtaactacgtcctaaggtacaaattaaagggcatactattggtattattttagagaaatattttcactgtgtcacccaggctggagtgcagtggtgcgatcacggctcactgcagtctcgaccttctgggctcaagcgatcctcccgcctcagcctcctgagtagctgggactacaggcagcacacgccaccgtgcccagctaatttatgttttgttttgtatagacagggtcttgttatattgcccaggcgtctcgaactcccggactcaagcgatccgcccgccttggcctcgcactgcgctgggattaccggcttaagccaccgcgcccggccagataatattatttttatgttgctggttttttgttgttgttgttgtttgtttttgagatggagtctcgctctctcgccaaggctggagtgtggtggcgcgatcttggctcactgcaagctctgccttccgggttcacgccattcacctgcctcagcctccagagtagctgggactactacaggtgcccgccaccacccccgactaatttttttgtatttttagtagagacggggtttcaccgtgttagccaggatggcctcgatttcctgacctcgtgatctgcccgcctcggcctcccaatgtgctgggattacaggcgtgagccaccgcgcccggcctgttttgttttttgagatggaggccctctctgtcgcccagtctggagtgcaatggcgctatctcgactgactgcaacctccgtctcccaggttccagaaattctcctgcctcagtctcccgagtagctgagattacaggcgcccactaccacgcccggctaacttctttcttttttttatttttagtaaagacgggggttcaccaagttggccaggctggtctcgagctcctgacctcaggtttaattgttataccccccgggcccttaacaaagctgtagtggccaggctaacctgggcaacatagtaagaccctggtctctacaaaaaatacaaaaattagccggacgtggtggggcagggcctgtggtcccagctacttgggaggctgaggtgggaggctcacctgagcccagagagccgtgatcgtaccactgcactccaggctgagcaagagtgagacgcaatctcaaggggaggtggggggaaggaagctgcagtgatctctgcatggattggtcgtgtgtctgatttctttttattgtttgtttgtttgtttatttatttatttatttatttatttatttatttgagacggactctcactctgtcgcccaggctggagtgtagtggcgcgatctcggctcactgcaacttctgcctcccgggttcaagagattctcctgcctcagcctcctgagtagctcggattgcaggcgcgcgccaccacgcccggctaatttttgtatttcgagtagagacggcgtttcaccacgttggtcaggctgctctcgaactcctgacctcgtaatccgcctgcctcagactcccaaactgatgggattaaaggcgtgagccaccgcgtccggccgttcgtgtctgatttctatatgtgctgccgaagcgagcactcgtgtctaatttttgatttccccacaccacgcacgctggactagatcaccggctgggcaaggaagggggtctgcgtccctg

SEQ ID NO: 1242750 - DNA, 4001 bp, Homo sapiens
agagggaggtgatgggcaggccctccctgacaactccagggttgggagggcatggtctgctccctggttttggagccaacgagctgctgctgttttggtgaggccagggttcctggggcaggggagggctcagaagagaaggaaggccagccagtgtcctgggcaacggaaggaaacaattactggggaggtgggggcaggccagggttcccaacacctctaggctgcccaacttgggggagaacatcaaaggggaccccactgagaagagctcagccaggccagctgacccagccctgcagccaggtgtagcttgggcttttggaaagtgggttttcctggggaaggaggttgtgatggagcagggcatctggtcatcaggccaaggtcgaaagggcggggcagtggggagcagtgggctcccaggggaaacctccgcctcacacgtagtccctcttgtccagtccagatgcacccgagcgggaggggatggagtagcccagccgaggtccgcggggccgctcgacctggggcggggggcacgtgcagcagaggagccccccgcccagcataagcagtgcagccgccgcccagcccaggtagagggaggcccccagctcccgcttgagggcctcagccaccagggggttgtagaagtcctggatgatggcgtgcgccgtccagcacacagggatgagcaccaggatgccggcgaggaggaggatgacccccgcggtgagcacgatacgggccttggcaccttcgtcctccacacacgtggtacactgggcacctgtgatggccaccaggaggccaagcagggccagcaggagggcaatgacacagagggcacgtgcggcctgcaggtcctgcggcagagccagcagtgagtcgtacaccttgcactgcatctggcccgtgctctgcaccacgcaggacatccacaggccctcccacaccacctgggccaccacgatgctgttgccgatgaaggcggtcaccttccacaggggcagggcgcaggacaccagggtccccagccagcccagcacagccagggtcatgcccagcagttctaagccggtcgaagccatctggcccctcggttaggtcttctcagccccaggcggcctaggtgactcagagggtgtgtctggtgtgctgggtgggtgtctctgtgtccagcaggagggggaaggcttgttggtgtccccaagccaggccagtcctcagttccatgaaaggcgcctcttgaaaggcgcctcctctccgtgcctcttgcaggtgtttctggtcctcgcggagcacaaagcagactcgtagtcccgctcggctgagtggtgggtgtcacctcgaggggcctccgcccatcggatgccctgagggtgctgctgctcttaccaccccgctgtcacacctgggctgagctcgcacaggccctccagacgcactgccaggctgaggacagccacgtctcctgccggctggcgcaggttcccactgagcgactctgacagtgccacctggggactctgcgggctctcggctgcaggcggggttttaaggcccaggcaggggaggagcagagtgaagtgcagggaggccgggataggggagacctgagccacggggagggtgcggggctgggggttcgtgggcagcggatggatgaggggcctgggggccagcgggggatgctgcggctgagtggggacaggggaggaaaagcgtccgtagcatctgtgcatgtgggaaccaagggtaaaggaggggaagatggaggacaagctgaggaagaagagacggatcgggggtcaaaaaagtaacaggctcaggacagaaacacacacagggggcgtcggcttgccttcctgagcctcctccttccgcagcccctccccagctgcctctgctctcccccagccgagtttcgtgatgcaaacatgccccagctccccgagtatcgcacactcccgcccgcctgggactctctggaatctgatccatcccccgtctcagcccagtggccccgctagctcccgggggaaggtccccgcctgcactgttccccagacgacaggtgcctggcgcccagctcaggtggcatcgccctggcaacggcctagaaaactaccccccacttcaacctcagctcaggtgcgctcttgccacccctgctgctgaaaccgaggctgagctgagctgcctaagatctccagaggccagaggatgaggggcctgttgtggaggttggggggcactcaggaagggggatggaggcgggacgggctggggctggaacccagggtggggcacagcccaggacccggttatgttccatgggtgggtgagtgagtggccagtcaggcctcccgggccaaaacaccccagaggtgggcacgggggttaagtccagggactcaagtgtccccaagacctgccttccagtttgcaggaaagccttacctccggaaaaaccccctcagagcctgtgattccactcatggggacagcctgggagtcccactgaccaaagctcaaatcctgacccctacctgggacaggtcatggaaggtcgaggtccttaacctcctttggtcaaagacccacttgagaaaccccgtgggactcacagaacatgcacccacaaacatgtgcccctcatttgtgggggagggttcatgaactccttcaagcccctgcctgggtgctaagaacctctgaggattgttgtctgaaaaaggggtgtgacggccaggtgcggtggctcacgcctgtaatcccaacactttgggaggccaaggtgggcgattcacgaggtcaggagttcgagaccagcctggccaacatggtgaaaccccgtctctactaaaaatacaaaaaattagatatcccagcactttgggaggccgaagcaggtaaatcggaaggttaagagatcgagaccatcctggccaacatggtgaaaccccgtctctactaaaaatacaaaaattagctgggcgtggtggcacaagcctctagtcccagccactcgccactctggaggctgaggcaagagaatcacttgaaaccgggaggtagaggttgcagtgagccaagatcgtaccactccactccactccagcctggcgacagagagagactcctcaaaaaaaaaaaaaaaaaaaattagctgggcgtggtggcgggtgcctgtaatcccagctacttgggaggctgaggcagaagaatcgcttgaaccggaggcagaggttgcagtgagccgagatcgcaccactgcattccagcctgggtgacagtgggagactctgtctcaaaaaaaaaaaaaaaaaaaaaggaaaagggatgtgaggaacattgtctccattcatacactttccagggaggtacagaggatcctcagagtgggccctcacctgggactgcctctcacctgcctggtgctgggagggctggggtgtgctggagcccactggccagtgcgggcagggctggaggtgcccaccacacacatctggtggctgcaccacttcacggcattgccttcggggagccagtggccaggcacacccctgctcagtgcccctcacctagtgggtgggacattgtgtataaagggctctaacctcaaggagcggtcagggttcaaacctaggggtatgagcatcgcttctgcgaaagggttttagcatcttttgggtccgggcactgaggctcacgcctgtaatcccagcgcttaagaggccaaggtgggaggattgcttaaggccaggagcttgagacccacctgggcaacacagtgagaccccatttctaaaataaaaaaaaaatatatatatatatatatacacaaaaattagctgagttaggtggttcctgtctgtagtcccagctactcgggaggctgaggtaggaggatctcttgagcctaggagttagagtctgcagtgagctatgattatgccaccgcactccatcctaggtgagaccctgtctct

SEQ ID NO: 1242751 - DNA, 4001 bp, Homo sapiens
gtcctgggcctctttcctccccttgtcttctctcaccacctcctgctctaaaagtgcccctcaccacatagtgaaccctcctgctccccactcttcaagactcacaaacgtttactaaatgctgctccatgctagaaaggtcacagctgagaactgtggccctgccactacccctaccccactcccggggacacatgagaagtccctatctaattccctcccaccaatcctttccacagccccgtctcccttccactacttcccaccatatccctaaccctatcttcctcctttcccattagtagtctcaggatctccttctggaaacctgcctatttcttgacactgaagatttgtctactcccctcttcagcatccccgccatttccctccctaaagcctttcccttcatacagatctctatttttcatcatcctccacacctgcccccaaatcctgggtcctggcctgcatgctcttcatctctccccaattcaatcattcatttttccactctttaagtaagcagagagcagtcctagatgctgggaatacaactgtgaacaaaccaagcagtctgtgccctcgtgaagtgccagtttaacagaagacagaaaataagtataaataaaaaataaagaataatcgcagagagtggagaagcactcaatgaaagcaagagaaagatgtgatggataggaactgggatggggggagcacgttaggtagggtggtctgggaaggcctcgctgagctgataataaacacagctaccactactggccacctactatgtacctactgggtcagtcaccttccatttccattacaatgttcacgatccccatttgcaaatgggaatctggaggctcagagaggtgaagtaatttgcccaaggtcacacagccagtaaatggtggtttcaggatttgaacgcaggtgtggctgcaaagccagcctcttaatttctgcactcctggtcccaagaccctatctgccacctgtcctcccccagagctgtagagtcattccctcctcagaggtctctatttttcatcatcctccccaatcgccccaaaatcctgggtctcagcgtgcatgcccccagcttagactcccctcggaaaataatctgttcttttataataattaatgccgtttaatgagcaattgtacgtgttctgagcttaacgttcattctcttatccaaccaactctcaacacaatagcaggaagcaggtgctgtcactctactctttttacaagtggggaacctgaggcctacattcacacagatagattcggacccagatctgcccgactccaggacccaggcctttgaccctctaagctgttcagtttaagaagtaccccgccaggaaacttggtggacaccgtcaagaacaaagtctgtgtccataaactgaaatcgcatcctctcgctttacaggtggggatacggagactctgagaaattaagcgacttgtccaaggtcacacagccaagagcgacggggtcagggttcgaacccaggcgccctgactcccgagccctcgctcttaaccaccacacgggcttccccgggcgcccttcgccgccgctctcacgcctcctagagccccgacccggagctcggcgccccgtccccctgtccagccccgaggcctcccgctacgccccccacactcacttgaggtggtccaaggagtggatgttgcgggaagtcttgccatggcccccgcccacccagctccgcgagcggccaaacatgtcggcggccccgacccgtctctcgtctcacggtctcatgccggaccagcagagcggcccagcgcccgcggcggtagcacaagcggaggatgcggcggcggaggcggtggaggaaccgcgagccgccttcctccccggcccacagcccagcactgacattcagccggaaccggccgttcgaccgccgcgctttacggccgccgccgcgtggggcgctgggaaatgcagttcacccgcgtggccttcggcggcaggactccgcgaacggactacaaggcccggcatgcatcgtgcaaccgcgggcctacggccatccacaaaaggcggggcgagaggaggagcgaccgcagaatcctccgggtgggcgggaattggaagctttgggcgcagtcccggagagggaatcggcgtagatgggtcaaggaaagtcaccactgtagtaacaattactagatttataataagaataagaatagtattggatggtgtatactatgcaaagccactatcctaagggctttacatattaaggtatttaattttcacaaccatcctatgaattgggtactattatcgaacctattttatcatcagggaaacggagtcactgagaggttgacttacccaagatcatgcagttaacaagtggcaaaaccagggttcataaccacgcacgcacccttatttttcattccctttataaaccaaaacggcactagataacaaccttatttgtcctgacagcctttttctttttccacttcaattaagtgtgtgtgtgtgtgtgtgtgtgtgtgtgtgtgtgtgtgtgtgtgtgtgtgtgtgttggaaaaggctggatgcaacaatgcaccaaactgaacattttgtacttccagaggattcctctggtcttcagccagaatccatgctatttcccaaagtaccacgttaaaatgaaaaaggaaacacccaactttctgcatgagccagaatatatctaacttctaccctggattagaagtggtaagttcagtgtgggcaagacttctcaagtttaccatccattcattcattcagtcacttctacatatcaaccttattaaaggtccactgtgtcccattaactctgctcaagaaagaactgggccagaggccaatgttctccccagtgcctagcacaaggtttggcacatagcaggtgtttaacaaatattggtagagtgcatgaatgagtaaaggtttgtttcaccttcagcagttggagaaatggataagagtggagagttaatggtttgtcctgtaattcatatagagtggggcaagacaaagtcatggagcaaaaaagaacaggatctggcctccaaagaaacacacccaggctcagaaatgtaggatccctgggctcgtatttttcatctgtaaaaagtacgcacatacatactacactgccttgtatacctccgattaagcgatgcatgtaaaatactcagctcagtgtggcctgagatttaaaggtttcttgaactgctttggaaggctctttgggcgagatcatgttttcctgaaagacatgcaacggttacccaagagcaggggaaccagtgggtgggagagactcacttttctgtgtacttcacggttgtttgaatgtttagccatgtgtattattgcttttaaacatgattcacaaagtaaaaagaaacaaaaagcatccttatggttgaagatctgaactacctcggaatctctttattcaggtgttccttaactctaggatgcaggttccgtagtgggcggaccttccagcaaccagagtttggagaagcgaaggggacactggtggatctccaccatgaaaattggcgctttgggaatgtccaaaatttccagggcaaccgtccgtcgcccctccccgaccccgcctccttttaaaggagaaacggagtcccaaagaggcatgcagcaaggtgcagcggtagcccgggtttccttcggcttttgcggccttagcattatgtctaggtttgaactgtgttcagtctcttttacctccccctattcgatacgcagagcgaattcgatttgagatctgagggcagacccgaaccaggaaagcaactcagacgctagggccccgaggggcggagcgaagcggtacccgccccctggcggccggagccaatcagcgcgggcgttgagccggccaattagcgcgtgcagggggcggcctgccaatgagctcggggcc

SEQ ID NO: 1242752 - DNA, 4001 bp, Homo sapiens
tgacagtcccaaccccgcagccccagccgggctggtggggaattctatacccccgacccccggcccctgctgaaaatgtggaaaatgtggacgagtgagtgagcagagaacatgggcaaggcccgtcctcgtggctcagataagctcaggaggaggcgctgggtccttgccgcacagaagcccctccccagcccagcacgaccttctccctccctggcccggccgcccatcctgcagggctcctcgtgaagctccccttccctggaggaggggatccggctcctcctgtggctcctggtctctgtgacaacaagatgccagggaaggcccaaggtcctgcccttcaggcgagtgggagccaaggggcccgacctcctgaactgagggtggggggttaagaaattgcagagacccccagcaaccagggcctccgtccctcagggacaaggtggctggctgtgcctgcccaccctggtcaagtggaagggcacctggacaggcgtggcctcctgagccgccctctggggtccgcgcctccggccacccccctggcagagcccagctgggtcgggtactcaccagcctccgcatgtcagccgcagggggctggacccagctgcgcaggcggttgtgcagggagaggagcaagaaactctccttcctgttcagggctggggtggggagagaaggtcaggcagcccgaggatggggggacctgaacccaacacacggcagaataagcatgtgtccctgcccttggaaaacaagatgggagaggagtgtggtgggtgcaggggacgtggggcatagcaatggagcgaggctgagagagagaccaggtacagcaggcgtgggctgagtgctggggttggggtggcgggagggaacagcggtgcgggctgggtgtaggggccagccctggctcccgcaggcccctgtctggggctcctccgggccacggatttctccaggccccagccacagcgcccctcggcgttcctccttgaccccagccctggtcctccttcctcctccttcctccccagtccagcatccacccctcaccgcccccgggctgtcccagggcttcctcattaaaccacccgcacggcctggggctcaggcctgggaccgggcttccagaagtctcctagcacccactcctcagagctcgtaatggtgcctccacctacctcctcaccaggtgtcccttacctccggccatcggagcctgctcctgcagctggggtggccacacctctgcccaggcggtgccaaggagggccaggagcacagccaggagatgcccccggccaggggaggtctctggatgcagcatgggtctgttgggcccgtcaggcgctccgtgcacagcctggctcagccacccggcttgtttctcaggctggatggagctattcacaatctccaggagtcaggctgggctggtggacaaaagagggaggctggtgagtgagtaatcagtgtgtccagacagcctcctgttggcgctggcatgaaaagagacaactccgggggatgcctgcctgctccggcctcggcctggccagcccgcccccgacagcaggcagagtggcgtgcactgacccgcggcccctgctaatcattgtgggattattagcacccttggggagcccccagagaccccgctgattggcccgcggacattccagtgctgcagattagtgaccgatggccgtgtcctggctgggacagtgtcctccgagcccactgatggcttccgctccccagccccgggccctgggaggaggacctcggctatggtccttctggtgagcaggaactgggcaagaccccaggggagttctttcctttcttgggaagctcgtcccaaccccccagccatgaattaaacataggcaagaggtaaccgcacaccagaggggtgcaatctgtgggctcaaaggggggtgggctgaggccgcacctgcacgaggaaaagggtgccttaggaaagtctgtctgggcagggtcgggggctgggcccagccccggtgcccaccaccctcacccacgtgactacaggccagggggggagtgaggcaggaggagtcaaagcaggcggggaccagagcacgtgatgccctgggctgactccagtcctgctgggatcacgtccgcctctagaaaaacaggcggcgtagcaggtgggcagcacgttgccatgatgtgccgtggcccggccgtggctggcgtgatcccaccagagtgagctggagcagatctgcaccatgggccaagtttctcagaaaatacatggcttcctgcgggctgcaacctaatgcccacgttcctctcggggaagaccaaaggttattcaaccagggcaaaggacagccttgcaaaccaactacgtcctccttctggagtttgtgtgacccctggcccctgagcccacaccctctcggagcggggttccaactctgtggaagctctgctgagatgcaggtagggttggctttcctggggaaacaccagtggaatgtggctatcgtcatggatgccagggatggggatgaggccaggcatacaggccatgaaggcggtctggaactgcatgtcccccacaatacctaggggctcaggagtttcttctccctcaaacagaaacccagcaccctcagggtcactgcgtgtgggtcctagcaatgcttaatagctacctgttttttgatgtatttttatttttattttttagacagtttcactctgccactcaggttggagtgttataatctcagctcactgcagccttgacctcttgggcccaagtgatcctcccacctcagcctcccaaggagctgggaccaggtgtgtgccaccatgcctggctaattattatcattttttttggtagagacaggatttcatcgtcttgcccaggctggtctccaactcctgggctcaagggatcttcccaccttggcctcccaaagtgctggggttgcaggcatgagccaccacacctggccaagccacctgtgtttatggagctcacaaagcctgtttgcatgtgtgagttcaagttattgccacaagaacctggtgcagtagcagatgggatgcccgtcgtgtagatgaggaaacgggcttagtgtgtctaaggggcttgtccaaggtcactcagcgagtgcatggagcatcccagctaatccaaggtctctgccttcccattcccaacgctttaattcacatcctgatctttcccagtgcagtttccacagctctgctatgccgggtgataaaagacccacttcctacaattgggcttccatggcaaacacggccagttgacccatatagtatgatgccaggcacttgggacaggcgggagaaaaagatattttggggattagggtggagcaacttttgaagggtcccatggccctggctcactgcaagaagagtcccaggccgggtgtgatggctcatgcctgtaatcccagaactttgggaggccaaggcaggcggatcacttgaggtcaggagctcgagaccagcctggccaacatggtgaaatcctgtctctactaaaaatacaaaaattagctgggcagggtggtgggtgcctgtagtcccagctactcggtaggctgaggcaggagaattgcttgaatctgggaggcggaggttgcagtgaagcaagatggcaccactgcactccatcctgggcaacagagcaagactctgtcccacccccgacccctcaaaaaaaaaaaaaaagagtcccaggagagcaaggttcatgggccagaagagaagctgagtggataaaagattaatgagacactggaagacctaggctggaaccgacacgctgtgtgaccctgaggatggcactcccactcctgaaactcagtatccaatggcgtagagctgggatgacccctctgctgggcccctaaccagggcattgcaacttggtttccatggtactccctcctgggttcagacttttt

SEQ ID NO: 1242753 - DNA, 4001 bp, Homo sapiens
tgcccagggtctgagcctgaggagaggcagagccactcagggctgggaatcggggagaagcgaccccccgcatttagccaccccacccccacctcctgggaaactgaccctagagtgctcaaggtcgccactgtggccgcctgccttggaggagttcatgggaagcagccatggggaaccctcccgcccccaccaccctgccctggctccctggcctgctaacatgggctggggctgctggggtcccagacaagggggggcagcgtttctgagcctccagatgacagtcccaaccccgcagccccagccgggctggtggggaattctatacccccgacccccggcccctgctgaaaatgtggaaaatgtggacgagtgagtgagcagagaacatgggcaaggcccgtcctcgtggctcagataagctcaggaggaggcgctgggtccttgccgcacagaagcccctccccagcccagcacgaccttctccctccctggcccggccgcccatcctgcagggctcctcgtgaagctccccttccctggaggaggggatccggctcctcctgtggctcctggtctctgtgacaacaagatgccagggaaggcccaaggtcctgcccttcaggcgagtgggagccaaggggcccgacctcctgaactgagggtggggggttaagaaattgcagagacccccagcaaccagggcctccgtccctcagggacaaggtggctggctgtgcctgcccaccctggtcaagtggaagggcacctggacaggcgtggcctcctgagccgccctctggggtccgcgcctccggccacccccctggcagagcccagctgggtcgggtactcaccagcctccgcatgtcagccgcagggggctggacccagctgcgcaggcggttgtgcagggagaggagcaagaaactctccttcctgttcagggctggggtggggagagaaggtcaggcagcccgaggatggggggacctgaacccaacacacggcagaataagcatgtgtccctgcccttggaaaacaagatgggagaggagtgtggtgggtgcaggggacgtggggcatagcaatggagcgaggctgagagagagaccaggtacagcaggcgtgggctgagtgctggggttggggtggcgggagggaacagcggtgcgggctgggtgtaggggccagccctggctcccgcaggcccctgtctggggctcctccgggccacggatttctccaggccccagccacagcgcccctcggcgttcctccttgaccccagccctggtcctccttcctcctccttcctccccagtccagcatccacccctcaccgcccccgggctgtcccagggcttcctcattaaaccacccgcacggcctggggctcaggcctgggaccgggcttccagaagtctcctagcacccactcctcagagctcgtaatggtgcctccacctacctcctcaccaggtgtcccttacctccggccatcggagcctgctcctgcagctggggtggccacacctctgcccaggcggtgccaaggagggccaggagcacagccaggagatgcccccggccaggggaggtctctggatgcagcatgggtctgttgggcccgtcaggcgctccgtgcacagcctggctcagccacccggcttgtttctcaggctggatggagctattcacaatctccaggagtcaggctgggctggtggacaaaagagggaggctggtgagtgagtaatcagtgtgtccagacagcctcctgttggcgctggcatgaaaagagacaactccgggggatgcctgcctgctccggcctcggcctggccagcccgcccccgacagcaggcagagtggcgtgcactgacccgcggcccctgctaatcattgtgggattattagcacccttggggagcccccagagaccccgctgattggcccgcggacattccagtgctgcagattagtgaccgatggccgtgtcctggctgggacagtgtcctccgagcccactgatggcttccgctccccagccccgggccctgggaggaggacctcggctatggtccttctggtgagcaggaactgggcaagaccccaggggagttctttcctttcttgggaagctcgtcccaaccccccagccatgaattaaacataggcaagaggtaaccgcacaccagaggggtgcaatctgtgggctcaaaggggggtgggctgaggccgcacctgcacgaggaaaagggtgccttaggaaagtctgtctgggcagggtcgggggctgggcccagccccggtgcccaccaccctcacccacgtgactacaggccagggggggagtgaggcaggaggagtcaaagcaggcggggaccagagcacgtgatgccctgggctgactccagtcctgctgggatcacgtccgcctctagaaaaacaggcggcgtagcaggtgggcagcacgttgccatgatgtgccgtggcccggccgtggctggcgtgatcccaccagagtgagctggagcagatctgcaccatgggccaagtttctcagaaaatacatggcttcctgcgggctgcaacctaatgcccacgttcctctcggggaagaccaaaggttattcaaccagggcaaaggacagccttgcaaaccaactacgtcctccttctggagtttgtgtgacccctggcccctgagcccacaccctctcggagcggggttccaactctgtggaagctctgctgagatgcaggtagggttggctttcctggggaaacaccagtggaatgtggctatcgtcatggatgccagggatggggatgaggccaggcatacaggccatgaaggcggtctggaactgcatgtcccccacaatacctaggggctcaggagtttcttctccctcaaacagaaacccagcaccctcagggtcactgcgtgtgggtcctagcaatgcttaatagctacctgttttttgatgtatttttatttttattttttagacagtttcactctgccactcaggttggagtgttataatctcagctcactgcagccttgacctcttgggcccaagtgatcctcccacctcagcctcccaaggagctgggaccaggtgtgtgccaccatgcctggctaattattatcattttttttggtagagacaggatttcatcgtcttgcccaggctggtctccaactcctgggctcaagggatcttcccaccttggcctcccaaagtgctggggttgcaggcatgagccaccacacctggccaagccacctgtgtttatggagctcacaaagcctgtttgcatgtgtgagttcaagttattgccacaagaacctggtgcagtagcagatgggatgcccgtcgtgtagatgaggaaacgggcttagtgtgtctaaggggcttgtccaaggtcactcagcgagtgcatggagcatcccagctaatccaaggtctctgccttcccattcccaacgctttaattcacatcctgatctttcccagtgcagtttccacagctctgctatgccgggtgataaaagacccacttcctacaattgggcttccatggcaaacacggccagttgacccatatagtatgatgccaggcacttgggacaggcgggagaaaaagatattttggggattagggtggagcaacttttgaagggtcccatggccctggctcactgcaagaagagtcccaggccgggtgtgatggctcatgcctgtaatcccagaactttgggaggccaaggcaggcggatcacttgaggtcaggagctcgagaccagcctggccaacatggtgaaatcctgtctctactaaaaatacaaaaattagctgggcagggtggtgggtgcctgtagtcccagctactcggtaggctgaggcaggagaattgcttgaatctgggaggcggaggttgcagtgaagcaagatggcaccactgcactccatcctgggcaacag

SEQ ID NO: 1242754 - DNA, 4001 bp, Homo sapiens
acccccacctcctgggaaactgaccctagagtgctcaaggtcgccactgtggccgcctgccttggaggagttcatgggaagcagccatggggaaccctcccgcccccaccaccctgccctggctccctggcctgctaacatgggctggggctgctggggtcccagacaagggggggcagcgtttctgagcctccagatgacagtcccaaccccgcagccccagccgggctggtggggaattctatacccccgacccccggcccctgctgaaaatgtggaaaatgtggacgagtgagtgagcagagaacatgggcaaggcccgtcctcgtggctcagataagctcaggaggaggcgctgggtccttgccgcacagaagcccctccccagcccagcacgaccttctccctccctggcccggccgcccatcctgcagggctcctcgtgaagctccccttccctggaggaggggatccggctcctcctgtggctcctggtctctgtgacaacaagatgccagggaaggcccaaggtcctgcccttcaggcgagtgggagccaaggggcccgacctcctgaactgagggtggggggttaagaaattgcagagacccccagcaaccagggcctccgtccctcagggacaaggtggctggctgtgcctgcccaccctggtcaagtggaagggcacctggacaggcgtggcctcctgagccgccctctggggtccgcgcctccggccacccccctggcagagcccagctgggtcgggtactcaccagcctccgcatgtcagccgcagggggctggacccagctgcgcaggcggttgtgcagggagaggagcaagaaactctccttcctgttcagggctggggtggggagagaaggtcaggcagcccgaggatggggggacctgaacccaacacacggcagaataagcatgtgtccctgcccttggaaaacaagatgggagaggagtgtggtgggtgcaggggacgtggggcatagcaatggagcgaggctgagagagagaccaggtacagcaggcgtgggctgagtgctggggttggggtggcgggagggaacagcggtgcgggctgggtgtaggggccagccctggctcccgcaggcccctgtctggggctcctccgggccacggatttctccaggccccagccacagcgcccctcggcgttcctccttgaccccagccctggtcctccttcctcctccttcctccccagtccagcatccacccctcaccgcccccgggctgtcccagggcttcctcattaaaccacccgcacggcctggggctcaggcctgggaccgggcttccagaagtctcctagcacccactcctcagagctcgtaatggtgcctccacctacctcctcaccaggtgtcccttacctccggccatcggagcctgctcctgcagctggggtggccacacctctgcccaggcggtgccaaggagggccaggagcacagccaggagatgcccccggccaggggaggtctctggatgcagcatgggtctgttgggcccgtcaggcgctccgtgcacagcctggctcagccacccggcttgtttctcaggctggatggagctattcacaatctccaggagtcaggctgggctggtggacaaaagagggaggctggtgagtgagtaatcagtgtgtccagacagcctcctgttggcgctggcatgaaaagagacaactccgggggatgcctgcctgctccggcctcggcctggccagcccgcccccgacagcaggcagagtggcgtgcactgacccgcggcccctgctaatcattgtgggattattagcacccttggggagcccccagagaccccgctgattggcccgcggacattccagtgctgcagattagtgaccgatggccgtgtcctggctgggacagtgtcctccgagcccactgatggcttccgctccccagccccgggccctgggaggaggacctcggctatggtccttctggtgagcaggaactgggcaagaccccaggggagttctttcctttcttgggaagctcgtcccaaccccccagccatgaattaaacataggcaagaggtaaccgcacaccagaggggtgcaatctgtgggctcaaaggggggtgggctgaggccgcacctgcacgaggaaaagggtgccttaggaaagtctgtctgggcagggtcgggggctgggcccagccccggtgcccaccaccctcacccacgtgactacaggccagggggggagtgaggcaggaggagtcaaagcaggcggggaccagagcacgtgatgccctgggctgactccagtcctgctgggatcacgtccgcctctagaaaaacaggcggcgtagcaggtgggcagcacgttgccatgatgtgccgtggcccggccgtggctggcgtgatcccaccagagtgagctggagcagatctgcaccatgggccaagtttctcagaaaatacatggcttcctgcgggctgcaacctaatgcccacgttcctctcggggaagaccaaaggttattcaaccagggcaaaggacagccttgcaaaccaactacgtcctccttctggagtttgtgtgacccctggcccctgagcccacaccctctcggagcggggttccaactctgtggaagctctgctgagatgcaggtagggttggctttcctggggaaacaccagtggaatgtggctatcgtcatggatgccagggatggggatgaggccaggcatacaggccatgaaggcggtctggaactgcatgtcccccacaatacctaggggctcaggagtttcttctccctcaaacagaaacccagcaccctcagggtcactgcgtgtgggtcctagcaatgcttaatagctacctgttttttgatgtatttttatttttattttttagacagtttcactctgccactcaggttggagtgttataatctcagctcactgcagccttgacctcttgggcccaagtgatcctcccacctcagcctcccaaggagctgggaccaggtgtgtgccaccatgcctggctaattattatcattttttttggtagagacaggatttcatcgtcttgcccaggctggtctccaactcctgggctcaagggatcttcccaccttggcctcccaaagtgctggggttgcaggcatgagccaccacacctggccaagccacctgtgtttatggagctcacaaagcctgtttgcatgtgtgagttcaagttattgccacaagaacctggtgcagtagcagatgggatgcccgtcgtgtagatgaggaaacgggcttagtgtgtctaaggggcttgtccaaggtcactcagcgagtgcatggagcatcccagctaatccaaggtctctgccttcccattcccaacgctttaattcacatcctgatctttcccagtgcagtttccacagctctgctatgccgggtgataaaagacccacttcctacaattgggcttccatggcaaacacggccagttgacccatatagtatgatgccaggcacttgggacaggcgggagaaaaagatattttggggattagggtggagcaacttttgaagggtcccatggccctggctcactgcaagaagagtcccaggccgggtgtgatggctcatgcctgtaatcccagaactttgggaggccaaggcaggcggatcacttgaggtcaggagctcgagaccagcctggccaacatggtgaaatcctgtctctactaaaaatacaaaaattagctgggcagggtggtgggtgcctgtagtcccagctactcggtaggctgaggcaggagaattgcttgaatctgggaggcggaggttgcagtgaagcaagatggcaccactgcactccatcctgggcaacagagcaagactctgtcccacccccgacccctcaaaaaaaaaaaaaaagagtcccaggagagcaaggttcatgggccagaagagaag

SEQ ID NO: 1242755 - DNA, 4001 bp, Homo sapiens
ctgagccatggagctccatttgcacctttatggaaatgaagttttctaagactttgacaaaagggccctggaaagggtgccagctgccagccaacgaccaccgcagcccctcctggggtcccaggcaggagtacccaaccacggaggtcacagctgggagcacccctggttgcccagggtctgagcctgaggagaggcagagccactcagggctgggaatgggggagaagcgaccccccgcatttagccaccccacccccacctcctgggaaactgaccctagagtgttcaaggtcgccactgtggccacctgccttggaggagttcatgggaagcagccatggggaaccctcccgcccccaccaccctgccctggctccctggcctgctaacatgggctggggctgctggggtcccagacaatggagggcagcgtttctgagcctccagatgacagtcccaaccccgcagccccagccgggctggtggggaactctatacccccgacccctggcccctgctgaaaatgtggaaaatgtggacgagtgagtgagcagagaacatgggcaaggcccgtcctagtggctcagataagctcaggaggaggcgctgggtccttgccgcacagaagcccctccccagcccagcacgaccttctccctccctggcccggccgcccatcctgcagggctcctcgtgaagctccccttccctggaggaggggatccggctcctcctgtggctcctggtctctgtggcaacaagatgccagggaaggcccaaggtcctgcccttcaggcgagtgggagccaaggggcccgacctcctgaactgagggtggggggttaagaaactgcagagacccccagcaaccagggcctccgtccctcaggggcaaggtggctggctgtgcctgcccaccctggtcaagtggaagggcacctggacaggcgtggcctcctgagccgccctctggggtccgcgcctccggccacccccctggcagagcccagctgggtcgggtactcaccagcctccgcatgtcagccgcagggggctggacccagctgcgcaggcggttgtgcagggagaggagcaagaaactctccttcctgttcagggctggggtggggagagaaggtcaggcagcccgaggatggggggacctgaacccaacacacggcagaataagcatgtgtccctgcccttggaaaacaagatgggagaggagtgtggtgggtgcaggggacgtggggcatagcaatggagcgaggctgagagagagaccaggtacagcaggcgtgggctgagtgctggggttggggtggcgggagggaacagcggtgcgggctgggtgtaggggccagccctggctcccgcaggcccctgtctggggctcctccgggccacggatttctccaggccccagccacagcgctcctcggcgttcctccttgaccccagccctggtcctccttcctcctccttcctcctccttcctccccagtccagcatccacccctcaccgcccccgggctgtcccagggcttcctcattaaaccacccgcacggcctggggctcaggcctgggaccgggcttccagaagtctcctagcacccactcctcagagctcataatggtgcctccacctacctcctcaccaggtgtcccttacctccggccatcggagcctgctcctgcagctggggtggccacacctctgcccaggtggtgccaaggagggccaggagcacagccaggagatgcccccggccaggggaggtctctggatgcagcatgggtctgttgggcccgtcaggcgctccgtgcacagcctggctcagccacccggcttgtttctcaggctggatggagctattcacaatctccaggagtcaggctgggctggtggacaaaagaggggggctggtgaacaaaagaaggaggctggtgagtgagtaatcagtgtgtccagacagcctcctgttggcgctggcatgaaaagagacaactcccggggatgcctgcctgctccggcctcggcctggccagcccgcccccgacagcaggcagagtggcgtgcactgccccgcggcccctgctaatcattgtgggattattagcacccttggggagcccccagagaccccgctgattggcctggggacattccggtgctgcagattagtgaccgatggccgtgtcctggctgggacagtgtcctccgagcccactgatggcttccgctccccagccccgggccctgggaggaggacctcggctatggtccttctggtgagcaggaactgggcaagaccccaggggagttctttcctttcttgggaagctcgtcccaaccccccagccatgaattaaacataggcaagaggtaaccgcacaccagaggggtgcaatctgtgggctcaaaggggggtgggctgaggccgcacctgcacgaggaaaagggtgccttaggaaagtctgtctgggcagggtcgggggctgggcccagccccggtgcccaccaccctcacccacgtgactacaggccagggggggagtgaggcaggaggagtcaaagcaggcggggaccagagcacgtgatgccctgggctgactccagtcctgctgggatcacgtccgcctctagaaaaacaggcggcgtagcaggtgggcagcacgttgccatgatgtgccgtggcccggccgtggctggcgtgatcccaccagagtgagctggagcagatctgcaccatgggccaagtttctcagaaaatacatggcttcctgcgggctgcagcctaatgcccacgttcctctcggggcagaccgaaggttattcaaccagggcaaaggacagccttgcaaaccaactacgtcctccttctggagtttgtgtgacccctggcccctgagcccacaccctctcggagcggggttccaactccgtggaagctctgctgagatgcaggtagggttggctttcctggggaaacaccagtggaatgtggctatcgtcatgggtgccagggatggggatgaggccaggcatacaggccatgaaggcggtctggaactgcatgtcccccacaatacctaggggctcaggagtttcttctccctcaaacagaaacccagcaccctcagggtcactgcgtgtgggtcctagcaatgcttaatagctacctgttttttgatgtatttttatttttattttttagacagtttcattctgccactcaggttggagtgttataatctcagctcactgcagccttgacctcttgggcccaagtgatccttccacctcagcctcccaagtagctgggaccaggtgtgtgccaccatgcctggctaattattattattttttttggtagagacaggatttcatcgtcttgcccaggctggtctccaactcctgggctcaagggatcttcccaccttggcctcccaaagtgctggggttgcaggcatgagccaccacacctggccgagccacctgtgtttatggagctcacaaagcctgtttgcatgtgtgagttcaagttattgccacaagaacctggtgcagtagcagatgggatgcccgtcgtgtagatgaggaaacgggcttagtgtgtctaaggggcttgtccaaggtcactcagcgagtgcatggagcatcccagctaatccaaggtctctgccttcccattcccaacgctttaattcacatcctgatctttcccagtgcagtttccacagctctgctatgccgggtgataaaagacccacttcctacaattgggcttccatggcaaacacggccagttgacccatatagtatgatgccaggcacttgggacaggcgggagaaaaagatattttggggattagggtggagcaacttttgaagggtcccatggccctggctcactgcaagaagagtcccaggccgggtgtgatggctcatgcctgtaatcccagaactctgggaggccaaggcaggcggatcact

SEQ ID NO: 1242756 - DNA, 4001 bp, Homo sapiens
ttctaagactttgacaaaagggccctggaaagggtgccagctgccagccaacgaccaccgcagcccctcctggggtcccaggcaggagtacccaaccacggaggtcacagctgggagcacccctggttgcccagggtctgagcctgaggagaggcagagccactcagggctgggaatgggggagaagcgaccccccgcatttagccaccccacccccacctcctgggaaactgaccctagagtgctcaaggtcgccactgtggccacctgccttggaggagttcatgggaagcagccatggggaaccctcccgcccccaccaccctgccctggctccctggcctgctaacatgggctggggctgctggggtcccagacaatggagggcagcgtttctgagcctccagatgacagtcccaaccccgcagccccagccgggctggtggggaactctatacccccgacccccggcccctgctgaaaatgtggaaaatgtggacgagtgagtgagcagagaacatgggcaaggcccgtcctcgtggctcagataagctcaggaggaggcgctgggtccttgccgcacagaagcccctccccagcccagcacgaccttctccctccctggcccggccgcccatcctgcagggctcctcgtgaagctccccttccctggaggaggggatccggctcctcctgtggctcctggtctctgtggcaacaagatgccagggaaggcccaaggtcctgcccttcaggcgagtgggagccaaggggcccgacctcctgaactgagggtggggggttaagaaactgcagagacccccagcaaccagggcctccgtccctcaggggcaaggtggctggctgtgcctgcccaccctggtcaagtggaagggcacctggacaggcgtggcctcctgagccgccctctggggtccgcgcctccggccacccccctggcagagcccagctgggtcgggtactcaccagcctccgcatgtcagccgcagggggctggacccagctgcgcaggcggttgtgcagggagaggagcaagaaactctccttcctgttcagggctggggtggagagagaaggtcaggcagcccgaggatggggggacctgaacccaacacacggcagaataagcatgtgtccctgcccttggaaaacaagatgggagaggagtgtggtgggtgcaggggacgtggggcatagcaatggagcgaggctgagagagagaccaggtacagcaggcgtgggctgagtgctggggttggggtggcgggagggaacagcggtgcgggctgggtgtaggggccagccctggctcccgcaggcccctgtctggggctcctccgggccacggatttctccaggccccagccacagcgctcctcggcgttcctccttgaccccagccctggtcctccttcctcctccttcctccccagtccagcatccacccctcaccgcccccgggctgtcccagggcttcctcattaaaccacccgcacggcctggggctcaggcctgggaccgggcttccagaagtctcctagcacccactcctcagagctcataatggtgcctccacctacctcctcaccaggtgtcccttacctccggccatcggagcctgctcctgcagctggggtggccacacctctgcccaggcggtgccaaggagggccaggagcacagccaggagatgcccccggccaggggaggtctctggatgcagcatgggtctgttgggcccgtcaggcactccgtgcacagcctggctcagccacccggcttgtttctcaggctggatggagctattcacaatctccaggagtcaggctgggctggtggacaaaagagggaggctggtgagtgagtaatcagtgtgtccagacagcctcctgttggcgctggcatgaaaagagacaactccgggggatgcctgcctgctccggcctcggcctggccagcccgcccccgacagcaggcagagtggcgtgcactgacccgcggcccctgctaatcattgtgggattattagcacccttggggagcccccagagaccccgctgattggcctgcggacattccagtgctgcagattagtgaccgatggccgtgtcctggctgggacagtgtcctccgagcccactgatggcttccgctccccagccccgggccctgggaggaggacctcggctatggtccttctggtgagcagaaactgggcaagaccccaggggagttctttcctttcttgggaagctcgtcccaaccccccagccatgaattaaacataggcaagaggtaaccgcacaccagaggggtgcaatctgtgggctcaaaggggggtgggctgaggccgcacctgcacgaggaaaagggtgccttaggaaagtctgtctgggcagggtcgggggctgggcccagccccggtgcccaccaccctcaccaacgtgactacaggccagggggggagtgaggcaggaggagtcaaagcaggcggggaccagagcacgtgatgccctgggctgactccagtcctgctgggatcacgtccgcctctagaaaaacaggtggcgtagcaggtgggcagcacgttgccatgatgtgccgtggcccggccgtggctggcgtgatcccaccagagtgagctggagcagatctgcaccatgggccaagtttctcagaaaatacatagcttcctgtgggctgcagcctaatgcccacgttcctctcggggaagaccaaaggttattcaaccagggcaaaggacagccttgcaaaccaactacgtcctccttctggagtttgtgtgacccctggcccctgagcccacaccctctcggagcggggttccaactccgtggaagctctgctgagatgcaggtagggttggctttcctggggaaacaccagtggaatgtggctatcgtcatgggtgccagggatggggatgaggccaggcatacaggccatgaaggcggtctggaactgcatgtcccccacaatacctaggggctcaggagtttcttctccctcaaacagaaacccagcaccctcagggtcactgcgtgtgggtcctagcaatgcttaatagctacctgttttttgatgtatttttatttttattttttagacagtttcactctgccactcaggttggagtgttataatctcagctcactgcagccttgacctcttgggcccaagtgatcctcccacctcagcctcccaaggagctgggaccaggtgtgtgccaccatgcctggctaattattattattttttttggtagagacaggatttcatcgtcttgcccaggctggtctccaactcctgggctcaagggatcttcccaccttggcctcccaaagtgctggggttgcaggcatgagccaccacacctggccgagccacctgtgtttatggagctcacaaagcctgtttgcatgtgtgagttcaagttattgccacaagaacctggtgcagtagcagatgggatgcccgtcgtgtagatgaggaaacgggcttagtgtgtctaaggggcttgtccaaggtcactcagcgagtgcatggagcatcccagctaatccaaggtctctgccttcccattcccaacgctttaattcacatcctgatctttcccagtgcagtttccacagctctgctatgccgggtgataaaagacccacttcctacaattgggcttccatggcaaacatggccagttgacccatatagtatgatgccaggcacttgggacaggcgggagaaaaagatattttggggattagggtggagcaacttttgaagggtcccatggccctggctcactgcaagaagagtcccaggccgggtgtgatggctcacgcctgtaatcccagaactttgggaggccaaggcaggcggatcacttgaggtcaggagctcgagaccagcctggccaacatggtgaaatcctgtctctactaaaaatacaaaaattatct

SEQ ID NO: 1242757 - DNA, 4001 bp, Homo sapiens
aaacccttgataaggacccttgttatccccacttggggctcagagaggtgaggaaacttgagtctcagagaggtcccatgggcacaagctagtgaaggacagaaaatacccctagttactcccgctttcaaactcagtcttggccccttcccacttttgctgggcagaaaggcaagatcttgggatatacgaggcgcagtctgcaaggatattttgttcaacttctttcctacttgcttattgtattggtgaggaaactgaggtccgagagtaaggaggcaagtcactgctatgaatggaatgtctgtgtctctcctcttccctgcccccaattcatatgttaaagctctgactcccaatgtgatggtattgggaggggggacctttgggaagtgattagatttagatgggatcccatccttatgatgggattagtgtgcttataagaggaagagaccagagctttctcttactctgccatgtgagggtacagtgagaaggcggccatctgcaagccaggaagagagtcctcaccaggaataaaatctgctggcatcctgatcttgaacttcccagcctccagaactgtgagaaataaatgtttgttgcttaagctccccagtctgtgatattcgcagcctgagctgatgaatacactcagagagtttaggacagaactgaaaccccttgcccaaatgagctaagactatcccttattgttaccactagggatgctagattaacaaaaaaaaaaaaaaaaaagaaggatacctagttaaatttgatttcaggtaaacaaacagataatttttagtataaatacgtcccatgtaatatttggggcatgcttacactaagaaataatttattaatatttatttattggtattttatctgacaaccctatcaaccctctgtttaaagtcactctaacactatcacaacccaataatttggccttatgagaatctccatctaggtatttcattattagttttacttgaacggggatttaaaaatgatatctctgccactgctatgataaataaatccatatatgaacataaacaagcctggaaagaacctggtagaggtgacagtcaagactcttggccaccaaattataggattcagaactcttctcatccagatgagggtcccccagaatcagtaacccagccttcctattgcaaagtggaagaagttgagctcatttgaagaccctcaccctccatatgggacactgggaggccacatgcccaaggctgacaggttctcatccctggggatgccccacaaggctgggggttgctgggccaggcctccagggaggccattagagggacaagtctccctccctgcgcacctaacctctggtggcactgcagcagctctgaaagctccctgggaaggctgtcacagccaaggtggggttggggcccagatgccaaatccctcacaaaactaccatgttcagatcttcctgtagtgccagacactgtgcaaagcactttcctcatgttatcttatctgccttgcacagtagcccaaagagaatgccattgcgacccaactttctagaagaagctgaggctcagagagatcaagaaacttcctctatgtcacacagcttgtaaactgcaaaactgggattcaaacccaggactttttgtgtctgggcctagaagagtgcccatgacaaagctggtagggggaaagctgtcaggagactcgggtcaggccaccccaaccccccaacagaagctgccaggcctcaccgatagaataagttcctgagagtgtactcctctccacctgctcccagccctggtccctgcacttacctggactgatactgatgtctgtttgtggaaaggcctgtgcagagtggagggtcaggaaggctgcagcccacagtgtccacctttgcatcctgagctcctagaaagcaacctcccagcctgagtggaggagagaggctttttggctggagcttgggtccaggattgctctcctagggtcagatggagcctggcaggagctgggacagactggatggactccagtcccctcctcttttcttccttttctcctccctcctcttcacactgttggagacagctcagaatgacagctgaaagcaaagcagcctaggccagcccccctcaaagaaccaagagacattttagctcccaagcttgcctctgaaccaagacaaaatttagctctcagtcttgtctctgagtcacgctgtggccttgggtgtgcacttctctgagactcagtttccccctctgtaaaatgggatggtaacgaaactcacattccagcctgtcacaggagacaaagcatctcacctccctcagagtagatatgtactggaaggtaaaattactgcaagtaagcattgagcgcagaggtctcctgggccatggatgtcatttgtttggtctgcagagttttaaattctaaaaaatttgttaaggtataaaaccaagagatgctaggtataagtccggatttctgccttctattggaaaatcggaagacctaacgaaacatagccctcatttctacagggcaacaattgcatggagctgagaaagagcatctctttcagccaggctctttgagcttcggttcaccaaggtctccaccccatgggtctgatcctgacagcatccaccgctgaggaagcaccaggaagcctgtgtgagtcagcctcctttcctctcccttcacctctcagggtctctcagggttcctccgggggttaaaggaggcatctgtagaagattcaacagagtgttgcacagaataagtgctccacaaagaggtgcaagtgtcatcactagtgcatagctctactgtgtggcttgctcagaattcaatgtttaaaaacccctagtgttttcattgggatctcatcgctcttttggagaatcaatatttctaaaaaccacagtctttctcccccactttctgtgtccttagacaagtcactttgcctctctgaacctcagttgcctcctctgtaaaatgggggataagtagagtacctacctcacaaggattaaatgaagtaatttgtttctaaaacttggcatagatgctggcaagtagtaggtgctcaataaatgacagcaacatttgctattgttgtcattgatctagtgcaaggctttccttggcatcacccacatcccctgcccctgcactcccttattcctctccagaaatgctctgccaggtgccctgacacctcatgtggctggcactcacagggactggaatgtgtctgtttggcttccaagtctttctggaacacctgctgctgtgcttgtgagaaataacttaacttgtgcccacacagcttgccttgcctgctggcactggagctgaaagtctgccaaggtctgactcagaatatgagcacagctcaggctcagcttcaacctacaggatgcctcctcgggtagatctgttgcctcaaaactagtgtactggtgcatatcccagagcatgcacacttacttatttataaatgggatatatttattacatgtttataagtgatgtgcaggtacgactcactgtactaatatattatttctgttataaaacacacacacccacattggacattattaaaggttgataaaagatataaatgtggaagaaagtttggatattttctccctactccctatcatcttgcaagctgaaatttgggggctcctgctgtcatgttcctgggtgctgcttggaatttaaaagtgtctatcttagtctgttttgtgctgctatactagaacacctgagactggtaatttataatgaacagaatttattggttcacagttctagagacagggaaggccaagatcaaggtgttggcatctggtgagggctttcttgctgagtcatcatatggtggatagtgagagggtaaaagagagatgagtcacagagagagagagacagagctttttaaagagggg

SEQ ID NO: 1242758 - DNA, 4001 bp, Homo sapiens
tctgtttagcagaagccattttatctgcgtgcacatggatcaatatttctgatcccctataccccaggaagggcaaaatcccaaagaaatgtgttagcaaaattggctgatgctatcatattgctatggacattgatcttgtgttgcaattttttaataagtaaaaattatgatttttacttgatcttagagatcatgaacctataagttatgatgaatcttgcttggaggacacattggagaaagacctattgagggatggtgaactcgcatatgtatctcttgctgctgcgacaggcctcatcactccacttgccctgagctgattgggagaacaggacacagttttctcgcttgccaccgttaggctgtgcacggtcccagttgaggaaggagatagcgattccgttgacgtcaacaaacttgccttccgtgaccatgtcattgatgcccagccaaaagtcattgacacctggcaggctccttttaccatagtcttggagggcgttgatttcgtcggagttcctggggataaccaggattcctcctttggaaatgcagtcttcattggcctcatggaaatgcttcaaaccttctgaagcaaggtagcatttcttgtgaactttagtgcctcggagacagactgtgaagatgtgaagtgtaacatattaagatgcattttgagtgtattatgactagggctggacctggcaaatagcaataagtatttgtggaatgaagtatgataatgatgagacaacagttaaaattttctatgtgccggacaacatgctaagcattttacataaattaagttacataatcctgacaaccccatgaagttgtattttattacccctatttttacatatcaggatatttaggcttagagaagttgttacttgtaacaccttagcatttttttttttttttttttgagttggagtctcgctctgtcgcccaggctggagtgcagtggcgccatctcggctcactgcaagctccgcctcccggattcacgccattctcccgtctcaggctcccgagtagctgggactacaggtgcctgccaccacactcggctaattttttgtatttttagtagagacgggatttcaccgtgttagccaggatggtctcgatctcctgacctcatgatccgcctgcctcggcctcccaaagtgcttggattacaggcgtgagccactgcgcctagccacatttttttaaatgaagtaatttttgcagcatgtgagatcacagctacccaaatgcaggtctgccctatcccaagacatggccttaaacttcatgctgttctgatatatacatgcttgctactctgtgttggatttctttgggagttttggaactagatggtatttaatatttatttttaaaaatatttgtttaaaaaaaaaatgcttggcgtggtggctcacacttataatcccagcacttagggaggcagaagcgggtggatcacaaggtcaagagttcaagaccagtctggccaacatagtgaaaccccgtctgtactaaaaatacaaaaaattagctggatgtggtggtgtgtgcctataatcccagctactcaggaggctgaagcaggagaatcgtgcgaacctgggaggcagaggttgcagtgagccgagattgcgccattgtactccagcccgggcaacagtgcaagactctgtctcaaaaatcaatcaatcaatcaatcaattaaattctagttttgcatgtggagagacagggattttcttaagcagataactgagccttggtaatattgtttagattattcaggataaactgagcataaagatagttttaggccgtagcactggagagtcaggcctcagagcccatagtgcctgggtttaggtctcatctctgacatttaactagctgtgtatctcttgaacaaattacttaccttctttgtgcctcattttcctcatctgtaaaattaggatcataatagcttaagttgctggaggattaatggatttgtgtttataaagaatttctagtacctgactgtgggtaaaggatgaaccaaactcaccttctgcataagcatttgactgtcttttaactttctaattctgttcccccggaagcctgataaagggagtatgtcacccttgttactaggcaacattgcttgtggtaaaaatgaccccaggttggtaacatgcatctggtctgggagttataaatacttgatggaaagccgtaacttcagtcttccctgaaggcagtaacttgtaatgaggcaggtctcttgtgaggaacctcaacaccttgcttttgaaattgctacaaaggatattagctccttgggggatgagccttgtaaaccagggctgttcccaaacctgcccacatggctcacttcctcaccccttggagaatagctcctgggcagtagcgcatgtggctgcataactgtggggaggaacgctggcgctgccctgttggcaagctgcggttctaacccatgtccttccagcatcttaggctgggtgtggcccgagagagtcctggtggcctgataggcacttagctatcatccaataaatgctaatcattttagtcatttcatactggcttcattctgtttcactactctttagagaataagtatggactgacttttcaaatttattcctgaactacttatttttatttctataccacccatatataggagaatgggattgtaaatgaagctgatttcctaaaacaatcatctcccggcattggggccctcttattggccacattattgatttgtcaatgtttcttttaaaaagacgtcccccagaaattgacccagaaattttcctgtctcctttgggacaaggcactgagaaggtctgcaccttacctgtctgcagggcttgaatttccttcaaggcattgacttctgtccagagcttttcaatttgagtcttcagatctccatccttgtctggggaaaattttagggtgggatggggtaggtggatgaaaagcgtatgattaaaataaaatcaagctttggaatgtaggacccaaggcaatagtggttttggtgaacctgagcccagtgtatacaaaaaataatgcgtgaaaataacttggggctggcgaagtggctcacgcctgtaatcccagcacttggggaggccaaggcgggtggaccacttgaggccaggagttcgagaccagcctggccaacatagcaaaaccctgtctctactaaaagtataaaaattagctgggcatggtgttgaatgcctgtaattccagctatttgggaagctgaggcatgagaactgcttcaacttgggaggcagaggttgcagtgagcaaagatcattccactgcactccagccttggtgagggagtgaaactctgtctgaaaaaaaaccaaacaaacaaaaaaacaatgaatgaaggaaagaaggaaggaaaaaaagaaaaagaaaataacttggacaggaagattcttaagagcttcatggcaatcataatactagaaggtccttctgtgagatgaggctccttctgtctctccagtcacatcctgtgactctaggcttgttgactttcagggtcatctgagaatgagctcaatctcatcttccctgtgtgttccttctgctaggatcactcttgctccagcgctttcctgtattcttagcaagcttaaatatctcctcttctgagaaggctttcctggttatactataatttagtatcccttctgctaatctgtctttgaaacttatttttcttcattctctagtctcagttcacattttattttattccatattttatagagtattctgtatattttcttttctctattttactttatttcatctgtcttattattcttggttcttctgatgcttaacatgatacttggtacataataggtgttcataatattgtctagtgaatacacactttatggtatacaaaattgttttcacttgct

SEQ ID NO: 1242759 - DNA, 4001 bp, Homo sapiens
aagaggtgtgtacctagtcagttttgttttgttttgtttttaaataaaagcatgtgcatgcacatgtggttatgacagaggcagtggggaagaagggggtaaagaagtgggaaagaaggtagggagagagaagagagtgggaggaggaaggggagggaggcccctggaaaacctggatgtgacctaagctgcgattacttcagaaacacccacacagcacccacatgcacactcagtcatgttcagaccctcttcacacattcctactgggtgatcgccactctcacgaggagtgccactccatccagcagtgaagaaacgctggctacagaaatgtaccatgtcacccagtatcttctctctcccctctcctttcgataccatcttcagcaatatgtttcatctactcatgagaaatattttaatctttcaccgaaagaagtacagtatttcttaaggaaaaaagattccacttaagaaaccttgcactagccgggcgcggtggctcacgcctgtaattccagcactttgggaggccgaggctgacgaatcacgaggtcaggagatcgagaccatcctggctaacacggcgaaacctcgtctctactaaaaatacaaaaaattagtcgagcgtggtggcaggcgcctgtagtcctagctacttgggaggctgaggcaggagaatggcgtgaacccaggaggtggagcttgtagtgagccaagattgtgtcactgccctccagcctgggcgacagagcgagactctgtctcagaaaaaaaaaaaaaaaagaaaccttgcaccagacctaaattttgtaaataaatgtccctgaaaaaatggtactttataatccttaaagcacaagacccctttttacccaccagccatctgtcatgtgaaatagactgtaaccttgctgaaatttgtgtatgtgtgtgttgttactaatggagtgaaaataaggaaatagtcataatctgaaatatcctgaaatgaaaatgatgcagaggatgtgataaaacatgaccctctgtcttgtttttttcttttgcttaggtttcaacgtattgcaaacacctcgctatcatcattgttcttttcaatttctttaacctgttaacccaattcaagtcactcaaaatttgaggttcctgggagattcagttttgcatcacaatgccttcaaatactagatgactttgcatattgacttttttaagttggagagattcaatgtctctgacatgaaaaagtttaaatatatggtataggttgtccttatgctgccaaggatatggaaatacagctaatgataactaatgacaaaacaggaagtcaccattaccaaaatctctatcctctgctacacattgaataagattatagttatcttaaaatataactgaattgagttactcaatatctactagtgaaacagtgtgctcagttaatacattcttcttgccccatattaataacaccagattttcagaaatccacttgagcttcctctgaagcacattctatttaagcccacctaacaaaaaatatacaacacagaattcttttactatcaaattttttccctgttgtttttttttaaaacccagcagcctggtttctttaaaataaactatcccagagcattacaagttcacttaatcccctgaaatgccatatagggatgatggcatggtgccatcaccgaagatagtctcctggaggagtttgaaaattaacattgtccagcacctccccacactgtctaagcctagaattttgcttgattgagaagccccattacctctcactcgacgtttgctgtgcttcctggcttttaatctggatgtgtggctggtggtctggtccaggagtaaggtgatcaccaggatgcaaattacaagtccattctttgccatggctctggggcaagcctgctgagccatgttgccagcccccttagagcagctatggaaggagactacacagctacatcttgctctgggatgcctggggctggcttataaaagtgagcttcggaggttggctggaatcctgctgacggaatgtttgaatgcctctgctggccacagcataaggtggcctcttgttcttgtgcctcatgttaggctttctatttatttaatttctgctgcatttcctagtgatttgcctttttggagtgtgtcaaacttaactacaggtttagcctgctttctttttttaaatttaaactctgagaagattggggtctttgtgaaaaattctttgatttggaactctgaaattcactaaatgttctggaaaatggattcaatttagttttcagggcaaaaaaaaaattggagaaaaaggaaagttactgcgtgtgtgtgtgtgtgtggtgccacagcaccattcaagccagtgtgtctactcatactcatgtgtctgcgcagctcaagtgtagcttggaagtagttttctcagtgggatttatggagattgcggaaatagatactcgatgataaaatatagggctttcctccattaggattttgtagactcatcaagaattacttccttggggctgcatgtggtggctcacacctgtagtcccagtgggaggccgaagtgggtggatcccttgaggtcaggagttcgagaagagcacgggcaacatggcgaaacaccatctctacaaaaaaataaaaaaattcatcaggcatggtggcacacatttgtaatgccagctacctgggaggttgaggtgtgagaatcacctgagccccaggagttcgagatcactgccctccagcccgggcaaattactttcttgggaaaatgtaccttacagtgaaaagaaaattttaaaaagtgaattatttccattagaataagaattaatgtaatagatcaatagctattttttcaggtcctcaccaatcatttttccttgaacacattaaacaacactttcaagtgcatgatgtaatagcacagaaacctagtgagagactcgccgggcgtggtggctcacgcctgtaatcccggcactttgggacgctgaggtgtgtggatcacttgaggtcaggagttcgagaccagcctggccaacatgaggaaaccctgtctctactaaaaaacgcaaaaagattagttgggcgtggtggcaggagtctgtagtcccagctactctggaggctgaggcaggagaatcgcttgaactcacaaggcagaagttgcagtgagccgggattttgtcacagcactccagcctgggcgacggagccagactccttctcaaataaaaaataaaaataaaattaatgtaatgagaaactcaattattcctacctttaaccataggctttaagggcaagttttcgggacctgataggcttttgcatcaaaagcaatggacttgcattacaggaatagccgagagggaggaatttagacccagggaaaggccttcctgcattccacatgcttatttggctgaccaggtgcaaatggagggcagtggttgcagatttggaaggtctgaaggaccaagttcattttgcctttgttttttctttgagacaatacagaaagaatcaaggaatgagtgcttccttctgaatcttaatgagaaaaaccacagtctatttcatcttcatttcctccaagttaaagccattttgtaacctaccaatatagtaagaccatagtaagaccactgatgtaggaaagtctgacatgattcagcaaagtaactgtacaattaaagatctgacctccggtgttgactctttgtaccaacatgggcagttaatgcatgggcatttgagaacattgtgaagacaggctgagctcagttcacaacctaccgcttagctgtgtgatctcaggcaagtcaataaacctctataaggcttctctcatcttaacagtgggggctaggaatgcttattttacagggctgttggaaagattaaatgagataatggctatgaagcacttagcgcaatgtcca

SEQ ID NO: 1242760 - DNA, 4001 bp, Homo sapiens
ggtcacagagagtttctgggagaggccttggaggctggaagtgaatccaagtctgtgatcccaaagcccctatgtcagggcggggcacggtggctcacgcctgtaatcccagcactttgggaagtggaggcaagcggatcacctaaggtcaggagttctagaccagcctgaccaacatggtgaaatcctgtctttactaaaaatacaaaaaattagctgtgtctggtggcacgcacctgtaatcccagctactcggggagctgagacaggagaatagcttgaaccttggaggtggaggtttcagtgagccgagattgtgccactgctctccagcctgggtgatagagtgagactctgtctcaaaaataaaataaaattaaaaaaaaaaaaaaaaaaagctgggcgcggtggctcacacctgtaatcccagcactttgggaggccgaggcgggcggatcacgaggtcaggagatcgagaccatcctggataacgcggtgaaaccccatctctactaaaaatacaaaaaaatagccgggcgtggtggcaggcgcctgtagtctcagctactccggaggctgaggcaaaagaatggtgtgaacctgggaggcggagtttgcagtgagccgagattgcgccactgcactccagcctggaggacagagagagactccgtctcaaaaaaaaaaaaaaaaaaaaaggttcaggcccggcatggtggctcatgcttgtaatctcagcactttggaaggttgaggtaggaggatcacttgaggccacgagtttgagaccagcccaggtcccatagtgagacccccatctctataaaaaaatataaaaattaggcagatgcggtggtgcacacctgtagccacacctacttggaggctgaggtgggagaatcacttgagcccaggagttccaggctgcagggagctgtgattgcactactgcattccaacctgggaaacagagcaagaccctgtctcaaaaagaaaaaaaaataagataaaataaaataaattaaaaaaataaaaaagttttagtagtgatgcatttatttaaacgttcactaggaaaacgctggttttccaagtggagtcgtgatttaaagttttctttttaaaaatatgtgcactaaaaaacgttaaggctgaattggctggaagaaaaaagtaaataatcctacaggtggtaggtatgaggatcttgctaaatccggaaggtgataaggagtgaagtttggaaattttacatgctgcccctggggcaaaccagtggattcagtaaatatttgtgggttcagctcctttgcgcagcttaactctttcttccccctttcctccggtcacttccctcttctcatgccattgtcactcgctgaagtctcaggccactcaccagaagcccaccgcgttcttccaatgcgcgccctgatggtccaacagagggagccggggctccgggacggtctcctcccctgggagagcgagaagagggcatgacccccacctactctcaggtgcacgaccgctccttgcgtgtcctcccggggccgagtcagctctcattcccctcaggtgggctgcgagccagaggtggtcgttccatgagggtgggcgggaatactcaccctcggaatccgaaaagcgccgccgcgagcctgcacagcctcccatcgcatcaagttcaggtcccccgagggtccagggtcatagagtgtccaaagggggctcccacgggagggatgagggtctgcgacaggtgacaaggatcaacgcccgattgccggtcccagctccggcttgtctagggcactcgcgccccgcgatccatcaaggaagctgggggctccatctcgagcgccctacgacccaccacgccccacccatcgtactctcccccgccccgtctacagcagggaccctgaggcctgtacctttaagagcagcagaatgttctgcactatgcagaggccgtttgtcggatcacgtgacagcacccgcgtgttcccccatcacgtgctcagaggttttccctacttccgggtcctctctgtcttcgctttgggccttctcggcttcggagcgtgaaaaagggaggggctggagaaccctggaaccgcaggttttaaactggagcgggtgggagcagcaagcagagccgtgaccttagatcagtggcgcccaagaccgagacagtagcctgccagcaccagttatgactgtgggaggcttcagctcctttccttcagcactcacttgccagaaacaaatatggccacctgcctactcccttttttttttttttttttttgaggcaggactgtttctggttgcgaacaaagacgaccagcttcaggtcattcttatccccatctgttgaccttacaaattgttttagagacctaagtaaacataacactcatctaaagggatttcgtgaatgatctattggcagtatccaagatgttaagagatccctatttccaaattatcctagaaccaaaaaatatcacagcacttcaacccctggtgttacagatgagaaaaccaaggtacaaatatatatatatatatatataacaaaattagccgggcatggtggcgcattcctgtagtcacaggtaccttggaagctgaggtgggaggatcacttgtgcccaggaggttgaagctacagtgagctatgatcacgccactgcactccagcctgggtgacagagtgagatcctgtctcaaaaaaagaaaaagtaaaaaataaaataaaaaaaatatatgtatatgaaaaaaattggaaagttgctgacaatcattcatacaatgttagacctaaaggtgaccttagagacctgtatggtgataagaaatagagcaccagaggcagggagccattgggttggctccaggctgctgcaggattcctgcctccatcaaaggtggtgcttagaccagattttttttttttttttgacagggttttgctctgttgcccaggctggagtgcagtggcaggatcttggtttgctgcaaccttgacctcccaggctcaggtgatcctcccacctcagcctcccgagtagctgggacagcaggtgcgcaccactgtgcccagctaatttttgtgttttttgtagagactggattttgccacgttgcccagggtggcctcaaactcctgagctcaagcaatccacctgccttggcttcccaaagtgctaggactacaggcgtgagccactgcacctggccagactaaatgattttaaggcctaagattctgatgctgtgatttcatagaattgccctaattggaataggaaagtggggctggggaggggagaaggagggtatggggaagagaagtagagcaaggtcactttatgtagttccaaataaggaatcatacccttaccttcttctaggtggaaagcggcatcctgcattctcttcttgtccttggcctcatctctgctatgggctgtgccacctctatatgctctttctcaccaccaggccttcagaatgcagttggaaatgtgccctctcgtctgggtgtggtggctcatgcctgtcatcccagcactttgggaggccaaggtgggcagatcacctgaggtcaggagttcgaaaccagcctggctaacatggtgaaaccctgtctctactaaagatacaaaaattaaccaggtgtggtggcacgcacctgtaatcccagctactcgggaggctgaggcaggagaatcacttgaacccaggaggcagaggttgcagtgagctgagactgcgccactacactccagcctgggtgacagagtgagactgtctcaaaaaaaaaaagaaaagaaaagaaaagaaatgtgccctctctagtgtgcctcccaggtcactcagctgatggaaaatggaatcctactaacgtgcagggctctagaaattcagcagcgtttcatacatggcatctgccatcaaggaagtcacaggaaggtgggaggcagacacag

SEQ ID NO: 1242761 - DNA, 4001 bp, Homo sapiens
gtctggtggcacgcacctgtaatcccagctactcggggagctgagacaggagaatagcttgaaccttggaggtggaggtttcagtgagccgagattgtgccactgctctccagcctgggtgatagagtgagactctgtctcaaaaataaaataaaattaaaaaaaaaaaaaaaaaaagctgggcgcggtggctcacacctgtaatcccagcactttgggaggccgaggcgggcggatcacgaggtcaggagatcgagaccatcctggataacgcggtgaaaccccatctctactaaaaatacaaaaaaatagccgggcgtggtggcaggcgcctgtagtctcagctactccggaggctgaggcaaaagaatggtgtgaacctgggaggcggagtttgcagtgagccgagattgcgccactgcactccagcctggaggacagagagagactccgtctcaaaaaaaaaaaaaaaaaaaaaggttcaggcccggcatggtggctcatgcttgtaatctcagcactttggaaggttgaggtaggaggatcacttgaggccacgagtttgagaccagcccaggtcccatagtgagacccccatctctataaaaaaatataaaaattaggcagatgcggtggtgcacacctgtagccacacctacttggaggctgaggtgggagaatcacttgagcccaggagttccaggctgcagggagctgtgattgcactactgcattccaacctgggaaacagagcaagaccctgtctcaaaaagaaaaaaaaataagataaaataaaataaattaaaaaaataaaaaagttttagtagtgatgcatttatttaaacgttcactaggaaaacgctggttttccaagtggagtcgtgatttaaagttttctttttaaaaatatgtgcactaaaaaacgttaaggctgaattggctggaagaaaaaagtaaataatcctacaggtggtaggtatgaggatcttgctaaatccggaaggtgataaggagtgaagtttggaaattttacatgctgcccctggggcaaaccagtggattcagtaaatatttgtgggttcagctcctttgcgcagcttaactctttcttccccctttcctccggtcacttccctcttctcatgccattgtcactcgctgaagtctcaggccactcaccagaagcccaccgcgttcttccaatgcgcgccctgatggtccaacagagggagccggggctccgggacggtctcctcccctgggagagcgagaagagggcatgacccccacctactctcaggtgcacgaccgctccttgcgtgtcctcccggggccgagtcagctctcattcccctcaggtgggctgcgagccagaggtggtcgttccatgagggtgggcgggaatactcaccctcggaatccgaaaagcgccgccgcgagcctgcacagcctcccatcgcatcaagttcaggtcccccgagggtccagggtcatagagtgtccaaagggggctcccacgggagggatgagggtctgcgacaggtgacaaggatcaacgcccgattgccggtcccagctccggcttgtctagggcactcgcgccccgcgatccatcaaggaagctgggggctccatctcgagcgccctacgacccaccacgccccacccatcgtactctcccccgccccgtctacagcagggaccctgaggcctgtacctttaagagcagcagaatgttctgcactatgcagaggccgtttgtcggatcacgtgacagcacccgcgtgttcccccatcacgtgctcagaggttttccctacttccgggtcctctctgtcttcgctttgggccttctcggcttcggagcgtgaaaaagggaggggctggagaaccctggaaccgcaggttttaaactggagcgggtgggagcagcaagcagagccgtgaccttagatcagtggcgcccaagaccgagacagtagcctgccagcaccagttatgactgtgggaggcttcagctcctttccttcagcactcacttgccagaaacaaatatggccacctgcctactcccttttttttttttttttttttgaggcaggactgtttctggttgcgaacaaagacgaccagcttcaggtcattcttatccccatctgttgaccttacaaattgttttagagacctaagtaaacataacactcatctaaagggatttcgtgaatgatctattggcagtatccaagatgttaagagatccctatttccaaattatcctagaaccaaaaaatatcacagcacttcaacccctggtgttacagatgagaaaaccaaggtacaaatatatatatatatatatataacaaaattagccgggcatggtggcgcattcctgtagtcacaggtaccttggaagctgaggtgggaggatcacttgtgcccaggaggttgaagctacagtgagctatgatcacgccactgcactccagcctgggtgacagagtgagatcctgtctcaaaaaaagaaaaagtaaaaaataaaataaaaaaaatatatgtatatgaaaaaaattggaaagttgctgacaatcattcatacaatgttagacctaaaggtgaccttagagacctgtatggtgataagaaatagagcaccagaggcagggagccattgggttggctccaggctgctgcaggattcctgcctccatcaaaggtggtgcttagaccagattttttttttttttttgacagggttttgctctgttgcccaggctggagtgcagtggcaggatcttggtttgctgcaaccttgacctcccaggctcaggtgatcctcccacctcagcctcccgagtagctgggacagcaggtgcgcaccactgtgcccagctaatttttgtgttttttgtagagactggattttgccacgttgcccagggtggcctcaaactcctgagctcaagcaatccacctgccttggcttcccaaagtgctaggactacaggcgtgagccactgcacctggccagactaaatgattttaaggcctaagattctgatgctgtgatttcatagaattgccctaattggaataggaaagtggggctggggaggggagaaggagggtatggggaagagaagtagagcaaggtcactttatgtagttccaaataaggaatcatacccttaccttcttctaggtggaaagcggcatcctgcattctcttcttgtccttggcctcatctctgctatgggctgtgccacctctatatgctctttctcaccaccaggccttcagaatgcagttggaaatgtgccctctcgtctgggtgtggtggctcatgcctgtcatcccagcactttgggaggccaaggtgggcagatcacctgaggtcaggagttcgaaaccagcctggctaacatggtgaaaccctgtctctactaaagatacaaaaattaaccaggtgtggtggcacgcacctgtaatcccagctactcgggaggctgaggcaggagaatcacttgaacccaggaggcagaggttgcagtgagctgagactgcgccactacactccagcctgggtgacagagtgagactgtctcaaaaaaaaaaagaaaagaaaagaaaagaaatgtgccctctctagtgtgcctcccaggtcactcagctgatggaaaatggaatcctactaacgtgcagggctctagaaattcagcagcgtttcatacatggcatctgccatcaaggaagtcacaggaaggtgggaggcagacacagatatccacaatataaagtttagccaagttcttttttgcaagcctaatcataggtgaggggatgcaccccagagccaccaatccggccccttccgcccctgggggaagcattaatgacgccgaaatgtgtcagagctcccaccagccccctcttcactgctactctttcttcccaggcaaaacaggaaccacaaaccccagcttcctcttgcagagtggct

SEQ ID NO: 1242762 - DNA, 4001 bp, Homo sapiens
taaatactcctgaccactaggtactagtcaagttctgttaatgctgcggtgttattgtcaaaatagacactaatttgagtaagatccttaccatacactgcacaactgcagagcattaatttaagatcaaaatattccgaaatctccgtgtgtgcgctccccaacaaaaccccattctacgtcccccggcagggtgctggcctctctaaaaactatgtgggaggagacagtcatcctgcatgatgtgtggccaccaaaaaccttcaaaccccagagggcaggattcacactctggtgctcagtggctgcatggataaaaggtaatgcgtcttcctagatatttttacattgtagaaaagagcaattcataaccaaaaggagtaatctctaatgctaaaatttcaggcaccaacaattggacgagaaaactggctttaagagacccctcggatcacaccaaattggcaatcatcatctacctttccttttttttttttttttttaaagacagtctcactctgtcggccagggtggagcgcagtggtgccatcttggctcactgcaacctctgcctcccggaatcaagcaattctcctgcctcagcttcccaagtacctgggactacagacgcgcgccaccatgcccggctaattttttgaatttttagcagcggcagggtttcgccatgttagctaggctagtctagaactcctgaaattaagtgatccgcctgcctcggtcttccaaagggctgggattacaggcgtgacccactgcgcccagccgtaaccaacactcttagcctcgttcttccacttccccaccctcttagcaaaggaattcgagctcccttctccttaccagccctgcagaaaggatgcagatggagttcaggatgtctggagttcaggcaacctgaattcaagccccagtgccacctcctaccgcctgtatcacctgcccaagttacctgacctctctgtgcccgtttcctcactaccaaatacagggggcacagagttgttcagatgattaaaatgaaatgcgcataacacagagcgggccctggcagatcgttaaaactcaaaaaatgttagccgcaatgattatcacccagcctcctctcctcggtttcgttgctggttgttttttttttggtttgttttttgttttttgagatgttgtttcgctcttgttgcctaggctggagtgcaatggcccgatctcggctcaccgcaacctccaaagcgattctcctgcttcagactcccgagtagctgggattacaggcgcccgccaccacccccggctaattttgtaattttagtagagacggggtttctccatgttggtcaggctggtctcgaactcccgacctcaggtgattcgcccgcctcggcctcccaaagtgttgggcttacgggcgtgagccaccgcgcccggcctgctgttcggttttctaagcgctaagctaacccaactcaaaaaatagtctctaaactctccatgcattttccaatacggtagcgaagagcggcatgcagctacacaaacagaaataaattacacttaaaaattcagttattcatctgcactagccacatttcaagcgttctgagccacacgcggccagtggcagatagagaactttccatcctcgctagaaatggccgaagaagggcctgggacgctcggccgggttgcagccgcgggtcaggcggtccctgaggcgcagaggcccgaaaggagcctccggcagcgcaagcctcagggatcgcctacacaggggacccggcgggcgggagccctgaatctctggaagacccgcaggtcacaggggcgcggggctgccttactgcggaggtcgcggaaagacataacgctcaggtccccaggagcccagggtcgcaactgctcgcccctcagcgatcacaggcccagcgctcgacgatctctatggcaaccaatggacccttggacggcgcacggtcagggacaaacaaaaagcgaagcgaagacgcggcggcacgtgcatacgcacggggagagcgggccggcagagagcgctcctgagacgccgagggcagagggcgtggcgataccggcgtctatgagggctgcaagcttcccagcttctgggcgtctgtttacacgctttgcggacgtttcgcgctgggtgacaggttctgagtacctactacgtgcttgatattgcgctaggcgctttccatattgcttatttccccctcatttctataaagaatgcacgatgcttggctgggcgcgggggctcacgcctacaatcccagcactttgggatgccgaggcgggcggatcacttgaggtcaggagttcgagaccagcctggccaacatggcgaaaccccgtctctaccaaaaaatacaaaaatttgccaagcgtggtggcgcacacctgtaatcccagctactcgggaggctgaggcagaagaattacttgaacccggcaggcagaggttgcagtgagccgagatcgcgccactgcccttcggcctggcgacagagcgagactctgtctcaaaaaaaaaaaaaaaaaaaaaatgcactatactcaggaagcccgccttcccccgtccgaggcacagcgcgctcctcgtcggaatctggttgccgagcggaggacgggatcactgtgggcgcccagaggcaggccaggcctcggtctcgcgcacgcgcagacggctcgggctgcacaacaggccggaaaggggccctgagccgctcgcgccgcgcgggtcccggcagccctagcctctgcatgggggcgcgaggagacggcaggaaggggcggcctccacgtgtgaaatggggagatgccccgccaggcgtggcacagcagccgggttttgtaaggtagcttgagcaggaacaaggaaacagcgtagtgcacaaagcgattggttggcatcaggttatttcagatgcatttctttgggttaaagcagagggggcttccttatgccagcctaggtggacagggccccttttgttggttgcagtgaatcttctgtgttttggcagactggcctgtctctaagttcgcattgattacgtggcaccttgcactagcgattccattctggtttggtctggtccgttggtaccttgtgcaggagctcgctccaaaacaatggcctcccataaatgttgcttcacgtgttattaagaaaaacaaaagataagccacagtctagaagaaaatatgcacaaaacacatatctgataaagagacgtgtatccagaatgtatcaagaactctcaacactcaataatgagaaacagtctaattagagaatggagaaaacattttaaaagctacttcacaaaagaagatatatggatggctaatatgcaaatgaagagatgatcaaggctattattagagaagtgcatattaaaaccacaatgagatatcactatgaagttattaaactggctaaaatatcaggtaacacgttaaaaacctaaaaattaaatctagataaaatggctaaaacaacaaaaaactcttgacaatgccaagggcttgaaaggatgttgatcaacttgaacttttttttttgagatggactcttgctcttgttgcccaggctggagtgcagtggcacaatctcggctcactgaaacctccgcctccagggttcaagcgattttcctgcctcagcctccggaggagctgggattacagacgcgcgccaccgcgcccagctaatttttgtattttgggtagagacggagtttcgccatgttggcgtgagtcaccgcacgcggcctgcatttccctgatgattaaagatgttgaacatctttttacgtgtttgatgaccatttgtatatttccattggaaaaatgtctattcattttctttgcccatttcaaaattgggttgaacatccttttgtttttgaattgtaagtgttctttatatattctgcctatgagacccttatcagatatatgat

SEQ ID NO: 1242763 - DNA, 4001 bp, Homo sapiens
ttttaacatgcattcaaccactagcctgttcatgtcagctcctacctttggttgggacacgtgaccacaaacatgtgcttccccagttacatgctcacaggctgcgggacacacgctcaggaaatgatcatctaagtactaaagagaccaattccaggacgcctgggtctctccaaaaaacctaatgtcacctcaaactgaagccacaaccaggagggcatagctgggagaaagctgacgtgcttcctacttggactttgtcacagtagggtgcctgacggcagcagagcggccacacaaagggacagcctgagggacacacatcctcttgcagcagcctgacgtcctgtgtttcgtcctcccctgccctccttctctgcctcagactttcctccacaggcttggagaggcgcaaatcgggtggcacccactaaggacttacaatggttctgggctccacagatgggcagctgttgccaggaaggtgatgacaaccacaatgaggatttagcactgagccctgtgcacaggcttctttcttaggatgtgtgtgtcaccccttcttcctagaatatgctaactcttctaaggagcccaaacataaacgtctccctgctctgctcactctccctctctcctggacaaccaatcctcaccttctggctctcattttcaacccactagcaacaactctccctcttcatttgcagctgatggctttgatagcttgcttccctcttccttagtcctccaggatccagcctgctctggctctagctgcttttcttcccttccgagcagcacatccccaaacttctttgcaggagtctgtcaccttctctgcttctcaaaagtggagcgagtcagagtttcattcctggaccccccgtcttttctgctggctctgctcctaccctcaaggctttaataccatctgtgtgctgattgctccccagctcccagctccagcctgggctttccctgggctctagtttcacataccagctacctgtgcaccatctccacctggacagccaatcggcgtggcaaatggagcatgtgcagaaccttctctgcttcagtacatggcaacttcatccttccaggggctcacacaaaaaacttcagagcagtgatgtctaatatagtaaccaatagccacatgtggccattttcacttaaattacttaagaattaaagaaaatgcagaactcaactcagttcctcagttgtgcttgccacatgtggccagtggttcccgtagagtacagcacagaggcggaacacacccatgagctctgcaagctctgccgcacggctgccccaagacccggcctgtagcacctgacttactctcaacccatgcctcatcccgtgagatctaccatcaaaatatgccccaatctctagacacttctcttgctgacgagtgtcgctcctggttaaaaacccacatgtgaggacaggcgcggtggctcacgcctataatcccagcactacgggaggccgaggcaggcagatcacctgaggtcaggagtttgagactagctggccaacatggtgaaaccccatctctgctaaaaaaaaaaaaaaaaatacaaagccgggtgcggtggctcacgcctgtaatcctagcactttgggaggctgaggcgggcagatcacctgaggtcaggagttcgagactagcctgaccaacatggagaaaccctgactctactacaagtaaaaaattagctgggtgtggtggcgcatgcctgtaatctcagctactcaggaggctgaggcagaagaatcacttgaacctgggaggcagaggttgcagtgagctgagattgtgccattgcactccagcctgggcaacaagagtgaaactccatctcaaaaaaaaaaaaaaaaaattagctgggcatggtggtgtgtacctgtaatcccagctacttaggaggctgaggcagaagaatctcttgaacctgggaggcagaggcgcagcgagccaagatcgtgccattgcactccagcctgggccacagactgaaactccgtctcaaaacaaaacaaaaacaaaacaaaaaagctgtgtgtggcttttcaagcccaactatagaccatgacaaggcctcacctagcaggcctcacaggggaagctttcttccctgcagcagacttggagctcagccagtgcactgtggtttcacgtaccctgcgtggccacactcttaggtgcactcccagccccggggccttcattcctaggtctcctgctctgaggccttgggcctcagagtaacggcttaacctttatttctggcttgctgctgtggtcgctccctgacacctgacggcacctgtcccaccagcactctgctcaaagccacggtcacccctcactctccaaacaggctcgctgcttccagccctgccgcctgcttcggtctgatggcggctcagcagccagagcaaccctttggacgggaaataagcacagaaggttccgcttggatcccaacgattcccaccttagaggcaaagacaaaggctttccaggggcttcccaggcgccagagggtctgtcaatcccaaccctcatcacacggcctccttgcttttcctcaaacacacaaaacacattttttttcttccccccagacaaggtctcgttctgttgcctaggcgggagcgcagtgccatgaacatggcttgactgcctgggctcaagagatcttcccacctcagcctcctgggcagctgggaccacaggtgtgtaccaccacgcctagctaatttttttcttttttttggtaaaaatggcgtctcactatgttgcccaggttggtctggaactcttggcatcaaaggatcctcccacctcggcctcccaaagtgtttggcttacaggagtgagtcactgcacccagcccaaaacaaattatcatcctgagacaccctgacgccacccgccacccgcacaactcactctttccctcccttggatctctgctggaaacaccatccaatccatgaggccttcctgatcacccgatttaagatcactctgggcagcatccatccccatcccagcttattattctccacagcctgcactgcatctggccttccacacctcttattgttcacagtctgactcccctaactgaagagaataaacacacgatttttgtcctttttgttcacaactgtatcctcagcgcttgaatgctacctgacaaatactaagcttttaataaatagttgaattagtggattgtgactttgactttatccaaatgctgatgagcacaaaactgacaaactgccctcagctgaggaggaagaaaagcagcggagctgtagcagactccttccacttcagagctcaagaaatcaacgctccatcgcccactacaaggcttttgttgtccttacctttgagccaagatcaaacttgaacttgttgacatcttcctctactatttcagagccctccatccccttggtcttcatagcattataaaggacagatgtgatcttcagcagctcttttaccgcatacccatctgcttgataaagcttcttagtgttgagttttatatgtgccttggtggcctatttttagaccaaaaaaaaaaaaagttgaaggccctttccatgtaatgtctaaactaaatcccatgtaggtgagttgaaaatgcctctgctgacaactgggatataacctaataaaagcaaagcattcaagtgactcaaacattgtgagtggttgtataaactgggacaatcttgatggagagcaatttggtaaaagacatcaaaattacaaatgcacatatcttttgacccagcaatcccaaatctaagaacttattctagggacacactcaaacacaaacaaaatgagatgtacaggttatttgttacagcactgttccaaagagcaaagcttcagacaacctaaaagcctacctatataaattacataaattatggcaaatccatgcaag

SEQ ID NO: 1242764 - DNA, 4001 bp, Homo sapiens
aataactcacttcagcaaatctataatcacaaggaagaaccctgtattttaatgccagttggcttttctttagaaagattttcctattgtgcggctgcacaggaaatttacactacagttgtaatttctaatgctactgcaaaataagcaaaaaacaaggccagaaaagtctgttgtgcagagtctgaagaaactgttctccagaaaaaaaaactgtaaacactccgctttctaaaatatatctttttaggctaggcgcggtggctcacgcctgtaatcccaccacttcgggaggccgaggcaggcagatcacttgaggtcaggacaagcctggccaacatggtgaatccccgtctctactaaaaatacaaaaattagccaggcgtggcctgtaaccctagctactcaggaggttgaggcacgagaatcactagaactcgggaggtggaggttgcagtgagccgagatcgcgccactgcactccagcctgggcgacaaaacaagacgccgtctcaaaataaaatttaaatatatatatatataaataaataacataaaacatttttaaggcctacatttcggccctggtattaaagaattatttttcaacttttcaagctatgagccatactgcagcagaggtcgcagacacggtcggggacggcctcccctgcccacttccacttatcacaggaccagttctaaaccgataccactaagaaagcgactggcgctggcactgtagaccccatgccaggctgcttctgggagggacccgggggtgctgcctagggagaagggcttaactactctgacttccaccgaagagtttctcagagaatgcgccctcgcagctttccctgaataaacattaccaggacttacaaggtgcctagcactctgccagaatcatgtgaatttcagaggaaaatactcgttcacacatctcaaggaacgcacaggctcgtgagggagcattcttgccaatgcacatggtaaatgcccaatcgatgttcgcggaatgtcagaaactgacaactagttcaggcctcaacgcagtaggaaaaggatgaaaaagaaactcattttaaatcaactaaacaagtgcaaaagccatacatataaaggagaggagatacgaatggcatcacaacataattcctttgccatcgaaaacttccatgcctttgaggttttaaatgaagacttccaaaactgatttacttaagactctacgtaaaacgcctgatctttaaacgcaagaaaagcaagatgaatgtattactttcctggaaaaaaaaagcattaaaggagaaaaaagagtaaagtgtactgatggggctcttggtgggttctcacatcacagggcactgcagctgagacttgcttgaacggcccccgttttctacccgcaaattctcaattgctagataaacaacaataacaacactttattgggcgctcatcgtgtcaaaccctgtgttgagggctccattcctcaaggtccattttaccggcgaggaagccccggctccgggaggggaggagcgcgcccaaggtcaccagccagttgagtgagtggcgggcggatcccaaccccgagcgacgcccacggcctgtctcggccaccagcgtgttccagcgagcgcccagccacctcgctcgcagcctccccagcgcagcagcccggctgtgggcctgcggcagccgggtcttcctggtccccacctcctggggccgacgggcggcaggaaggggctcggcgggacgcgccatcagggacctgaggaggaacaacggaacgcgttcggaacggcctggactcccgagactcacccgactcgtggccacaccgggagaactgaagcggcagtagccggcggagacgcccgacccgaaggccggctgctagggagcagacagctgaaccgcttgccagacgccgaaacccagtgacgccctccaccgctccaccgtgctcccggctcctcgcccccgccgcccgcgggccccaaggcgcatgcgccgcctgtcctggaggggcccatttccgtccgtcgtggggggaggcacagtgagtccactggggcacggcagcgtctaagccacaagccgagcacataagccaggtcctaacggagcctatgtgtaagtccactactggtgcaaggttgcacacttctaagaagagcggcgtggggggctcggcgaccttcgcttcagtcgctcccccgtgcagtcccctgtgcccaagacacagcctgatgcttgtgctccggtgggcggagcttggaggcggcgggaactgcaattggtggctttgaaggcgcggcgagcgggaacagctcttgaggagtgagactgcaggagatgtgggccggtaagagagccccgggcggcactggatcgggccccggagggtgtggggccttgaggaagccagatcccaggcctcgggggtggctttttcgcaattgtcgcacgttgtgaggcgcaggattggcgctgggtctcgggctcggggcgaggaactacggttcgggccgaggtgagggggcggtggcgctgtgccggctgtgacgtcacctcgcccgcggtggggcgggtggagcctttcgtaggctcgcgactgcgtcaggggagggccgtgtggtcatgtgaccaggggctccgctctacgatcctggggttgcttcctttcccagagttggggttttgcttttctgtcacctcggcttccgtcgttttttgtccctgtaccctcttgcgttgctcctcgcattgcctgttggagcgcagcagaggtgtgtggctacgggaacgttacttaaaatggatctttttgatcatgcgttccacagatcttgagcatctactgtatgtcagacactaaaacgctaggaagtataaagaaagttttaaaatggggccaggcgcggtagtttacgcctgtaatcccaacactttgggagaccgacgtgggcggatcaccttaggtcaggagttcgagaccagcctggccaacatggtgaaaccccgtctctactaaaaatacaaaaattaaccggacgtggtatcgggtgcctgtaatcccagctatttgggaggctgaggcaggagaagcgcatgaacccgggaggcggaggttgcagtgacccgagatcgcgccactgcactgcaccctgggcgacaaagcgagactgtgtctccgaaacaacaaaaaaaggaaagtttaaaaatggtcacggggtaaacgtttactaaagggatttccgtcttaattggtgagactgagggcgctctaccaaatttctttagactggcgttctgcaaactttacccggaataaatcatctgacgtactttttaaaagatgctaaatctcaagccctccgtgcgccctcctcacagtttaatttgatagggcccaggaatcttcattttaacgggtagcctcgtctgtgggtttttttgtttgttttttgtttttttgagacggagtcttgctttgtcgcccatgttggagggcagtggcacgttctcggctcactgcaacctcctcctcccggattcaggctgttctcttgcctcagcctcccgagtagctgggactagaggtgtgcgtcacgacacccggctaatttttgtatttctagtagagacggagtttcaccatgttggcctgggtggtcttgaacgactgacctcaagtgatacaccacgcccggcgcgctcccggcccctcgcccgtgttcttaatgggagaggtgttgatttgatgtttcactgactgttgaaccccaaaccacccaggttgtctcctcaggcattcattccacaagtatttatcaaagacacattagactgttcttggcctgattagacttactgactatagtgaggcagttctggtctaggagtatagctgtgaataaaaacatcgtcctgccctggagctcaattttagaaacaagaaaagttaaaaagataatttcagatag

SEQ ID NO: 1242765 - DNA, 4001 bp, Homo sapiens
aacaatcactcatccatgaggggttattggtggagaggaccaatacaaggtatgaaaaacacatctcggaggacaggtagcaggtccttccaagtgacagctgttctcataaatgggagccatcagagccctaggtctgcctgagcagaggggagccccaagctactgagtcccccgggctatgcaaggctgtcaggcaggggttggaggagggtggactgttgcatgggcaccaccagctccagctgccccatcactgtgcctgggaggcccagggtctacacctccctctccgcctagacatccccacagcccggacaccccttacgaggcccagcatcagggcatctgtgcaatccacttttatggcctcttccaactgttgaaccccccagccagccagcagtaagcaaatggcccagctgccaggctgtgggtgggtgtcccgggcactgcccgccaagcggcactggcttctccctcttgaacttgtcctttgaccccttggctcccattcagtttcacagaatgtaagactctgctcattttaattgggaagaagcccaagagatggagcaccaggtttcaaactgtgttcccaggggtccagggtccgcagggggctgacccccgcctctactgggatggtgtgcctttatgaaccttctcttcttgctgttggaggagacagctgtgataccaaatccctggaagcacgtgcacaaaagctcaccaaatttaaaactgagctctcccgcaccccactttgctactttgagacatcgtcatccattcaaagggttttatcactggatgaaacaaccataaatctgatttgatccttgctgaaaggctgaaattttaattggtctttgtccttcaaagtccttctcacttttcttttcacttgtcagggttgagaagcaattaactcccctccatcgtacaaattctaaataggtttcacttacttccttgtttcccatccatcgcccccaagtaggatcgcccccatgaagggggtctgttttgttcactgctgtattctgagcacacaacaggcacgacaaatattgatttaatatttattttaattaactaaatgtagcaattttaatagtaaccatagcacctactatggtccaggccctgtttacacatgtgatgtgtgttaactcacccagcactcatatccacccttggagaccagtcccattatccccattctacagatgaaaaaacaaaggcaccactacacttgctaccctggattcacagcatcttcaaagccccaccctcggtccctggctcacttgctctcccttccctggaacaacgccctgcttcctttgcgcccctgccagcttcatggcctctttctctgctcctgcaagtctcggagctgggggagctgggggagctggggattatctcgcaaactgcattttacagataaggaggctgaggactgacagcttcctgtctagttgggggaatgaggtggaaagaaaatgacagccaacagccaagtcactaagggaggccagcagatgccccaggagagtgagtggccatggctgaccacagcaggcaggggcttccaggaggaggtgacagctctcacaatgtctcaagtcctccaaagagcagcagcccacagctttggggtctcagccattcctcccacaaacataaaaagagaaggggcctggggtctctcagattagcagacacacctgcccaccctctgagaagtgggtctgtgaatttcactggcctgtggccagcagcagcaggcgaggttttaggcacagacatcaagctggacagagtcgttccccacatgggactgtacctcagcagcctgtcccatccttccccggacgccagggcggagatctgtaacttccctcctcgcaggaaacagagcggcagcccggccggcttggtttgttgttctcaaacggttatgccatgcacgcccagcccatccaagaagcctgtgggtcgcctggctcctgcttatcactgaaccagcctgcccagggccccgccccagagggttcatcctctgcttcccccaggctgagaggtccactctgaccatcagtgtctgtttcactgagaaaccctatgctacagtaatgatgatgatgatggtgagagctaacactgagtgccaggtactccacagtcattaattcacatatgcaaacctatgccacggacagcatatgaggtccattttacagaagacaaaactgaagctcagagaggtcacctaatgtgcccaaagccttacagtccccaagtgtaaggttttgtcatcagaattgtgtgtgggtgccatctccgacactagctctatgatccatggctagttacatagctgctctgtacctcaatgacttcatctgtaaagtgcgatactggtgcccaactcacgggcttccttggcaggctgaatgagaaagcacctggcaagtaggggctcttgataaatggcagttattagtatttattgttattaataatattcatgatgaaaagagattcagagttgtttggggacaagggtatcagttacccaggggcacctgggcagtgtccatccaggagtcgaaagagcacaggctttgcagttggcctgacctgagtttgaacccagctaccatgtcctgctgtgtgaccttaagcatcagcggaggcatcggggggcggccccgggggtcccccatgcccacaggtgcctcctcagaacgggagccggctggggctcctcctgaccctctttgataccgtgcttcctgaggggagtgtgtcctgttccgcttacaccccaaggtggaaggggagctgtctggccgtccctggagagctctagagaaggcccttcccaggtccaggctatagggagacccaccctctcccagcacagccacgtgccttctttcccaccctctgcgtcaataaaggccagttctggggaaagcttcagccccgcatctgctccattcccagcacatgcctggaaacacctgcagctggctgggctctgccctgcgtccctccagcactgggctggcaaccgagaggggaaggatgaaagacgagtctgaaatcacggctggagacccaggaagaggcagctcccacagtctgaggccccggtaactgcccccgattcccccggtgactgctcagcaggcaaggaccgtgcctggagggaagcttctggaacattcttcatccaggtggacaggggtgttacctttgagccagggactctggctctgacctccccgatcacatggtgaatcacatttccacatactcacactggttgtttttttaattaagagattttaaaaaaacggctaataaataagtcatcttccctaagacttcctgagaagcaccagtgtacaggcgaggcctgaaacatgaaacggcgggtgacaggccgcgtgagtcacagggcaggcctgggccctgaagccacgtgggtcacctgcaatcccggtcccggctgctgtgtgagccagcaggtgactcgcccctttgagctctggtctcctcagctgtgggttctgcgacgtgcgtgttgcttcgtgtatgttaggccctcatattcggcagtttgttgctgccattgttattactgttggtgtttatattaactgtgaagctcagttttcccatgcggagagtgggaacgagcagacctaactcgccacactgccggaagattcaacaaggctgggcccgggtggcttgcgccatgctggctgctgtcctgatgcccttgtcatcgtcaccataaagaggacagccccttgagtcacacggtacacactatgtgccccactccaagtgctttatatttcgtacttcgtttaatcctcacaaagacttgaggaagtgggcgacattcccatctgcattttatggtccagacaacaggtaacgacaggtaacgacaggtaacgacaggtaacgcg

SEQ ID NO: 1242766 - DNA, 4001 bp, Homo sapiens
gcagggggcaccgcggtcaccagttcctccccacatcagaaacactccgtactggcaaattttcggaggctctctcccgcctccatccattggaaagccaaatgctgcggcctgtggcgcgggacgggcttgagaacatgcaccagcctgaccggggactgggccgcctccccgcgaccagcaatcctccctgaaaaaggagtctttgcagatattgcaccaacgtgcccacaggaaagagaaaataggtgctctaagcatgtcggaccccaaattaagaataaaagtcctcgagggctgcaacgctctggggtggggggtgggggactggttcaaagagtaggattcttcagctaacttttcccccctccccattccttggggcatgtgtcatggcctgtgacacaccgccaagggaacatggatgccagggaaatgtctacacacgctacacgtttgtgacatgccatgtaagcgacaccctatttcctggctgggttttcttggcacaggtgtgggcaggcagtggattcggccccctcccactgcgcttagtaaacaggatcacggtggccccagggaggagtgtgcattctggggaagacaagctacacccccaatgaggatgggacccccacggcaagcctcaggcccaagccacagccggtatttgaaactgtccttgtttcaaaacacaaagcatcctgttcaggctcctacccgccacccccactctcccctcgaccccaccacagctgtctttctccacgtacgaagaaggccaccatttgcagatctgatttcagaaacagatcaatggtttttcctctccgactcatccagctgacccagtcctacccatgtatttaaaaacaataacaaaattaaacctccagcaacaaaacacacacgtatacacacactctacagacaatgccggaccagggctccaccaagcagcttctaggctagaactcgaccaccgctgggtcctgagatattccaggaccactgccccctccccctccacttccaacctctcaatgtgcgaatgagattttcagaaagggaagcaccccgttctgcctgccagccctggcaggaaagagaataaaggacgggtaaaccaaacagagaaactggcttctggaaattctttgggtttgggggtttggaggttttgttgtgttgtttgtttttttttttaaatctgaggggtggtattttgttttcccctcccccacccctcagatccagatgggccaggggcttccagagagaacccccaccaccatcagggcccagcgtcgggtccatcctcgagtcccagccaccagaaacacaagagctgggggcagaaggtccccaggcacccagcctggcggtgggccgagtctccagcattttaagggtctctcctgagcccggtcggctggtttgggcttcagactccaaaatcgagccccgcgagcaggccaggagcgaggcgccctggttctccccgttcccccggcaccccccaccgccccccaggccctgggctccaggtgcagcgccagggggcagccagggagggcgcatctcgggccccgaggagaggcgggggtgcagccgcgcagagccactcaccgtggcggacgccaggctgttgtcggccagcgttaggtggtgcggctcccagcgcctcaggaatttcgaggtgaggatcttgctgagaaaggtccgcgggtgccggatgacacagacctgaatgtcgccctcctgcagcagtttgtacctcatcccgttgcaaagcagaagagcccggcggcagggcacggcgcccatcttcgtgccttcgggggccgacacgtcgccccccagcagcggcttggtctcctcgatctgccgggggtcgccgccgccgcccgagctgctggtcacatccatggccgcgccgggggagggggctgggggcggggagagggggctgtcctgggctgctggggcggcggggcccccggatccggcggcccgcacccccccaccccccgggaaggtgggggggtgtggggctgggggcgcccgcaggggagggggcgctgcccgcggggggcggcgcgtgcggcgggctgggccggcctcggcgcttcctgcggggctccgggcttcctcctagctcgtcgggtgcatgctcgcggcggctgaccgggctcggcgggcgacggggaggggcgggggaggccgagggcgggccggggccaggcgcggagggcgggcgccggggtgggggcggcggggtgggggcgggcgtgtctcggggccccgcgccgccgcgcgcgtgtgtacagagcgtgtgtccgcgcggccgtccgggcgagagtggccgcgggcggggcgggccgcgcgccgggctcccggagcccggggcgcccgcgcgattggtccccgcagggtcatgtgcccgcccctctgacgtcaatggcggcaacggcggcggccgcggcggcttcggcctctcgcgggcggagtccgcggtccgggcggggtcgcggcccacgacggggaggcgcggcccgacgggaggggcagcccctggggagggggctggggcgggcgagccccgcggggtcccggcccgccccgcctggaatgtggggagggggcggggcgcgggggcggggcgcgtgacgtcacgccagccgcgcccccgcgggtgcccgggcgggagcccagccaggctgccggagcctgggggcccgcgcctcacccacccccgccgcccccgggccggactcggacgggtaaagaaggatacccgagggccgggggctgggtggaaggacggggactggaaccctcgacccctgacgccccctccgctgtccaggctgtccagcgggctggccagatggggccgtgggacggggacgccttcccgactgaaagtgtccccgcggtgatccggaggatgagcccaccctgccctgtctcccactgcgggacccagccggcctcgaactcctggcctttgacgtctgctggctttggccttgggggtcctcaaaccttctggagagaggggacggtccgcccatcccccttctttcttctgcccagggagacagagcctcttctaggaacccacttaaagcaccccccaacctacacagccacccctcttgtgcgcaccccagcagctccccctacttcaccttccctgggaccccacctggtcattttatctgagttcacaggcccagcaccagcccacgagagaaccatattcgattctcttgtgacccagggtatcaggaactgcagcctggatgcaaaaagctccctttctgccatcacaagcagccggcacctaaggccacctagcaaatgctcagctcctcagccaggttttcttatctccacgtgctcctgcagctaataacgttaaaaccctagatttttgcctttttaagtgaaggcgcctctgtagtgaacacatgaatgtgtgcagcgtgtgttgaactgcgtcgtgaacactgcggaatatccacagcatctgtgccgttggtggaaattattcaccccccctctcccaagaacaggcagcatgaaggtgctccccagaggaccctctccccgagcctggccagggtttcaggcaggggatgaaaggcaggtcccaggctgcatccctcaccaaggaaagaagactcacatccagcctgcccaggagatgcctccttggggaggcacaattagattagaaagttagaaattccttagctccccacaatttgctgccatttccttccagttttgagcttgaacagccttgagaaaaccaccaagcatgaaggggcaagccctagatatgtgggtgttggggggtggttggggccaagaaaccccccagtccattaagcgggtgggattagatcctttgttcaaatattttcattgagctcctgctgtatgctggtcacaggccaggcactagggtattaatggtaatgactataata

SEQ ID NO: 1242767 - DNA, 4001 bp, Homo sapiens
tttacaatgtcaatggaatatttatatactcctatcttactggtctcccttcttggcaatcagggacaaatgttgaattttgtcacatgttctgtgacataatctcctaattttttataatgtgatagatataatctcattttcacttttacttctaatacagtgaattattttaatagaatcttaatattgaatcatcctgtttctttcttgtggtattgtattttcaaaaaatactgatgaatattatctgctaatagattgacattttgttctgatgcaagtgagatctctacttcgttttctttttctgaactcagtcaagttttcctatcagtattatactgattgtgtaaagatagttcagaagttatttcttctttctctattctttgacaaagttagagtagtgtcagaattatatcccatgaaggcttgaaagagttaacttgtaaaaaggtctgggcctgatacatttttgaaagatactcatttgctaaaattctcattttcttctatgtttatattgccctgtttagatttttccctattctgggatcagttttggtgatttacattattctggaaaatcaaccatttcatccaattattcacatctattttgcaaggtactcctgtagatcctttcagttttgctgatgtttgtgattattttccccttctggtttctaattttaaatatatgtcttttcttccccctttttttcttggttggccaatggcttatcaatttaataggactttcaaacgacagctcttgtattgactgattctattatttttgtttcctaacttataaattcctattatcttcattgcttccctaatttcctttgtgagaggaaactgaaccaacccaaatgtccatcaatgatagactggataaagaaaatgtggcacatatacaccatggaatactatgcagccataaaaaaggatgagttcatgtcctttgcggggacatggatgaagctggaaaccattattctcagcaaactaacgcaagaacagaaaaccaaacactgcatgttctcactcataagtgagagttgaacaacgagaacacatggacacagggaggggaacatcacacactggggcctgtagggagtgggggactaggggagggatagcattaggagaaatacctaatgtaggtgacgagttgatgggtgcagcaaaccaccatggcgcgtatatacctatgtaacaaaactgcacgttctacacatgtaccccgtaagttaaagtataataaaaaaaaaaaaaaaagaaaaaatagggaaaaaaagaggcaagtttagtaggaaaggtttagtgtgtggggagcagggggtggtggggaggaaaggtgaggcaaaacaaaggtgagtggcaaagtgaattatggaaggtttctggagctggcaccccgtgggcatttccccgaggccactgccggccacatccgcccagctaggtctcaccagctctccgctcaccagtctcaggatcttcaacattccagtgggcgagaaggagaaacgtttgaggctgtccctgaatttgtacgggactttggctcggccctccacgcgctctttgatcgccatctcatttaagagtttggattcagtgtgtgcagagggcgtggggggtgggagtgtgggctttgggggtgggcgtgtggtggctttccttgagggtgcggtgccctcactgccttggggacgtgcggcggctgcggactgcgcactgcgaattgagactgcggggtgcttccggggtgcggtcttcgctgagatgttgcgctgtgccttgggtacagaactcactacgctgccgctacttgccagggctgcggcagtctccggttgtttcaagttccctgaaggtgcctcggatgactcaggtttggcgtgttcaggatccatggtgggtccctagggcctggccgtctgaaccagtgccgcggcagcggctggctctcccctgggaaccagcgtcgcgtcccaacggctgttggctacctccccggcgcgtgcacccggctctcgctgccccaccgacaagccgagcccttcagccaccctcattgccacagggggtgcaatgccaccgcctagcccgagaactcaaaatctctgcaaccccacacctcggagctgccggccagccaggcagtaaagagattcaaagatccctgaggcggatcccggcacattcttccctgccacccaggcccgggtgccggaaaacccgatcccgctgctcccagcgctcccttggaagttacagtagtgctctgcgcggggtgcagacttcggaaatctcttcctctagctcctatactgagttaaaataactgcagaaaatatgtggaagaatacagaaatatgtttaatacttagtatcaaactaaaaagtaatataaaattacaaaacttcttttttttcatgcacaggctttttctggtaaggaccgctgggattgaacagaagcttccggtaaataagggccccgtcggcaagacagcatactgctgtcacaagtgcaaacacctggaaagaaagacaagtgtcactgccctaaccatggtccccactcctgtcattcacacaagttttaagtggtctgcccaccagattcctctcttgctagggtactcggattgctccctgtgcttcatctaatactaacatggagagacttcagagatcatcttattctcctcattgctaagttttctaaatacttgcctatagaaagagaaaagataatttaagtgagcagaaaaataataaagcagtgtgggctctgaaatccatacttgtttgcttttatctcttgacctgctcttgcatgtattcttttaagccctactgaggatatttagttattaatatttctaaccccagtgttcaactctgacttctctactgacaaactctacagaagaaaaggtcaaagttaacaccagctcaatattaaatcatggggactgtagctccagaaaactggagttaataagatgatccaaagtgaactctcaaaggctaggctacatctgcttaaagggtgagattctaaatagaccttaagaaagtaaaattagataaaaacaataactaagaacacgtgggggccttcagacactctgatggctatctgagagctggtgcctggggtgggagagggggatgtcattccttgcatgctgtttggtcagcttcttccagtcatcaggaagtttggcttcctggctccagacatggctctcacagtctccttttccacccagagtctcaagccactgcctcctaggttctgaccacactgaatacctcctaccaatcttttcatgactggcactctgtacactattggctcctctacctggaaccttttccattttttttcctttattctcagcaaacagcaattccactgccagagaggtagtttcctcttttctgcaccatgcagctccctgtcaacagcttatatacagcggtttccacttgtgtctcctgtgttaagctctaagcaacttgaggacggggctcacactctagtcagtgctgtctgaaagcagcataatatgagtcaccagtgtaacacagccacataattaaagattttttaacagccacattataaatgtaaagaaaaaagtcggccgggcgcggtggctcacgcctgtaatcccagcactttgggagaccgaggcaggcggatcacgacgtcggaagatcgagaccatccttgttaacacggtgaaactccgtctctactaaaaatacaaaaaattagccaggcatggtggcggatgcctgtagtcccagctacttgggaggctgaggcaggagaatggcgtgaacccgggaggcagagcttgcagtgagctgagatagcaccactgcactccaccagcctgggcgacagagacagactctgtctcagaaaaaaaaaaaaaagaaaaaaataagtcatagatttt

SEQ ID NO: 1242768 - DNA, 4001 bp, Homo sapiens
caatcagggacaaatgttgaattttgtcacatgttctgtgacataatctcctaattttttataatgtgatagatataatctcattttcacttttacttctaatacagtgaattattttaatagaatcttaatattgaatcatcctgtttctttcttgtggtattgtattttcaaaaaatactgatgaatattatctgctaatagattgacattttgttctgatgcaagtgagatctctacttcgttttctttttctgaactcagtcaagttttcctatcagtattatactgattgtgtaaagatagttcagaagttatttcttctttctctattctttgacaaagttagagtagtgtcagaattatatcccatgaaggcttgaaagagttaacttgtaaaaaggtctgggcctgatacatttttgaaagatactcatttgctaaaattctcattttcttctatgtttatattgccctgtttagatttttccctattctgggatcagttttggtgatttacattattctggaaaatcaaccatttcatccaattattcacatctattttgcaaggtactcctgtagatcctttcagttttgctgatgtttgtgattattttccccttctggtttctaattttaaatatatgtcttttcttccccctttttttcttggttggccaatggcttatcaatttaataggactttcaaacgacagctcttgtattgactgattctattatttttgtttcctaacttataaattcctattatcttcattgcttccctaatttcctttgtgagaggaaactgaaccaacccaaatgtccatcaatgatagactggataaagaaaatgtggcacatatacaccatggaatactatgcagccataaaaaaggatgagttcatgtcctttgcggggacatggatgaagctggaaaccattattctcagcaaactaacgcaagaacagaaaaccaaacactgcatgttctcactcataagtgagagttgaacaacgagaacacatggacacagggaggggaacatcacacactggggcctgtagggagtgggggactaggggagggatagcattaggagaaatacctaatgtaggtgacgagttgatgggtgcagcaaaccaccatggcgcgtatatacctatgtaacaaaactgcacgttctacacatgtaccccgtaagttaaagtataataaaaaaaaaaaaaaaagaaaaaatagggaaaaaaagaggcaagtttagtaggaaaggtttagtgtgtggggagcagggggtggtggggaggaaaggtgaggcaaaacaaaggtgagtggcaaagtgaattatggaaggtttctggagctggcaccccgtgggcatttccccgaggccactgccggccacatccgcccagctaggtctcaccagctctccgctcaccagtctcaggatcttcaacattccagtgggcgagaaggagaaacgtttgaggctgtccctgaatttgtacgggactttggctcggccctccacgcgctctttgatcgccatctcatttaagagtttggattcagtgtgtgcagagggcgtggggggtgggagtgtgggctttgggggtgggcgtgtggtggctttccttgagggtgcggtgccctcactgccttggggacgtgcggcggctgcggactgcgcactgcgaattgagactgcggggtgcttccggggtgcggtcttcgctgagatgttgcgctgtgccttgggtacagaactcactacgctgccgctacttgccagggctgcggcagtctccggttgtttcaagttccctgaaggtgcctcggatgactcaggtttggcgtgttcaggatccatggtgggtccctagggcctggccgtctgaaccagtgccgcggcagcggctggctctcccctgggaaccagcgtcgcgtcccaacggctgttggctacctccccggcgcgtgcacccggctctcgctgccccaccgacaagccgagcccttcagccaccctcattgccacagggggtgcaatgccaccgcctagcccgagaactcaaaatctctgcaaccccacacctcggagctgccggccagccaggcagtaaagagattcaaagatccctgaggcggatcccggcacattcttccctgccacccaggcccgggtgccggaaaacccgatcccgctgctcccagcgctcccttggaagttacagtagtgctctgcgcggggtgcagacttcggaaatctcttcctctagctcctatactgagttaaaataactgcagaaaatatgtggaagaatacagaaatatgtttaatacttagtatcaaactaaaaagtaatataaaattacaaaacttcttttttttcatgcacaggctttttctggtaaggaccgctgggattgaacagaagcttccggtaaataagggccccgtcggcaagacagcatactgctgtcacaagtgcaaacacctggaaagaaagacaagtgtcactgccctaaccatggtccccactcctgtcattcacacaagttttaagtggtctgcccaccagattcctctcttgctagggtactcggattgctccctgtgcttcatctaatactaacatggagagacttcagagatcatcttattctcctcattgctaagttttctaaatacttgcctatagaaagagaaaagataatttaagtgagcagaaaaataataaagcagtgtgggctctgaaatccatacttgtttgcttttatctcttgacctgctcttgcatgtattcttttaagccctactgaggatatttagttattaatatttctaaccccagtgttcaactctgacttctctactgacaaactctacagaagaaaaggtcaaagttaacaccagctcaatattaaatcatggggactgtagctccagaaaactggagttaataagatgatccaaagtgaactctcaaaggctaggctacatctgcttaaagggtgagattctaaatagaccttaagaaagtaaaattagataaaaacaataactaagaacacgtgggggccttcagacactctgatggctatctgagagctggtgcctggggtgggagagggggatgtcattccttgcatgctgtttggtcagcttcttccagtcatcaggaagtttggcttcctggctccagacatggctctcacagtctccttttccacccagagtctcaagccactgcctcctaggttctgaccacactgaatacctcctaccaatcttttcatgactggcactctgtacactattggctcctctacctggaaccttttccattttttttcctttattctcagcaaacagcaattccactgccagagaggtagtttcctcttttctgcaccatgcagctccctgtcaacagcttatatacagcggtttccacttgtgtctcctgtgttaagctctaagcaacttgaggacggggctcacactctagtcagtgctgtctgaaagcagcataatatgagtcaccagtgtaacacagccacataattaaagattttttaacagccacattataaatgtaaagaaaaaagtcggccgggcgcggtggctcacgcctgtaatcccagcactttgggagaccgaggcaggcggatcacgacgtcggaagatcgagaccatccttgttaacacggtgaaactccgtctctactaaaaatacaaaaaattagccaggcatggtggcggatgcctgtagtcccagctacttgggaggctgaggcaggagaatggcgtgaacccgggaggcagagcttgcagtgagctgagatagcaccactgcactccaccagcctgggcgacagagacagactctgtctcagaaaaaaaaaaaaaagaaaaaaataagtcatagattttaatatatttagctcagtatgtctaaaatattatcatttaacatgtaatcaacaaag

SEQ ID NO: 1242769 - DNA, 4001 bp, Homo sapiens
gtgtgttttcatttcttttttgccagctcattcattcagttaaagcaatactggttacatttcccctggtatttttaggtaagcacagtgggaagatgttcagggttcattggtttttcatcttgctggaactaaaaatgtcttctcaggctccttgtttaggaacttgtcctctgcctgtccttttaccttgtcctctgcttgtcccttttctgagagtccttatttggccctcctgtcctttctccctgtatcggaggtcctcatctgcttcaccaagacctctggatccctggaccctaatagtttttaacaagaaggcaggatgaaatgtactcataaagctaagtttgaagcttttttctgctacttaccagctgagtgacctgggggcaagttacttggccattctaggccaatttcctcatgtgtaacgtgagtgaaacagtgaacaagagggctctggaggcaggctgtgaatgtgcaatgaacaaagggacttgggaattggggtcttcattgactggcaaggggttaggtggttgtgccctgtggttaaacaggtgatgggcagggattcaattccatgagtcctcaggcacggtgtcaagcaatttacatttaatcctcaggattgaatgtcagttctgcaaggaatgtgactgtctcatgttacagatgaggaaacaggctgggaatggtttagtaacttgcccagttctgtctctttccactagatgactgctttgggctgaacatccttctgatccaaacatcctttatagggatattcactggagacctaacgctgctttagaagtgatttttaaaaaaaattcccattttgttttattttattgacttatgggagagtaattttcttctttgaattttgggaatggggtccttctggggtgatctcctgtcaagtgtgagctggcacaggagttcggaggaacagctggttgctacacctccccttcccctaaagagaacaaaggctcaggccctctttgaccaccaggtaagtaagagttccccactctcactccaacacacagataggctttttggagcattttctgcctagctacccctcttgcacccagctgcctctgcctgggccccactgatgttctgagtccctgacccaggcacagatatgggaggtgaggtgtgtctctctgtttggtgactttccaggtgccaagacacacctgatcagcattctggatgcaggcactccccatcaccccttacttacagaaatgggccacaggatgaagggtatgtatctatgaatggcaaagctgtacagtaagatgaagaagctgaagaaggatatctccatggtgatgataagcctcaagatggggtgcacggtgagtgaggacaacagtatcattgcagctattaggcagccctgcagtgagacatagacacctgagccagcagcaagggcctttcaccatctctctgaggacccctggagcctactcctccttccccccaccctcggccaaggccccccacccagggataccagtttagctcaccaaactccgaatcttgatctcagcgtgccccaagagccagaactctttattgctgtcttttaattcccaccggtagcggcgacaccccctcctcgtgcccacttcgtgcttgggctgcaccgccttttgaggtttgtccgatggctccttatggtcctgcaccgccttttgaggtttgtccgatggctccttaccgtccttcttgtcttcctcgggtttggccccgggtggaggtggagctggtgctggctctggcttggccccctttgccgccttaggtgccatgactgactcggtgtccttggcttctcacagctggcctgtttcttctctctcctgctgtttctgggtaggccaggcctactagagtgcctggtgtccaccgagcggctcagagggcgtgctcagctaactgccaggaccaccgaatgccaactcccgcgccctctccacgcgcgcccgtctcctcgcgcagctcccatccgcccggcagcggccggatcctcccaccctccacgcgccggcccccgacgggccccaactccgttcccaacccgccggtcccacctccgcgcggagctgccctcgcggtcccatcccggcgtctccaggtggccccaggtctgtaagccgccgctccgctgcggggtcggggggctgcgagcaccgggtcacggccctgagctccgcgggcgcagcgccaagcgcaggaaaatacaacgcgactttcacacaaggcaacgagaggaagcaggtgttctcgataaaagcagcagccctaattttatggtcacatttaggctggaatgggtgacagcatgcgagctcgggggtgggctcggaggcagcgattcgacagacacgtgcatctgctagggcgccgggctggcttcaggcgggcctctgcggggcgtcggggccggtttcggggtaggcgtccttggcgggggaaagcttcctttcaacttcgactcccaggaatcttttcaagttggtcctcatcttcgtggtgaccacaaacgcatcgatgcaacacacgattaccgctgtgagacacagggactgtcagatacaagaccatatgcgggaaggaaagacggggttattttgcagctcagtagcaacctctcgaacctatccctatccagggtgggcgctgcgggtggcctcctgtcccctctgacccttcactactttcttggcgcctgcccaattggctgctgcaggcggattctgcctttcccagaaaaagggattttggaagtgggggattttgttgccagtagtagcctcgcttgatgtctgaggcacccggaaaggactagggaagggcagtggccctaggtggctgcaggtaggggttaggtcctgagaagccctctccgtggaaagacttttgggctatgtttgcaaagggcaggaaggagttcctaaggggaggaggaggacccaggcactggactagggtctctaaggaatctggtgtggccaggacctccagagccgctgagaagggggcagagttgaggctggagaggtgcaggatctgggactctatcaggaggtcaggtgtgagattcagaaaacctgcttgcagtgttcatgaggtgaatggaaggtgaaccaggctggaggcaggaagaccagtgcgtggtggggtgggatgctgccatccaggtaagaaatggatacctgggggtgggaacccctggcagtagaaggagtgatagcggagtcagccgatggggaccaggggctgatggcacagatattcccctgtgcactccgggactcttgacaaccttggatgtttctctttatggtcacttaattcctggctgcttaatgagcttttcctaggtatgtcttgccccagtgaatctgtgagcttccccaaaggggaaagggctctatccccagcactgagctcatgtctggcacaatcaatgggattgacagatatttattgattatagaatgaattcaaatgaactctttttctgcattaatttctgttctcattgtttaacttcttgaaccaaagccctacctcccctcccaaccccctgaatcttccaagcatttgatctgccatttcttttgagtcccaatttgtcccagtcttgtggcccagagcaaggtatttaacctcagttcctatatctgtacaaatgagagttgtaaagattaagtcagagtgtgccctgcttggtgcagggcatatactgggcacttcaacatgtggcagtttccttccttcctttcttccttctttccttccttccttcctgaataggctggattcctcactttagacagtgcacttttccccccttacaatctctcttatcatctgtctttaaaatacaattctctagtccagaaaatcaaagtcctatttatagacaaaaagatcttgcttaacatttcaaaaatagtgtccac

SEQ ID NO: 1242770 - DNA, 4001 bp, Homo sapiens
taattctggggattcccctctcaattcctgttttttcatcccgcgatttctggggccacttcctctctctgtttctgtccatctcagcctctgcacttgcttggcctgggggtgggagtgaggggactagggaggcaggagtgccctcagcggctcctgtgaaccctgagtgctgaccgttcacccttccttatcctccctgacctggattcctgacatctgctgggcccagggtggcctctatgctcctgctggacatatgcctccctcttatgaggtggtcttgggtggggatgggggggttcaagccactctggggacggtggattcgaggcttctcccctcaagtggctcccagtggtctccagggtggggctgggagtgtgggctcggagtgtggcattggtgtctcacttgggcgttgggcaggtggcctctgggctgaccgtgggagaggctgcaggaccaccttctgccctctgccctgagtgaccagggagaggtcccggagcagaatcccccttcctcctgcccccaccctcctggccgctctcactgggcccctcagttgagccacctgtcaaatcaggcgcctgagcgctctcatctgtaaagtggggacaagggcaggaagcgccaagttcctgggatctaagcaacaagtggccgccgccgtgcgccgctctctcctcccgcctcccccggtctccggcccggcctctccctccccatccccaacggcccagcgccacccctaccccacagcggacagtgcgggcgcctccggtgtccagaggacaaagaagccccaccggccggggtgggggcgagggcggagtaggaaggagcccggccgcggaggggaggagggcgatgaagtcaccgcggggccgcctcacccagtcccgggggtgggggatccctcccgctccgcacggccccccgccggctcggccccgcaggtcgaggccccggcccgcactacccgctcgcaggaaagcggaccccgctgcggcccgggagtcccggaggtccgagttgcccgagtccccggggcccagagagggcgggggcgcctggctcacacagcaggacccacatccccgggccccacccacttcccacggcccccagctctggactcgcggggacagcgccgcggatggcctgggctcgggccccgccccgccgtccaaagtttggggacctcgacccaacttcgccaggcgcccgagagaagtcggccgaggcggcgcggagagggggtatcggagcacggcggccgcccccggaccccacccgcgccccgacgtcctcctccgaaaggagccgcgcagtcctagcggggcggccgagggtcccgccgcactcaccgactcggccagcaggaggcggcctttgagagagcagaggaaagcccgcgccggcagcagggcgcggagcccggggaccgcggggccgggacgggagccgccggcaggctcggggtccgggtcggggtcggggtctgggggccacatggcggcggcggcggtagggccggggctcggcctggctcccctcttctcgcgcccggagggaagcggaaacccgggctgtgcggaaggagggcaggcgacactggctcgcgcaggggcgcatcccccgccgccacgccccgccccgcccccacccgctcctccagcccgcccctccccctcggaccccggctgcgggggatgctgggcccgacccgccccctccccggcctggggcctccgcagactccaccttcttcttcaccctggttcgggccgctggagacctcccgatcaccgccccggcaccccttcggagctcccacccgtctgcccctatccagaagggctgtctatactcgctgtctccggtctaacttcctgcccgtgcgcgtgtctgggatccgggaacccaggcgtctaaacagcaaagaccccggccgtgatgtcggctccgcaacccatgccctctctttttcttgggggccggagttttcttgcgactttcttggccacccctcctgtccccggccagccccaccctcctccagggcctctttgttggctgttccaggcctcggtcctgcacccgcctcccccaacccattctcagaggactctcagacctgcaagcgcagctccaggcacacacacagacacacacacacgcgcgcgcgcgcgcaaacacacacaggcacgcacatctgcaggacttcctgacctgcagtccccccaccccaacacatctctctctctcacacacacacacacacacactccacacgcacatgcgtgcacatctagagagcgtctggagttcagcgtgatcaagacccagcttcctgtgcctctgcgaagggcactgccccctcctttccttccacctgactagcggagacctgcgggttgtccttgtccctcttcaccggcagtctgtaaccaaggtcctcccactttcacctcctataactttctctgatctctgtctacttctcaccaccactagatccgaaaccattcctgcctgctccccgctgaactgctgtgatggtgtctttaagaggcccttaggttttctctctgggcagccgggggagagcttatggcacagtactgcgcacccttgacataactaactccatcttagaaaaagacttcattttatatttcatagggtgctttgccaacaagggcaagatgttttgtttaataaaaaatagaaggtcaggcgctgtggctcatgcctgtaatcccagcacgttgggaggctgaggtgggtggatcacgaggtcaggagttcgagaccagcctggccaatatagtgaaaccccgtgtctactaaaaatacaaaaattagctgggcgtggtggcaccgtgcctataatctcagctactcaggaggctgaggcacaagaatcgcttgaacccgggaggcataggttgcagtgagccaaaatcacaccactgcaccccagcctgggcgacagagcaagactctgtctcaaaaaataaaaaaaaaaataaataaagactgcgtccaaccacataaggacacaaagaagcacactgttcctctaccatttctcaccagagcactctgtgactacaaaacagcagcccagcagccttaactgacaaccatcccactgccgttcataagaactctgcatctgcctcccaaggctctgcccctcaaagactctgcaagaccctcaagcccagaccaggattccttttgtcttcttccttaccctggaactggttccttaaccctttctcctatctctttttctcttgatgttaaatgctactttgtttgttgtggaatgtttataacatttacatgtggattaagtatactattatatatggtttgcaatattgactgacttgtggagtggcttgagcccatgtgctcactactgagtgaacgggaagtactaaggaaaattggctccttgggtctgggtgcagtggcccatgcctataattccagcattttgggaggctgaggcaggcagatcacctgaggtcaggagttcgagaccagcttggccaacatggcgaaaacccatctccactaaaaatacaaaaattagctgggcgtggtggcacaggcctgtaaccccagctacttgggagggtgaggcatgagaatcacttgaacccagaaggcagaggttgcagtgagctgagatcgcaccactgcactccagctgcactccagcctgggcggcagagtgagactctgtatgaaagaaaaaagaagaagaagaagaagaagcaaattggctccttgggatagcttgtggcttttgtttttttttacccttgggtatagggtgaataaaaatctgacactgtggaaagacacaaacacgtgtggacctagttatctcttttttctttcttgagacagaggcttgctctgtcacccaggctggagtgcagtggcatgatcttggctcactgcaacctccacct

SEQ ID NO: 1242771 - DNA, 4001 bp, Homo sapiens
catctgtccctggtttctgtcactgtggctgcgtttgaacatgtctatggctgagtagtttctagtgggtgcaggagtccccatggggacacccagatgccccacaggaagcactgtggctgcttcagacaaatgaactgcagggatcccagggggtccccagagcacccccatttgctctgcacatggccttgggtgcagctgagccccctttggaaagatagactaaggcatagagacgggctgggaggctgctggggcctcccaggaaggccttccatgggactgacccagctctggccctccccttcctgtctcctatgcctgcaccccaaagcctaattctggggattcccctctcaattcctgttttttcatcccgcgatttctggggccacttcctctctctgtttctgtccatctcagcctctgcacttgcttggcctgggggtgggagtgaggggactagggaggcaggagtgccctcagcggctcctgtgaaccctgagtgctgaccgttcacccttccttatcctccctgacctggattcctgacatctgctgggcccagggtggcctctatgctcctgctggacatatgcctccctcttatgaggtggtcttgggtggggatgggggggttcaagccactctggggacggtggattcgaggcttctcccctcaagtggctcccagtggtctccagggtggggctgggagtgtgggctcggagtgtggcattggtgtctcacttgggcgttgggcaggtggcctctgggctgaccgtgggagaggctgcaggaccaccttctgccctctgccctgagtgaccagggagaggtcccggagcagaatcccccttcctcctgcccccaccctcctggccgctctcactgggcccctcagttgagccacctgtcaaatcaggcgcctgagcgctctcatctgtaaagtggggacaagggcaggaagcgccaagttcctgggatctaagcaacaagtggccgccgccgtgcgccgctctctcctcccgcctcccccggtctccggcccggcctctccctccccatccccaacggcccagcgccacccctaccccacagcggacagtgcgggcgcctccggtgtccagaggacaaagaagccccaccggccggggtgggggcgagggcggagtaggaaggagcccggccgcggaggggaggagggcgatgaagtcaccgcggggccgcctcacccagtcccgggggtgggggatccctcccgctccgcacggccccccgccggctcggccccgcaggtcgaggccccggcccgcactacccgctcgcaggaaagcggaccccgctgcggcccgggagtcccggaggtccgagttgcccgagtccccggggcccagagagggcgggggcgcctggctcacacagcaggacccacatccccgggccccacccacttcccacggcccccagctctggactcgcggggacagcgccgcggatggcctgggctcgggccccgccccgccgtccaaagtttggggacctcgacccaacttcgccaggcgcccgagagaagtcggccgaggcggcgcggagagggggtatcggagcacggcggccgcccccggaccccacccgcgccccgacgtcctcctccgaaaggagccgcgcagtcctagcggggcggccgagggtcccgccgcactcaccgactcggccagcaggaggcggcctttgagagagcagaggaaagcccgcgccggcagcagggcgcggagcccggggaccgcggggccgggacgggagccgccggcaggctcggggtccgggtcggggtcggggtctgggggccacatggcggcggcggcggtagggccggggctcggcctggctcccctcttctcgcgcccggagggaagcggaaacccgggctgtgcggaaggagggcaggcgacactggctcgcgcaggggcgcatcccccgccgccacgccccgccccgcccccacccgctcctccagcccgcccctccccctcggaccccggctgcgggggatgctgggcccgacccgccccctccccggcctggggcctccgcagactccaccttcttcttcaccctggttcgggccgctggagacctcccgatcaccgccccggcaccccttcggagctcccacccgtctgcccctatccagaagggctgtctatactcgctgtctccggtctaacttcctgcccgtgcgcgtgtctgggatccgggaacccaggcgtctaaacagcaaagaccccggccgtgatgtcggctccgcaacccatgccctctctttttcttgggggccggagttttcttgcgactttcttggccacccctcctgtccccggccagccccaccctcctccagggcctctttgttggctgttccaggcctcggtcctgcacccgcctcccccaacccattctcagaggactctcagacctgcaagcgcagctccaggcacacacacagacacacacacacgcgcgcgcgcgcgcaaacacacacaggcacgcacatctgcaggacttcctgacctgcagtccccccaccccaacacatctctctctctcacacacacacacacacacactccacacgcacatgcgtgcacatctagagagcgtctggagttcagcgtgatcaagacccagcttcctgtgcctctgcgaagggcactgccccctcctttccttccacctgactagcggagacctgcgggttgtccttgtccctcttcaccggcagtctgtaaccaaggtcctcccactttcacctcctataactttctctgatctctgtctacttctcaccaccactagatccgaaaccattcctgcctgctccccgctgaactgctgtgatggtgtctttaagaggcccttaggttttctctctgggcagccgggggagagcttatggcacagtactgcgcacccttgacataactaactccatcttagaaaaagacttcattttatatttcatagggtgctttgccaacaagggcaagatgttttgtttaataaaaaatagaaggtcaggcgctgtggctcatgcctgtaatcccagcacgttgggaggctgaggtgggtggatcacgaggtcaggagttcgagaccagcctggccaatatagtgaaaccccgtgtctactaaaaatacaaaaattagctgggcgtggtggcaccgtgcctataatctcagctactcaggaggctgaggcacaagaatcgcttgaacccgggaggcataggttgcagtgagccaaaatcacaccactgcaccccagcctgggcgacagagcaagactctgtctcaaaaaataaaaaaaaaaataaataaagactgcgtccaaccacataaggacacaaagaagcacactgttcctctaccatttctcaccagagcactctgtgactacaaaacagcagcccagcagccttaactgacaaccatcccactgccgttcataagaactctgcatctgcctcccaaggctctgcccctcaaagactctgcaagaccctcaagcccagaccaggattccttttgtcttcttccttaccctggaactggttccttaaccctttctcctatctctttttctcttgatgttaaatgctactttgtttgttgtggaatgtttataacatttacatgtggattaagtatactattatatatggtttgcaatattgactgacttgtggagtggcttgagcccatgtgctcactactgagtgaacgggaagtactaaggaaaattggctccttgggtctgggtgcagtggcccatgcctataattccagcattttgggaggctgaggcaggcagatcacctgaggtcaggagttcgagaccagcttggccaacatggcgaaaacccatctccactaaaaatacaaaaattagctgggcgtggtggcacaggcctgtaaccccagctacttgggagggt

SEQ ID NO: 1242772 - DNA, 4001 bp, Homo sapiens
atctcaaaaaaaaaaaaaaaaaaaaaaggcaattgcacacctcccttcacctcctacattctctttgctaacagcaacgccaaactaaaaaccaatgcatctttgaaaacattccagtttaccagataaggtaaatttaaaattctgaagacagattatctgatccatttttctttccataaagcccttcaaaaataccctctggcagtcagcagaacaagcctttcacccaagagagacataaaatagcctatgattctgtcatttacaaacgccaggacatttatttaaagggtatccacacattatattattcccaaggaatgcttatgcactcaagtaggaaaaggaggaccaggcctggcacggtggctcatgcctgtaatcccagcactttgggaaaccaaggaggggtgatcgcttgagcccagtagttggagaccagtctgggcaacatggtgaaaccccatctctactaaaaatacaaaaattaacccggcatggtggaacgtgcttgtagtcccagctactcgggaagctgaggtgagaagatcgcttgagcctgggaggtcgaacctgcagtgagccacgatcgcaccagtgcactccaccctgggcgacagagacccggtctcaaaaaagagagagagagagaacaagaacaagtggcttctctggctatgagaagtctataaagttttgaggccggtggcctcagaaggcctacctgtgacagagaatgttggggggacacacgggtttttctgaattagagcatgcccacaacagagctaagcaattgcccgcagaggcatgttacaaaaccacaaagcaggaacagagctgagaggcccctgcccagaacaccctggaagctaaaacacaggaccctgagaaatgagctctactacagacaagtccaacagaaagttctctgtttctgctacctccaaaactggctgccctcccagatttaactctgggtaccaattgggcagtgccagccaccgtgctgggcggtggattccgggatgccaagtctgtcttcttggttagaaggacacaaacctctgcagtgtagagaattgtgggcatatctgggctcctccactgcatcagggctacctgcctccatccagcaaatacttactaagcgcctaccatatacgcctggcacccagctagacatcaagtgggaaccaaaccacagtccctcgtctccgcaggcagaaacaggcaccgtccggaggttgcgcgggccgggaaaacctgccacaggttgctaagaccagctgtacccaggagacagcaggattcccagcagcacccagcccagtaacgccacagactcccgggagcgagggcggagcggacaggtaggcccgaaggcaggtgctcaggtaggaggcgcacacctgaggctgccggcctgggaagggcaggctctggccgaaggcggggtccccagagaaggctgcagagtggtcccgggaccccacgagggagagggggcgcgaggagcgggctccggcctgggcaagcgggtacgcggcggaggccccgcagcggggcggggagggaggcgtgcggctaggccgccctcgggcacctggggccccgcccggcacctaccacttgggcgaccttgaggcggccgagcgcgccgcgcaggtagtcggggtcgcagcgcaggccggccagcccgcggcgctggctcaccggctcggtggtgggctggtacgggctgctggcgcccgagatcatggaggtgctcgaggcctcgccctcgaagccgtccagctcctcgccgctccgcatgctgccgcccggcccgggccgcctcgcgcggctggctcccggcgccaggagcgggcggactcagcggggccgccgcatcgccgccgccgccgccgccgccgccgcccgactgactgcccgcggcccgcccgccgccgccgcctctcgcccgccgcccggctgcggctgcggctcggtccgctcgggctcggctcccgccgcctcggcagcggaaagggagggaggtgggagccaggagagggaaggaggcgggagcgggcgcgccgggccgggagaggcggagccaggccgcagccggccgctcggaggcgctccgcggctcgagcgaggtggaggcggcggcgccgcgggcctcggggaggggcggggcgaggcggggcgccggctcctcaggccccgccctggccccgcccccacctgcgcctagagccggggcgggagccgctggtgggcgctggcgatcccggcacgcggggcgatggggttcaggcagcggggtcttggggctgaggaaagggtcgaggtggacctggaggccatggagttgctttcccagacgctgcctcaggttctcctttgaagaaagtggggtcctcgacgcatagggtggggagcttctcggtaaagacagagacgggctgcgccacccgggtgccgggaacggtgcgtggccagggtgggcttgactcagactattgggccgacgagaggtgggtaagtgcctgtgttctcacgctgggcgcctggaacaaaccggttccgaggccaggggcgggcggggcagggtgaggagccgccccactgcaggttgtccccgccggcctgacccaggcgactgacatgttcctctcctctcagctgaaaagctttgctagctctgtctacgcataaagtaaggttaaacacagattttgccccgaagggcattaattagggaccaatttacaattcaagtgtgaaggctaattttaagctaagtaaaacactgactaagaagtgtcgctttgatattgaacccttccacaaccacaaataccgagagcttgccatgttctaggcactgagcaaggcgcttgaagaacgtatcgttgttatttctattttacagaagaagagactaaggctgcagactggaagtagcttgtccaaggtcacacagttcattggtgggcagagcccaggttcctactttttctttttttaaaaaaaagttatttattattttcatcatcattatttttgtagagatagggcctcactgtgttgcccaggctgatctcgaactcccgggctcaggggatcctcctgcctcagcctcccaaattgctgggattacaggtgtgactgaccatgcccagccctcaactttttcaaagataggaaggacagtgactctaatactgttgtccttctgtatgggggcaagagagggagcttgttttcaggaccccctcaaataccaaaatctgaagatgctctcaaatcctttatataaaatggtgtagtatttacatataacctacacacatcttctcgtatactttaaataattgttctactgtattactttttatctatatttttgtgtgtgcgtgtgtgtgttgtttgggggttttttgtgtgtgtgttttctgagacagagtcttgctcatcacccaggctggagcgctgtggtgagatctctgcttacagcaacctccacctcaagcgattctcccacctcagcctcccgagcagctgggaccaccacgcccagctaattttggcatttttagtagagacagggtttcaccatgttggccaggcagatctcaaactactggcctcaagtgatctacccacctcagcctcccaaagggctgggattacagatgtgagccaccgtgccccacctgtttttctgttttgttttgttttgtttgtttttaaaatagacttttcactctgtcatccaggctggagtacagtggtacaatcatagctcactgtaacctcgaccccctagacttaagcaatcctcctgtctcagccttctaagtaactgggactacaggcatgccaccaccatgcctggctaaattgttttttctttctttttttttggagatggggtctcattatgttgcccaggctggtctcaaacttctggtctcagcagtcctcccacttcagcctcccaaagt

SEQ ID NO: 1242773 - DNA, 4001 bp, Homo sapiens
cacggtatatttatattaaaaaaaagtttttttttgagacagggtctcactctgctacccaggctggagtgcagtggcacaggtcatagctccctgcagccttgacctcttcccaggctcaaaggatcctcccacctcagcctccaaaggagttgggactacagacgtgcaccaccacacccagttagttaaaaaaaaaattgtggagatggggtcttgctctgttgcccaggctggtctcaaaatcctgggctcaagcaatccctccaactcggccttccaaggtgctgggattacaggtgtcagccactatgcctgttttttgtttgtttcttttttactggtagagctatatttagacaaatttctaaaggaagacaaaactgaggtgtttccacattcactaaaatcttaaaataagggcatataaaagtttttttcaacaagctcctctgtcttaattcgcattgtgcttgctggaaactacagccatgtttagatctcatctatactctatttcggaaaaagtctaattttaatcattaacttcacatactaattaacggctgtagttaagctgtgaaaccttacctaagctaataggaaattaccttcacatgaggacaacttaagtgattcagacactccaccgttctgactatacttttgctgtgttgccacctaatttttattactactcccttactcactactccagccaaacaggcctttctgctgttcactgaagacaccaagcacattccaagacaaaagtctttctgcattggtggtccctctgcctggaatgctctttccccagctgtcagcacagctaactccttcacctccttccaatatttgctcaaatgtcattttctcagtgaagcctacctaagattgcatcttgcattccccatgcctcttacctcgctgtatttttttcctatggtactcatgtacttccaacctataacttccttctttttgtttactgtttattatttgtcttccccaaactagaatgtaagctccacaggacagagatctttgttttgtttacacatagaccattccaagaagttggacattgcctggtacacagtaagcactcagtattactgaataaatgagtggatatcatacttagcacaaaagggatctctctcttcaggttctgaatatgagtcattaatagtgcacctcaacttcactccagcacttaaatgcatgacttaaaaaaaaaaaaaaaagcatgtggcttacagcgtgtgtggaaaaattttccagtatatgatcctctgagcctttcattaaacagtcctttgagctttgtgacatcataattctgctaagtgggtcgctattaccattctcatattgcaaactcaagtaggcagttatgtagcccccgcccaaattagtgaacccaaaacaaaacccacaagatctcatcaacagtttttacctcacagctgacacttataaaggagttccaagtgcttccgccaactcctcctaccagcaactgtgaaaacaacggccagtgagtatccagggctgactttgggccgggcaccccatatctcatttcatctagtgaagtaagtcccaaaccccactccagaggcccggtccctgacctggaggaaactcagtcccagcccctggctcacccgctgggaagtcgaaggagggcccggaatcgtacccaggcctggattaccttcgcccacgcccactggggccccagtgtctggagaggctgcactttactctctcgaggaagccattctgcacttccgctctcggggctgcttcccgggatggtccctccctttgggtccgcggcgcctccagccacaaggcagggagatggtgcgccggactggggggaaggctgtccggacccgccctcgcggcaccgggaagccagtcccacctccgggccccgcagccgcgaatgccggcagacagggaccaggaggcactcaagtcccactgcgcacgcgccctgtaggccgggccggagtcacgtgcgccaacgttacgcacgccggcgactctcgcctcgcctaggcctcagctccctaggttttgcttcgcggagtacagaagctgggaggcgccagcctcccgcccccggccactatggcaacggaagcggcgcgcgcaggcggagcattctttggctccgtcccgaagaggggtgaaagggagagggacagggaggcgaaggggagggggagggggagggagggaagggacggggcaaacctgtctgtcaggacgtgctggttccgctcactggctgctggccccaagggctttcagactcttctggacagttgttacttcctgtacagactgggttgaaactgcagctcaaaagacgataggttaaaagccaaactagggaactgcaagataagattgtttatatatacatgacataatatatattaattatgttgcttaataagccaataagaaaaaggccaacaaccccagaaggaaaatgagcaaatattagaacaggcctcccaaaaaacaaaaaagtcaaacaaatagccactaaggatatacaaaactgtttaaactattattagacaagaatggaaatgaaaacagcaagttttctttttactcggtttagcaaagatgtaaaaccttggtaatgaccactgttggtgtgactatggggaaacaggtttacatctgtggatggaagaaaaacgttattagaaaccttacggaaggcaaacttatttatttgtttgtttactgaaacaaggtcttaccctcacccaggctggtgtgcagtggctcgatctcggctcactgcagcctcaacttccccgggctcacgcgatcctcctagagagatggcatctccctatcttaggctggtctggaactcctggactcaagcgatccgttggtctcggccacccaaagtgctgggattacaggcatgagccaagccgcctagcccagaaggcaaacgttgaaaagagacatgcactttggctgggcgcagtggctcacgcctgtaatcccagcattttgagaggccgaggcgagcggatcacgaggtcaagagtccgagaccagcctgaccaacatagtgaaaccccgtctctactaataatgcaaaaaattagccaggcgtggtggcgggcgcctgtaatcctagctacttgggaggctgaggcaggagaatcgcttgaacccgggaggcggaggttggagcgagccgagatctcaccactgcacaccagcccgggcgacagtgcgagactccgtctcgggaaaaaaagaggacatgcattttaacccagcaattcctcctcctcgcagtttatccttaggagataattaaacagctggcactcactttggacaaaatgttcatttcagcatctcaataacatagccaaatggaaatactctaaatgtctactttaagagaattaattaaattattacagtacatctatataatgcacatatatgcattatatgcagccattaataggctgtatgtgtcaacagtattgcatgaaaatagaagaatattagaattatgtgtagagtttttaaccatttatgtaaatagatatatagacataaatgtaaaattcattttttacaagtcttccagaacatggaccaatggagaaaagattatattttcacaaaatagtggtaggtcatttgtgtctctccatgcaaaaaaaattgtatttggaccctccttacatcataaacaaaaatacatttcatttggattgtcagtctgtattttaaaagttaataagaaaacataagagaacatctttgcaaccttgaagtagtcaaaaagtttataacaggacacaaaatactaatcataaaggaaaaatgtataaattgaactatattaaaactaaaaatatttagagcctgtagtcccagctctagggaggctgaggcaggaggatggcatgaacccaggaggtgga

SEQ ID NO: 1242774 - DNA, 4001 bp, Homo sapiens
aaaaaattgtggagatggggtcttgctctgttgcccaggctggtctcaaaatcctgggctcaagcaatccctccaactcggccttccaaggtgctgggattacaggtgtcagccactatgcctgttttttgtttgtttcttttttactggtagagctatatttagacaaatttctaaaggaagacaaaactgaggtgtttccacattcactaaaatcttaaaataagggcatataaaagtttttttcaacaagctcctctgtcttaattcgcattgtgcttgctggaaactacagccatgtttagatctcatctatactctatttcggaaaaagtctaattttaatcattaacttcacatactaattaacggctgtagttaagctgtgaaaccttacctaagctaataggaaattaccttcacatgaggacaacttaagtgattcagacactccaccgttctgactatacttttgctgtgttgccacctaatttttattactactcccttactcactactccagccaaacaggcctttctgctgttcactgaagacaccaagcacattccaagacaaaagtctttctgcattggtggtccctctgcctggaatgctctttccccagctgtcagcacagctaactccttcacctccttccaatatttgctcaaatgtcattttctcagtgaagcctacctaagattgcatcttgcattccccatgcctcttacctcgctgtatttttttcctatggtactcatgtacttccaacctataacttccttctttttgtttactgtttattatttgtcttccccaaactagaatgtaagctccacaggacagagatctttgttttgtttacacatagaccattccaagaagttggacattgcctggtacacagtaagcactcagtattactgaataaatgagtggatatcatacttagcacaaaagggatctctctcttcaggttctgaatatgagtcattaatagtgcacctcaacttcactccagcacttaaatgcatgacttaaaaaaaaaaaaaaaagcatgtggcttacagcgtgtgtggaaaaattttccagtatatgatcctctgagcctttcattaaacagtcctttgagctttgtgacatcataattctgctaagtgggtcgctattaccattctcatattgcaaactcaagtaggcagttatgtagcccccgcccaaattagtgaacccaaaacaaaacccacaagatctcatcaacagtttttacctcacagctgacacttataaaggagttccaagtgcttccgccaactcctcctaccagcaactgtgaaaacaacggccagtgagtatccagggctgactttgggccgggcaccccatatctcatttcatctagtgaagtaagtcccaaaccccactccagaggcccggtccctgacctggaggaaactcagtcccagcccctggctcacccgctgggaagtcgaaggagggcccggaatcgtacccaggcctggattaccttcgcccacgcccactggggccccagtgtctggagaggctgcactttactctctcgaggaagccattctgcacttccgctctcggggctgcttcccgggatggtccctccctttgggtccgcggcgcctccagccacaaggcagggagatggtgcgccggactggggggaaggctgtccggacccgccctcgcggcaccgggaagccagtcccacctccgggccccgcagccgcgaatgccggcagacagggaccaggaggcactcaagtcccactgcgcacgcgccctgtaggccgggccggagtcacgtgcgccaacgttacgcacgccggcgactctcgcctcgcctaggcctcagctccctaggttttgcttcgcggagtacagaagctgggaggcgccagcctcccgcccccggccactatggcaacggaagcggcgcgcgcaggcggagcattctttggctccgtcccgaagaggggtgaaagggagagggacagggaggcgaaggggagggggagggggagggagggaagggacggggcaaacctgtctgtcaggacgtgctggttccgctcactggctgctggccccaagggctttcagactcttctggacagttgttacttcctgtacagactgggttgaaactgcagctcaaaagacgataggttaaaagccaaactagggaactgcaagataagattgtttatatatacatgacataatatatattaattatgttgcttaataagccaataagaaaaaggccaacaaccccagaaggaaaatgagcaaatattagaacaggcctcccaaaaaacaaaaaagtcaaacaaatagccactaaggatatacaaaactgtttaaactattattagacaagaatggaaatgaaaacagcaagttttctttttactcggtttagcaaagatgtaaaaccttggtaatgaccactgttggtgtgactatggggaaacaggtttacatctgtggatggaagaaaaacgttattagaaaccttacggaaggcaaacttatttatttgtttgtttactgaaacaaggtcttaccctcacccaggctggtgtgcagtggctcgatctcggctcactgcagcctcaacttccccgggctcacgcgatcctcctagagagatggcatctccctatcttaggctggtctggaactcctggactcaagcgatccgttggtctcggccacccaaagtgctgggattacaggcatgagccaagccgcctagcccagaaggcaaacgttgaaaagagacatgcactttggctgggcgcagtggctcacgcctgtaatcccagcattttgagaggccgaggcgagcggatcacgaggtcaagagtccgagaccagcctgaccaacatagtgaaaccccgtctctactaataatgcaaaaaattagccaggcgtggtggcgggcgcctgtaatcctagctacttgggaggctgaggcaggagaatcgcttgaacccgggaggcggaggttggagcgagccgagatctcaccactgcacaccagcccgggcgacagtgcgagactccgtctcgggaaaaaaagaggacatgcattttaacccagcaattcctcctcctcgcagtttatccttaggagataattaaacagctggcactcactttggacaaaatgttcatttcagcatctcaataacatagccaaatggaaatactctaaatgtctactttaagagaattaattaaattattacagtacatctatataatgcacatatatgcattatatgcagccattaataggctgtatgtgtcaacagtattgcatgaaaatagaagaatattagaattatgtgtagagtttttaaccatttatgtaaatagatatatagacataaatgtaaaattcattttttacaagtcttccagaacatggaccaatggagaaaagattatattttcacaaaatagtggtaggtcatttgtgtctctccatgcaaaaaaaattgtatttggaccctccttacatcataaacaaaaatacatttcatttggattgtcagtctgtattttaaaagttaataagaaaacataagagaacatctttgcaaccttgaagtagtcaaaaagtttataacaggacacaaaatactaatcataaaggaaaaatgtataaattgaactatattaaaactaaaaatatttagagcctgtagtcccagctctagggaggctgaggcaggaggatggcatgaacccaggaggtggaacttgcagtgaaccgagattgcaccactgcactccagcctgggtgacagagcgagactccgtctcacaaaaaaaaaaaaaaaaaaaaaaaaagaaagcacgggctgggtgtggtggcttatgcctgtaatcccagcattctgggaggccaaggcgggcagactgcttgagtccaggagtttgagaccagcctag

SEQ ID NO: 1242775 - DNA, 4001 bp, Homo sapiens
gtctcaaactcccatgctcaagcaatactccagcctcggcctcccaaagtgctgggattatatgcgtgactcactgagccctattaatatgactcttcttactaaaattttattccaatagtttgtaggcaaattataaaactgctaaacgggctactgaaatttttattaggtatgtctttatcaaaactgtaataattcaaaaatttaaatatttttattatttatttattgagaccgggttttactcttgtcgcccaggctggagtgcaatggcgcaatctcggctcactgcaatccccgcctcccgggttcaagcgattctcccacctcagcctcctgagtagctgggatcacaggcagcgtcaccacgaccggctaatttcgtatttttagtagagacggcgtttcaccgtgttggccacgctagtcttgaacttctgaccttaggtgatccgcctgcctgggcttcctaaagtgctgggattacaggcgtgagctacggcgcctggccaaaaaatatgttttttaatggaaaaacaaaaacaaccacacgaaatagactgttcttttgagaaggccagttataatttccttttcttaaaaatttcttcataaggcattgtctacaatgttaaataaatttaaacaaacattttacataaaagcaaatcattcctatattaggataaaagtatcaattgttagttttcccttaaaataacattcaggaacttacttctccagcgtccagtagcaggttgcaaacaatgaatatattcagtaagtctcctctcaaaagccttgagatctaggtataaagatgtcaattttctaattagccactcttactcgtctgacgaaatgtcagagtatttacctaacattaagacgacatgtgagatactcttaactgcttcaggtcttacacactaacttccatgtatcactgcactgtttatttcatttactatgacagctttttaagcacttgacaaaaaattagggctctttaattccaatttctcatataagaaaacttgctgatttacttttagaagcttcataaatggtattgggagaaataagcagcagcctcggccagcgccaaaagcgaacattttcagggttgcaaataaaattaaaatcaggtcgagttttagctctctgggaaccaagaacttcctattagaaccacgtagtgcctaacatcaaagtcttcgaggtctacctgactgcaattacccgcctccggtttccagctcttatatttaattaatggctacgccgtctggccttactagacttcttgacactgatagcgagtgggtgtggaaagacattccccttgccccctccgaaggggtacaggtgatcttcgtggcacccaggcagcgcctagttctagaagacaggggcgtctaagctgctccgagtgagtggtggggtatcctttccgcagtggtgtgctttaaactttaaaacaccgagcagcacttcctaaccttggcagttaccggaaaccaccgcaggaatcagggatacaactcgcggggctgtgagaatgaaatgaaatgaattagcaggctgcaatgcacgaagtgcaagtgtctgccagtgaaaagaaaataaaaatagaagctggcgaggaggtcgaccctctaggtttgtggggactcagggagctgaggcaccgccccccgcgtctggccaggtacggccgcctacgcgcccccaagctccgggcccctagctccatcctctgcggcctcctcccggggcgggggtcttcacgacgccggctcctccggagcaccgccagcttccgaggggagacgggggacgggcccgggcggcccaccctaccttccgcctgctccagcgagttcatgtcgggcggcagctcgggtcaccgccgctgccctgtccgcatcgcagcttccgcggcccccgcccggcccgcagcgccaactcccacctctaaccgctccccgctgcccctccccgtcgcaccgccccttgcctagacccgctacgctcattggattcctctactagacctccaactaagacagctttctattggctgtctcttgcaccggcctcggcgcctagcgttggacggtcagccggagggaccaagaactgccggcggccaggcgggcgtaacgctggcgtcgcctgctgccccggggaggaactgcagccctccggagccagttcgttcattcatttatcccccgttccccgcttggttctttcattcgtcaaatgttgattgagcgcccactaccttccaggcattattctggtcgctagcgagggatacagaaatcaaagagctggttctgtcctcaaggatctcaaggagtaatgaaatctgtacagaactaactagaaccctaaataaccagtttccttaattatggtatcctagataaccaaccccttaagtaaacacttctctcttggttactttcctctcacatcacccagctttcataattcctaaatgaggcaaagtgtaagcccaaatacctataacttaagaagagatctgtaagggattgactacatttgtatttgatcacaaggccttcttgttcatttattggtggcattctttcattcaaaatcattttattgcctaacatgctagacactgtattgatacgcgtgtgagccaggtagacaggattcctgcccgcaaagaggaagggctacagcaggcaacaaacatgcaaataagtaattgatttcaaataagaatagttgtgttaaaatagagatcctggccgggcgcggtggctcacgcctgttaatcccaacactctgggaggctgaggcgcgtggatcacttgaggtcaggagttgagaccagcctgggcaacatgacaaaaccctgtttctactgaaaatacaaaaaaattatccagacgtggtggtgcatgcctgtaatcccagctctttgggaggctgaggcacgagagtcacttgaacccaggagacggaggttgcagtgagccactgcactccagcctgggtgacagcgtgagactgtcaaaaaagaaaaagaaaaaaaaaagaatctaagactgatgggctagatttttttgtggcagtaacataccaacttataaacaagacctaaggccctgccaggcaagggttaaatcactcaagacccagacacttaaagaataaacgatgttctaactgccacaatgttcgtttttttcctctagcagctaaacaagcaatattaaaacaattgcagcttaccaagtaccagtcactgactaactgatccctttgttccacaagccataactcctgctttcattagacaagagactgatttcagtaactttctcctgataagagaccacccaccatagattggccctagccagtctacagaggctgcacaatgagtgcctttatgttctctgcttcgccttttgacgtaaagggtctaactgtaatgcatttaaatgttaagtctctaccccaaagtgaacatgtgacccatgtaacatgcatgattgtttattatgcatgtgtgcacccctctttcctgaatagcttctcctataacctgttaaatatgtatacttggccaacccatttggcataaattcctgcttcacccttcctccttcaaagtgcctgcttttggtctctgccagagaccatacttcccagcctataaggatggccagcctgcaggctccaacccttcagaaataaacctctttaggccaggcacagtggctgatgcctgtaattccaacactttgggaggctgaagtgggaggatcacttgagtccaggagttccagaccaacctgggcaacatagtgagattctgtctctacaaaaaacaaacaaacaaacaaaaaacatttaaaaattagctgggcatggtggcatgtggctgtggtcccagatactcaggaggctgaggcaggaagattgcttgaacccaggagttcggcgct

SEQ ID NO: 1242776 - DNA, 4001 bp, Homo sapiens
ccaacatggtgaaaccccatctccactaaaaatacaaaaattagctgggtgtggtggtgtgcacttgtaatcccagctactccggaggctgaggtgggagaatcacttgaacccgggaggcagaggttgcagtgagccgagatcgtgccactgcactccagcctgcctgggtgacagagcaagactccttctcaaaaacaaacagacaaacaaaaaggctgggcatggtgtggctcacacctgcaatcccagcacttcaggaggctgaggcaggcagatcgcttgagctcaggagttcgagaccagcctgggcaacatgatgaaaccctgtctctaccaaaaatacaaaaaattagcccagcgtggtggcacgtgcctgtagtaccagttactcgggaggctgaggcacgagaatcactggagcccaaaaggtggagattgcactcagccattgcactccagcctggtcgacagagtaagaccctgtctcaaaactgaaataaaatgcttatagtgctatattttaaaaaaagaaagaaagaaaaagataaaatgccaggtaagacttttttcatgatatactgtgttatttcagtcctaccttaagtacaggttgtttctggttgatttctccttggggaatggggagccccagcccttatgactgaacccctgcaggatggcctggccagtgcgcagcgtgcaggtcagtgtgtgctaactcctagccctagatgtgttcttgccccacatgagtgtgccccacccctctcccagccatgggcaacccgggctttggcagagagtctgtatgcccctttctgccagggaccctggccccagctgaagagggcagcccaggcccaggatccttgcccccaagcccagctccccagagcccacggctgtgctgcctgtcctctacttacagccctgacctctgttcccactctggcatcagcagcccagcctctcccacgagaggctgtggtgggaacacagctctaagtgtcagatccctggctcagcctcccaaaaaatgaacttgggccagacatgacccctctggtcttccatttccctgaaggtgggggcacagacacaatgttttcccaggtcgggactgccagagctcacatgttgggatagcagatttcactgaccccagccagccccaggcagccccgagagccagggctgagctaagtgcattctacccatgatcatactcatcctcgctctcaccaccacgccccgcccagcccctgcactcagtaaaataagaattttcattatgtagcacagaaaggtcaacagaatcgcctgaagcagcacagccggcagtggccaacttgagtttacactcaggtctgcccgattccagctgccccacatgtattcccaggtagtcgtggcatttgccgagtgttggcctcttccgcgggccaggcctgtagacccttcccagcaggcagcaattctcgcttgcatttctaaaccttctggaaatgactaaggaagcctccccgatcccccatttttctttttcctcctaaatgagaatttttgcaggtccctcccatctttcacccgtgtccctgctgactgcactttgatgagggaggctcaggtgggaagggggacccacgagtggcagctcggggagccatggtgttgcaccaccagcatttccagagtcttctggagagctagtgaaaatatagattcctaggtcccccaagtcctcctgggggacctaggaatttgcattgtacaagctgtcctgaaaattctgatgcccgctaaagtccaagctccaccagatagagggaagccacaggtttcccaccgtgccagtttggtcctacctaaatgcctttctagagggagaacatggggatcccctcggggtcccaccgagcctccacctcaccctgagttacctgcttagatgccaaccgccagccaggaattgccttcttgctgccactcgtagctggcccctcagacacaaggaagattaattggcagtagctgggccgtgtgcaaaggattagcaggtgctgaatgggggagggggagaaaagaggctgttgatgcccaggaaaccagcagcacctcccaactcccagggtccagcaaggatgtgggccccagggaagggctcctgcatggcccaggtttggagcaccatgggttgccaggggacctgcccggcttaccaggggcctggcttcccatacaccttggccaagacacggagtggctgatgggagaataacagcttggagttcccatgtgatgcctggagactcctcatggtagcaggggcttgtcagctcccactcagcggtggcaagaggtgtaccccaactctccagcccccaggccaggacgcaggcaggttctttctggcttagagtcttctctgggcagggtctcagcagccctgccttgggctctgccagaaaggctgtgtcccaggcctgggccttgaggatggatccaagacccggcagatgactgaggcatctgacctgccctgtgaactgaggctggacacttgaagggatacagagatctaggaggagagggtgcaagggacagggcccaaggaagaggggctcagtgtggtggccctgagggatatttggcaaagggcaggacttgacttaattatccgcaccatttctagagttcttcctttcctttcctttcctttttttttttttttttttaagccacagtctctctctgtcactcaggctaagtgaagtggtgcaatcacagctcattgcagcctcaacctctcaaactcctggatgcaagcaatcctcctgcctcagcctctcatagtattgggattacagatgtaagcccctgcacctggcctagagctcttcctttgtgcctggcagtgtgccagccttggcacactgagcaagacagacataggccctgtcctcatggagcttacattccaatggaggagattactgacaaataaagaatattgcaaattatgctaagtgccataaaagaaacaaacagggcagaagcatgttgtggagggcagtaggggcaggtaggcaggcccctatgacgaggtggatgtatatttgaactgagacatgaaaagtaagaaagactcagctgtgaaaaaagctgggtgagtggtgctccaggccaaggacactgcaacgagaaaggttctgaggctggaatgagccttgaggagcagaatgggaaccggggagcctggagcttaacgggtgcaggggagagtggtgggagatgaggttgacagagggcaggggcagatgttgtgagactgtaagccacaggaaggagtgtagttttagatgatggttttgaacaggggctgggcatgatctgtgtggctctgtgtagcaggcaagcatggaaacaggaaactggtcaggaggctgcggagggacaagctgattggtgactggatgacccctggcttcccctccagtgttgggcttcaagacctctgataatgcaacctctacatggcaagtgattcacaagaaagttctttctgccagcaaggccagaccccaacggtaaagctcaatgtactccctgacccttccctacaaatatgccaggctgcaggggtcagagctcctccccaaggaacagcagcaagcccttctgctctgcttgggcctgagactaacacaggtgacattcgcccttgcctgcagcctgacgggagggatgatggggcttggactatgctggtgggagtacagatagaagggaaaggggaggaaaaaggcgggcattgaggggctcaccctgggaaactgggtagctggtttagtgggtgaaccagtaaaccgccccaggctggtttacacatgtactgaaaagaagaagcctgaggctggaagtttggaggaagaattttggagggaaaatcatgagcactactttgttaagatgtctgagagaggctgggtgcagtggct

SEQ ID NO: 1242777 - DNA, 4001 bp, Homo sapiens
gctctatctcggctcactgcaacctccgcctcccgggttcaagcaattctcctgcctcagcctcccaagtagctgggattacaggcacctgccaccacgcccggctaatttttgtatttttagtagagacgcggttgtgacatgttggccaggctggtctcgaactcctgacctctggtgattcacctaccttggcctccctaagtgctgggattacaggcgtgagccaccgcgcccagtcgattctagacttgtttccactaagacttggggaacccacacttgttgaaaaggaactaactctccaaactagttttatcaacatgctatcatttcagtcaaagcacagctagccacctaaaaccatgtatcatcaatgcatattctccttagacaaggtaacaatttgcagtatcctaaaacataattatttaaactgttaccacatgtcttcttaatagctaaaatactctgctgccaatctttaaaagggtaggaataccaaccgggaccacagatcacttaagtattaaacccaagtacctatagaaaaaaattgttcttaatctgtttgaccttcctcctaatattttacttgccttccctcatttttttaatccatgtattccctattcctatcaaaggggctgtcataaggaaaacgttcggcattgtttcaaacagtataattatattcactcaatcactgacttaaaaaaaaaaaaaaacccaagtagtcacaggctatcgaattgtagagaaatcggcagggtaggttaagcattgttactcagttttcaggaagaaaacagactttattagagtcctaagaaatgtgacatttgattaacttcatgggaaaagtttgtcataaagtttattttaaatacaacattttcaaacgcacagatgtcaagcattcttttttaatctacaaagcttactcctcggggagttagtatctgtgagccctcttgggtgaattctgcaaaggaggtggtactgaaaaagtattatttgtgtttggccttaagtacctctacaagacctgccgtggatcttatcagccttgaggcctacaagtgctcagctcactagcgggacacttgtcctgggtgagcaggaccgccactactgcagacaccggaccgagtaggtgggggccaacttcaaagaaagtgtgagcgcccaggcgcgcgagtggaacaaaacctgtagcaagtaataaggaagtgcttgctcccgcccgcccttcccatccggggacacccgaaacctggggggctttgacaacgtgctgggggcgtaagacggggagagtggcagctccgagtacacggagaagaactggaaacatgcaaaaactccaaacacggtcccccccgccagaagccctaggcctcggaagccgatgcccactgcaaccatcagggagcagagacagaaacagtagttaaggaggtcgtggaggtctcagaggggtgcaacccgcgcgaagccaggcccagcgacacgaactgccgccgctgccgccccctgagcctccaggcccgggacagagaccaccatgggtctcaccccgcgctctaccctccgcttcctggagccttctcgctggcctctcatcttcagagcgcgaagcctccgagagccgtgtggagaagagtccgccctctcccgcctcgtcccacttccccgtcccggctgcctctcactccctagagctccgggaaacgcttccagtggccccaggtccacccctgttcctcctcccaccggctctcgcgttcccaagctgacaccgccaccctaccctagcccctgacgccaacccgcctcacctcaggcggctccggcagcgctggacacaggaaactcctgggtccccgactccggctctcctcgaccccctcttcggttaactccgcttgtttctctacaaaatggcgccggaggtcgcgcgctcacgtcgcggcctttcccctccccgttcccatttcatcattcgctgcccgcccgaggagggatggccccagagccagccaatggccgcgccccgcctgtggcttctacccaatcaccgacaggtgcccgcggatttaaaccaatcacactctatcacttgcagaagtcgaggaagaaatcaggctcctgctagcaactaccaatccggcctcctacttcgcggactttggccaattgccgctcaccaggcccaggggaccggagtcagagccctcgcgcctgcgctcgaggcgagggccaatagggagaggctgataacttcgatttggggcttcacgtacttcccacctgccctggagggctgcgaccagtggggcttggcattgcctttgaggaacaataaattatggaaggggcccataactcctcgccaccctgcgcgggaactactttgaattacagtgaaacagctttcctccactttccttcctctttcgaaatgtcacggtccagtagacttcggggattcccaaccgaaacaatcccctcccctagtgtccctttggcggggaacgccagccagaaagcaagccaggttgtgactagagttggggcgctttgcatcctgggatgtgtagtcgcgctcctctaccccgttcccatcgcagaagtaatgcgtcttcgttcgtcgctgcgccctagaaggagcagtgcatgctgggggttgtagtcacccaggtggccaccttgtcctcgcttgcttcgctttggtcaagggaactttctgttttagttctgtctattgaagaagggacaccttccagagacgccttccagagacgtaggagacgcaagttctcttcctggcttaagtcctagaagccgtctaagaaaggatacccatgtcctttgctctcaagagaaaaagcatagaaacatattttgctatggtttgtttgttaactatgatagttggtaagattttatactcacctgtacccaaaagagaaaggattgggaaggaagtgttgactggttagctctattaccttttgaaattaaggccgggcgcggtggctcacgcttgtaataccagctctttgggaggctgaggcgggtggatcacgacgtcaggtgatcgagaccatcctggctaacacggtgaaaccccatctctactaagatacaaaaaattagccgggcgtggtggcgcacacctgtaatcccagctacttaggaggctgaggcaggagaatcgcttgaacccgggaggcgtgggttgcagtgagcagagatcgcgccactgcactccagcctgagcgacagagcaaaactctgtctcaaaaaaaaaaaaaaaaaaaaaaaggcagggcgctgcggatcacgcctgcaatcccagcactttgggaggccgaggcgggcggatcacgaggtcaggagatggagaccattccggctaacacggtgaaaccccgtctctactaaaaatacagaaaaattaaccgggcgtagtggcgggcgcctgtagtcccagctactcgggaggctgaggcaggagaatggcgtgaacccgggaggcagaggtcgcagtgagccgagatcgcgccgcttgactccagcctgggcgactgagcgagactccgtctccaaaaaaaaaaaagaaaagaaaaagaaattcaaacctatccctgtgctcacccctgtcctcagactaggctcagtaggtggtcttctggccatctctctcatattacctctcgtgcccaaaaaaatacttaaaaaaaattatggtaagaaacacatgaaatttaccatcttaatcatttttaagtgtagaatacagtagtgttaactatatgcatattgttgtacaacagatctctagaactttttcatcttgcaaaactgaaactacatctgttgtttaacaccttccatttccccctccccctagtccctgacaatcactattcttctttatgttcctgagtttgattactttagatacctcatataagtggaatcatgcagtattt

SEQ ID NO: 1242778 - DNA, 4001 bp, Homo sapiens
agatttaagctctgcttttcttgagggaaggatgcttggggtgatgtgctttacattgtaagagtgacctctagtgcttttctttttggttgaactttagtggttggaagatgaattacttatgccttttctacagaacttccatttgtgtgtgggtgttgttgttattgtttgcttgtatgatgcaatgtttttctaatgctaccattataagattccaaggttttgactaggtgaaattatacattttattgacttatgagattatcacaacactcaaactaaagttgaatctgatgtgcagcacctgaagtgaggttccttctttcagagtgatggataccctgtgacattaaatgagcccattctgaactgaaacacgaaatcacgggagccaggtactgtgaggggacatttgacttgtgcccatgagtttgtcatgtttttcacatatcagaactcttaacatagtcaagtgatatgccatagcaaatgtctgattactgcctctgttccccaaatctaagcctgatgatacagcagcaacataaattcctggacaggcctcatagccagttcttggaaagcaaatgagcttttcctttaaaatccaagaaaaaataaaaagttgtatttgccaagcttgtttgtcattaatcaggaggggaaaattctcccatttagagaatttaagccaaagataacttttaaaactttttctatctctaataaagagtggatgaagggagtctgccaaattattatggatgatatctaaattataaataagatttcaatcttccctaaataggttctatttcatcagaacattcaattacaaatttatgcagttaagcattcaaccacaaaggaatcctacttttgaaagaccacctgactggttttcctttaagcgaaatgtaggaagaggctcctctttccggagagcgctaagtctcattctcttagcagcgagggcacagctcttaatactgagactcgcctcagccagtgctggtgctcctgaagcctgcagtacatttcagttattagcctgcattattttaaagatgcaggcagctactggtctgcccaattgcaaacttcagaaatctaagccaatgcagcataatgtaaagtctgccagttgttttcctcttagacataattccaataaaattcagtagttctttaaaaaagaagaaatgaagatattcacaggctattcccccgataagatgctaatttcatgttttactagaacttgggcattctcaatgaatactcaaagaccagagggtaagattctgcgagtagacaaaaagagaaatgacactttgcctattttgaccagaccaagaggagagacaagtgttaaccggtcacattggcaagatttttaagtgatgcttggtttacagcaatacgctttgcagcaatcccagctgcaaataatcatcatcaaaccaacagaatcaaagttttgcagagagccccccagcaagttttaaatcatttgctgtatacttacaggaattcccagcttcgactctgttccaattttgagtagataacagaagtagcgtcttgaggacagctcccgtgacagatcccatgttcacatttattgggctcccccaaaagatcttgagaggctctcagagcgctccagtcctcttctcagtagctctgccagctctgtctgggtcttcagcccctctaggtctctgtctctccccctcccttcctcctcacctccctccgtcttttcttcttccctcctccctctcttctctctccctctctctctccccgtctctgtctctctcttttctctctctctctcacacacacctccctgactcctcactgaaaagcactcagcatctttcctaacaagcatccacaccgccgaggccacgcccactcctcgcagcagcggtcccacaaattggcagcagcatccttccttccaaacacacaacagcgctcgagctccgctgcacccagaggcgcggcctcccgttcgtgggcctccttggggctccctcccttctcttctattttccaataatccttaacccttttctcccagctggaggtgtgagtgggggaagggacaaggcggtggagccttctgattttctggaggtcttgcatttgcaagagccagaaaacacactgagccattcctgattatccgggagtgcatccaggtaaaattgcattatgtttcaaaacaaaagcataaaataagacagaaataactaagcagcattgggaaattgtagctaaaaccgtcctcagggaaaatacttgctgttgtttttctctgtttctataaaactgtactcttcagcgagggtgccaggattttattatggaaattccccacatgggaacagacattcctgcttagcagatatttaaaatcatctggtagtagtctgcaagaaattaacatttcttattttaatgcttcaggtgtataaatccacaaatgaaatgctttggctagatttatgttgatgaatgcatcatgctgtgaatatgaagtaccattctataatcaaaatttttaataacatttccaaaaaggcccaaagtaggaaatgagggaatactgaagaaagggacctccaccaccaccacatacacacatgcatacacattcacacaaacactgaacaatgtgacgatgtaattcaggtgacttaaaggagagaggagtaaagttgaatttggaagatcaatgattaaagaaaaattactctttgaatggctggtccatggatacaactgtttcttgaatggaattttaaaatgtctaaataatggagttactatcacataacaagaagcatgtcacatggttcatagcagataaataatctatttaaaataaatgtcaagatgttttactgataatgtgctagattttatacaaatggaaatcctggagttcttaagtgcctcttggtaatcacaaattggaagaaacataagcctttaacaccactttcttatggaataatgagagtgggtttgtcaaagatcagataggtttgtcaaagagtgagaaaatgacagaaatacccgtaagaactaaacatgcttgtttagctcatgcctgcaaacaaagcagaatgcatcttttttcttttcctgttttacaagagaaaacaagaacagagaatttaaatgattcgaagaggtcatagagttagtaataaatgctgaggactggatttggcttttctgactccagttttactgctctcaccctaggacttattgcccctaaatcagagtatacctccttcctgacccttgtcagtggcagcaaaaaccttaggccctaggaaaacacagcaaacactttgggaggccaaggtgggcaaatcacttgaggtcaggagttcgagaccagcctggccaacatggtgagatcccatctctactaaaaataaaaaaaatagcagggtgtggtcgcaggcaactgtaatcccaactacttgggaggctgaggcaggaattcgcttgaacccgggaggcagaggttgcagtgaaccaagattacaccactgcactccagcctggccaatagagcgagactctgtctcaaaaaaaaaaaaaaaaaaaaaaaggataaatacaataaaataaagaaaggtcatgggttgagtgtttattctgtgttcctagacttgcattcctgattttattttttcaatcatatgctaagtaaaagcagatataaattaacagtttatgttaactaattattgaaggagattaaattttactgaacacatactatatgccatttgttatctaattgaataattatatcagtcctttgaagaaaatatcatgtctgtgggacggttgtgggctctccagaagaaaaaagttgtctcgttgttacaatattgtatttaattgttctcttaaaacaaattagagaatgcatcttaaatggataagtacacatagcaaaa

SEQ ID NO: 1242779 - DNA, 4001 bp, Homo sapiens
attcttggtaaaaaagggcacaggagaccatggacgtctgcattcactagtgaaatttagtaatcgagtaaccaaacatttcatggacgtctgtacaattaaaaatgcagctgggtatgttgagttcatcattgtttctttcaattagagaagaaatgaacatcactctcattactccatgcttatccaacattgtattacattttatttgacttttctcagtcatattagaatttccacatagaccttgatatcagttggaagtagtaaaacgatagctttagtcttttcattaaaaaatgtatatatactagttacatctacaatatgttttaatgaattctgttaaatatccacattagaaaaaaatatgctgagtcattttcatatagatacaccatatacatacaaatctatggctttccgttcaatatctcagaaaagtcaccatttactctttacatgacagaaaaacttaccattgtcattaaaaagtaaatggtaaattagatctctggcagattgtatatacaaaaaaactcaatagcctccttcactatagcttgcatcttaattgatgcaaggtatactgaaaatattttaatatagctcaattaatgaaaattttattttacaaatggctttaatgcataattctcataagcaaataaaagctgttcagtttttaataaaagtaattcaattttcttaatctgtgtgtaatattacctgtactaagataataggtatatattattaggtgctacgttctcagtgctttacatgcattaactcaactgatcctgataaacacccaatatatttgatattattaactctagggacacttgaggaaaaaagagcacaagaattaaataattaaattaggaaaattaaacaatttacctaaggacccatgactaataggtggtagaaagtgtatttaaattcaggcaatctggtgccagatcttctattctgaaccagtactttgttgaaacaagcactggtgacctaaaatatacttttcaaaaaaaaaaaatagggctgattttcagcagtattcagcttagttgccactgagtagtcatcttctcagttatttggaagacatgccaaaattagttgcatgcctgctaatgaatcgtatgtcccataaaaatatccattacagaacagactagaataaatagaataggtagcaaacatagtttaaatcatcaaaaatcctcatacaccagaggcagggtgagacctttgacaggaagctttggaaagattggagtctcgttcccatcagaaaatagtttatttagacctattccaaatagtccattgacagatacaggattaaggaatggccttcccttcaagacatctattttcctgaacaaaacattttattccaatctatattacaatttccatccagttaaaattagaaatcatcaacatatttaagaaagtatggaattatgtttgcatatatcaaaaaatattacttgttagtcaagatttcattcagaaattttgacaatgacattgtactgtaaccataaacccagtctgggctactgctacaaatttcaggttcatttcaggatcccaggtggcgtcttgtctcctcgccctaccatgacacacaacccagtacctgatgtacctctgtttcctgcccaacgagagactgaatacacaaatggcaaatggccagtctgcatgcaaaaaacagaacctgtagcaactagcccaggaagccaaactactatctacaggagccagtccaggaagccagacttctgtctgaagcaaccagtgcaagaagccaaataataactcctgtagcaactggcccctgttttagtccgtttccatgctgctgataaagacatacccgagacggggaagaaaaagagacttaaccggactcacagttccacatagctgggaaggcctcagaatcatggcggctgcaagagaaaatgaggaagcagcaaaagcggaaacccctgagcaacccatcagatctcatgacacttactcactatcacgagaatagcacgggaaagcccggaccaccccctccgcccaaaccccaattcaattacctccacctgggtccctgtcacaacacgtgggaattctgggagatacaattcaagttgagatttgaatggggacacagccaaatcctatcagccccaaatagccaggacttaataacttacagcttccctcatttttgcccatgtttccaatttagaaccagctgaatatgtttaggaaatatttagaaattttactaagtatagagaaagccaaatgtatacctctaactaatcccataggatgccccacttctggtcagcctgcctacagcctcccctagccaaggcctccaaccagggcatacctgagcctgcccctttactccagtgtaaagtttcctctcctctgcctgcctttgagtctctgccaaactcaaatggtggtggccaaccaccttgctgcagcaaactctaaataaacagcctctgcttgatttcctttgggtgggcatcatttatctccataccctggagctttcccccagctctgccatctcatcctcacagctgcagctgtacagtctacactcaacaccaaaaaagagccaccaaagtccattttaagcacccagaagacacaagtatgtttaaaaagcagcatcagccacctggtaaaaagtattataggccaggtgtgctcgctcatgcttgtaatcccagcactttcaaggccaaggtgggaagatctcttgaggccaggagttcaagatcagcctaagcaagatgtcaagccccatctctttaaaaaaaaaaaaaaattagcctggaatcctagctactcagacggctgaggcaggagggtctcttgagcccaggagttcgaggctgccctgagctatgatcgcaccactgcacaccagcctggacaacagagcaagaccccatctctaaaataaaattaaaaataaaaataaaattctatggcttagctccaggttgcagggttgtcgcatctctgtagtgtgcatcttcagtgattcatcctaactgcctggtagcatcacctcggggagatgtcaaatttcccatgattgtgtcccacagccagaaccatgctagtctggaaaccactaaaatagagctgcaaattaatttctgtccagtgatgagcattgttcctttcataatgtccttatgctttccatactgtttcacgggactgtgaaggaacacagcccgaaggactgaaggaacttttgtggtgtgacaccccacccctctctccctatgtagtagccatggtgcctgacggtgtgtggaggaagctgctgcactgtcacattctgatgagaaagagaataagtttagggaaaactgacaatacacctaggattgaataaaatataatttttctaagcataggtgatgaaatatgagccaatcctggcatcgtctctcatcctctcatcattacctaaaatgatatttcaactcgattaaatgccacgagtgtagactactatgcagttctttagcttctttaagtattaatttgacattgacatgaaaattaacatttacttgagaatcctggttttagatatttgaaataacacaaacatgagcttctaattctgtcagtcattggcttaaatctaaaaaaaaaatgttcctgcaatttaaaacaagtaactatcagtatgttttcctagagctaaactactaagacagggataattttctaattgtcaagtaattcatttagacagcagcctataaatttctatgcattttctcttataggagacatgagtagaatttatatataactgttaattctctgtgatgttattgacctaagctttcatttggaggcaaacactggcttacatgctccaagttatagcctgagtttgaatagcttttccaattaatcttcacaattaatggatt

SEQ ID NO: 1242780 - DNA, 4001 bp, Homo sapiens
ccagaggaaaacgtcctcttgacagtcatggaatacaaatacagtacttatatcattttgtctgtaagatttccataattttccacccaacatattaaatgactgaatgaatgcgagcttaggaatgttaagtcaagatactaaattttttttttttttttttttgagacagagtctcactctgtcgccgaggctggagtgcagtggtgcgatctcggctcactgcaagctccttctccctggttcacgccattctcctgcctcagcctcccgagtagctgggactacaggcgcccgccaccacgcccggctaattttttgtatttttagtagagacggggtttcactgtgttagccaggatggtctcgatttcctgacctcgtgatccatctgcctcagcctcccaaagtgctggggttacaggagtgagccaccgcgccaggctttttttttttttaagagacacaattttgctcttgttgcccaggctagagtgtaatggcgctatcttggttcactgcaacctccgcctcccaggttcaagcaattctcctgcctcagcctcccgagtagctgggattacaggcatgcgtcaccacacccggctagttttgtatttttagtagtgatggttttcaccattttggtcatgctggtctcgaactcctgactcaggtgatcctcccgtcttggcctcccaaagtgctgggatggcaggcgtgagccaccgcgccccgcaagatactaaattttaaaacacatcttgctgaggccagacaaaaaaagccccacacactaaactagccaggcacggtggtgtgcgcctctggtttcatccattctgattgcagcacaacagcactccagcctgcgcaacagagagcggccctgtttctaaaaataacaaaacaaaacaaaaaacaccacacacatcttgctgaaaaacgtatcagaaactgctagagttagtgcaagtttatacttgaaaatactcaaagatatcaacgatcacctctccctcaggctgaaactgccttttgtgctcaactttgctagaagtttggtctgggaaacagctgacaagcttagagcttagatctcttttgactagcaaggaacccaactgacattcgaaagtgaattgacagcatcgagttgccactgaaaattaaaggaggcaggaaatagaacgttatgaactgaaaggaattggagaatagtccacacccctcatttgataaaatatcaagggtaccagagatgaagtgacttgtccaagattagagaattgtgtctgagtcttaaaagctaaacctctacaaagatgtgcatttgaccaaaacgctaaaatcacacccccaaatcactccccacaagaggaagtcttaaaacgcttcaagaagttaatctgcaaaggcttccctcttaaataacaggatgagagcgtttcataatttgtaaattaagccaatgcaaaagggcgcttattattttgagaaccaagcaatttggcaaatactctcagactaactttactcccgtggagaaactggtgatcatggatcagggaaatcaacgggggtctagggaggagaggctgcagatcgcccaggtatcagggaagacaagctcggcgcgtccgacagcgtgaaaagagttgacaggactactcatatacccgactagcttccgcttctttgttttcccgcttttttgtatcccccagcaaggagagtttcccacagcccggatttcccgactgaaggctcccactctccctagatcctccatgaaaaagaagaggctcgaccccgcacctcctcgccgcagagccgttcgtatacagcctccagctcctgcagctctgtcagggagcgaatgagctcagcggagatttcggagcagcggccacctcccaccccctcagacggctgctgcacccctgacagcttcggaggcgaatcaaggtccgccatcttggtccccattcggcacttccggtcccgcgaggccccctcttcgttggcgcctatttggggctgcccacagaagtgcccaatgaactctaatggttttttttttttaaagtctacttctaaaaacgtattaattttctattctcctggaaaaagcaaagcaataaagcatgtttaaataatttgtaatgccgtgtggaagcaagacggaagcattttttaaaaattatatatattcttcaggcgcggattgggtgcctttttccgccgcgcgccaccagaatgtccctgtcttgaggtctaatggcggacgccagtatgttggagttggtggtggcttaagttttgaagggaggtagcatccgttggatatccacaccatccttctcgctgcagggtaaaaaaacagcctggagacttccccgggcccggggaggcggagaccggccatatggaagggggacccgagactttggcgggggtcacgggcagtctaggcccgagaggctggggaccaggaggaggtaccgagggatggttgaggcgccaaaacggcttcctgcagttatctctcgcttccatccacagtgtgggaacatattctatctcaaaatagggctcgtggagattgcttttaacttctggggactctgagacgggggaggtgtgacaagcagcgggaggcatggatgtctccctctgggtagagtaaatggtacaccgaggggaagatagaaagatggagcgtgttaaaagcgtaaataacggaaacagtctttagagccaagactccggtttgaatttgtattttggtagttgggcaacttgtctcctcctctgaacctctattttctcgtttgcgtaatggaggacagagtttaaatgcgatgatgtttccttggaggatggagaagatgcagtgagcaatcatacaagctttttgtaataatggtaaacagacgtgggggaagttttttttgttttgttttgttttgtttttgtgacggagtcacagtctgtcgcccagactggagagcagtggcgcgatctcggctcactgccatctctgcctcccgggttccagcgattctcttacctcagcctcccgagtagactagctgggattacgggcgcgtgccaccacgcccggctaatttttctttttttgagacggtgtctcgctttgtcgcccaggctggagtgcagtggcgcgatctctgctcactgcaagctccgctttccgggttcacgccattctcctgcctcagcctcacgagtagctggaactacaggcgcccgccaccgcgcccagctaattttttgtatttttagtagagacggggtttcactgtgttagccaggatggtctcgatctcctgaccttgatccacccgccttggcctcccaaagtgttgggattacaggtgtgagacaccgcgcccggcccagacgtgggggaagttttaaagcttaccaaatttatctggtatgtattttttgtttgtttgttttgtttttgagacgaagtctcgctgtcgcccaggctggagcgcagcggcttgatctcggcttactgcagcctcctcctccttggttctagctattctcacgcctcagcttcccgagtagctgagattaaaggcgtgtgccaccgcgcccggctagtttttgcatttttagtagaggggttttcactgtgttggccaggctggtctcaattcctgacctcaagtgacccatttgcctcggcctcccaaagtgctgggattacaggcgtgagccaccactgcgcctggcctcgtatatagtttttctagtactggactgatcctccgaaatgcaccttcctccacgatccaaagttaaggtgtcgctggagaacctgaatccaactagatttgggaaaaaatgaattccaaaggtttgtaatggattgtatcagttataaggaaaggggaaagtagactgttttgatcagctacaaaatatgaaaagtaacttgcggggagctgttcagggattca

SEQ ID NO: 1242781 - DNA, 4001 bp, Homo sapiens
caaaaaaaacaaaaaaacaaacaaaaatgggaacatctcttggactatccactcccagtggaagcagtctgtttggtctttccatctgagcctaggagagagacttgtgtgcagtacgtactgaatcaacacacagtgaatcaacacacggtgaataaaagtcaagttgaggagttacatgaaatggttgccagtgcatgttattttttataatttaacttatcctcaacaaatggtttaggccaggcgtggtggctcacaccagtaatcctagggctttgggaagccaagatgggaggatcacttgaggtcagaaatttgagatcaacctgggcaacatagtgcgaccttgtctctaaaaaaaaatttttttttttaattagccaggcatggtggcacatgcctatagttccagttacttgggaggctgaggcgagcggactgcttgaacccagagtttgaggctgcagtgaactatgatggtatcactgcattccagcttgggcagcagaatgaggaatgagaccctgtctcaaaaaaaaaaaaaaaaaaaaggtttaagtctccactgagaccagcctatcttcctcagctgaaataaaatccactaaaacaatgttttctagatctgtgtcattctcttatacctatactataatacgttttttccagatatatggatctgttggctattctttcatactctcaaaattcactttttttttctttttacagtttattgtttggtacaaaacaggctctttaactctttgaataaacacctcacagactcgtgctcctagattacaaaaagtcaaagccaattttctttgacactgggctcttgactctgagattcaagtcactataacagaaactggagttgttttatcttatattctggaaggtgcctcaacaaagacatgttaagaactggttaaaacttctagcatttaaaaagatccatcttgtcttccagtgcctatggataataataaaaagggaatcccagagatctgctattgaattatttagagaagagctactgcaataagatccactcttttaagttccaaaaggaaacttcaggccagatgtggtggctcacaggtataatcacagtactttgggaggccaagactggaaaacccattatgcccaggaatttgaatttgagaccagcctggcaacacagtgagatcccatctctacaattttttttttaaacagaatttgtggggcgcggtggctcgcgcctgtagtcctagcgactcgagaggcgagaggatcgcttgagtgcaggagttcgaggctgcagtgagctatgatcgagccactgtagagagaccctgtttcaaaagaaaaaacaaagagaaagaaagaaaagaaaaaggaaacttatagcccagccagaggaggaaaaacaacacccaaaattagcaagtgttcaagacagcccggcacccagctgagactcccgctgacgtgatcaggagttcggggcttgctcttttgccgagggtatttgctgtccatgcgtgccccgcccacctgagtgcctcacgcaagttcggtgacctctgcccagccgagagcaggggagggtcccgcggccagggccccgagcggctcaccctccacggcgtggttcacctcttggatgaacagctgcagcttcatcaccagggtggctgcgtggccatccgccttcccggacgccgcctccttggagccggccctgaaggccgcattgatccactccttcacgtcgaagtcgtctgccaggaacttggagaagtccatggcggaactgcctcaggcctggcgtccagaacttaagagttggctccgggcggcaacggggatgcagaagcgagcgagcctgcgagagcaccgaggctagcctccgaggcgaaccccagaaacgccaggacgggtaacttgcccctttgcgcttccccgctcagcgcactcagtttgcggctgggaatgaccctcgccgcccgccgttcttcttccggaagtcgttggccgttaccatagtgactgcaggcgtccggagcgctgagcagaggtgggtgtgggaaaacgccccggactgagagctcccggcaccgacaaatatcccatgtctgctaacatttgccgaggactaaactatatgcttactataaagccctgacatacattagcgcatttacgcggtggctcgcgcctgtaatcccagctctttaggaagctgacgcgggagaatcgcttgaggccaggagttctaggacagcctgggcaacagtggagcgcagtgggcagcaatggagtgcaattgaacgatctctgctcactacagcctcaaattcctgggcaattgaacgatctcagctcactgcagcctcaaatttctgggctccagcgatcctcccacctcagcctccagagtagctgggactacaggcgcgcgacaacacgcccggctatttctttctttttctttctttctttatttttttctgagacggagtcttgctctgtcgcccaggttggagcgaagtgacgcgatctcggctcactgcaacctccgcctcccaggttcaagcgagtgtcttgcctcagcctcccgagtagctgggattacaggcgcgtgccaccacgcccggctactttttgtattattagtagagatggggtttcaccacgctggccaggctggcctcaaactcccaacctcaggtgatccgcctgcctcggcctcccaaagtgttgggatcacaggcgtgagtcaccgcgcctggcctaactaattattttcttaatgatgtgttttgaggtgcagaccttttaaagtttgttaagttccttatcacctttttttatggatcatgcttttggtgttgcggctgagaaatctgtgcataacccataatcacaaacaatttctcagcctgggcaacataggaagaccccgtctctgcaaaaaaattaaaaattagctgagtgtggtggcgcacacctgtagtctcagctactcgagaggctggggtgagaggattgcctgagcccaggaggtcgaggctgcagtgagctgtgatcacgccactgcactccagcctgggtgacagagcgagaccctgtctcgaaaagaaaagaagaaaaggtaggggaaggtatgagggtattctttaggttctaagtttttatgttgtttcaagagtgggaccaacccaagggggaggacaagatgtcatccttggaaaccctacaggggacagttttccaggttggcctgccattggggtatgagtggctggctgccatctccaggcctgatagtcactcgtttttcattggcatctcccttggtttgtctcattcttctgggttgagtaggttttaactggggtaacccttctgctaggagtcccagttatttggggggaggggagaggagggaaggagagaggaggggagcaatgcagggaggggagacgaggggagcaatctgatagtgtaagtcctcttactttgctcttgttaaaaatttaggcaggacacagtggctcacgcctgtaatcccagcactttgggaggccgaggcaggcagatgatgaggtcaggagtttgagaccagcctgaccaacatggtcaaaccccatctctactaataataaaaaaattagctgggcatggtggcacgcgcctgtaatcccagccactcaggaggcagaggcaggagaatcgcttgaacctaggaggcagaggttgcagtgaaccgagatccgccactgcactccagcctgggcaacagaccgagactccatcccccccaaaaaaaaaaaaaatcctgctgggattttgacagggattatgttgaactgttgaattgttggattaattttaggagaattgccatcatgacaatattgactgttccaatccatagcatgaaacgcctcttcatttatttagatgggaatttttcagccttggcactactgagcccagat

SEQ ID NO: 1242782 - DNA, 4001 bp, Homo sapiens
aaaagctgctgtcaaatatccaaaggctcaaaagaaaaattaaactttaatcatgaaaggctggaaggcagaactagggataatggagacagaatatgactcacaaaggacttttttttttttttttgagacggagtcttgctctgtcaccaggctggagtgcagtggcacgcatcatcttggctcactgcaacctccgcttctcaggttcaagtaattctcctgcctcagcctcccgagtagctgggactacaagcgcgtgccaccacgcccagctaattgtatttttagtagacatgggggtttcagcatgttagccaggatggcctcgatctcttgacctcgtgatccgcctgccttggcctctcaaagtgctgggattacaggtgtgagccaccgcacccagcctttttttctttttttaagagagtttcactttgtcacccagtctggaatgcagtggcacaatcacagcccaccgcagcctcgacctcccaaactggagtgcggtggcacaatcatggctcactgcagcctcaatctcccgggcccaactgacccccccacctcaacctcctgtgtacctgggactacaggcgcacgccaccacgaccagctaattttttattttatagagacagggttttgccatgttggccaggctgctctcgaactcctgggttcaagcctcaggctcccaaagtgctgggattacaggctgagccaccacatccagccatccaaatggagagactttttgatatctgatgccctcaaatgcgaggatttccttgtcaccttcccgtcaatggaagttttgaagcagatgacctccggtccacgctttcgtataaaataagtatataaatgtgcacatatattcagctcacacctataatgttaactgtgtcagacccgataataagagctttgcatgaatcctttttctttgtgcccacaactgcccttcgagggagggacgtgcttctgggtaaccagttctgaattcgaaacctcctagctgtgtccttggacgtcactaatctctgtcttgacttgctcatatgtaaaatggaaataacagggctgggcgcagtggattatgcctgtaatcccagcgctttgggaggccgaggcggacagatcacgacatcaaaagatcgagaccatcccagccaacatgctgaaaccccgtctctactaaaaatccaaaaaaattagctgggcgtggtggcgcgcgcctatggtccctgctactcaggaggctgaggcaggagaatcgcttgaacccaggaggcagaggtaggttgcagcgagccgagatctcgccactgcactccagcctggcgacagggcgagactccgtctcaaaaaagataaaaaaggaataacagtacctatctcgaaggctgttgtgaggtttaaatggattaataaagcgctcagcagagaacctggaacgtggtaaacgctttatgtgttagttatttctaccatcgtaaatgtcagcttttacagttataaaacccctttagcgccaggcgcgtcgcacctgcagctctgctggaagctgggcaaacggtcgagcaggcggccgagcgacgcctccacgtcgccaaacaggcggtggatgcgctcggtgcactcggcgccgcggatgaaggtcttgtagttagcgaaggccaagtcgcgcgtctgctgcagcagctgcgcccgctcctccgccaggcgctcgggctcgcgccgcagccgctccagccccgagccgctcaactcccggaggtagcggcccacatcgggccgctcgcgccactgggcctcggggaagcggtcccggaacagcgacgccaggagcccttcatcctccacctcgccgagagccgctgctgtggccgtggctaccgatgggatagtcgccgcggtcgccatcttcccagcaacaacgtcacttcccttccggaccacaaggggcgctgactccgaacttaggacaggaagaaacaggcacatttccggtctctatgctttctcatccggccggcttgctttcccctgcggtcgtccagactattgggcgctagcgagacgaactattggtacggggctagagaggaaggctttgggattgccggggagcagcgagcgaccgacttccgtttccagttaccaaggcacgaggatccggtgttccaacccagggggaaaaatgcggcctttgactgaagaggagacccgtgtcatgtttgagaagatagcgaaatagtaggagcgcgcggggcggacgcgggagtgtgtgggtgtggtggccaagggtggagtgggggcgcggtgccggagaccggttcgttcgggcgcggtctccagtcctctttttgccctcagcattggggagaatcttcaactgctggtggaccggcccgatggcacctactgtttccgtctgcacaacgaccgggtgtactatgtgaggtgaggcggggccgggcaggcagcatggacccaggggagaggggtcctgggtcccacgagcctccttcatccgcaaccttgctccccctttacccttttagtgagaagattatgaagctggccgccaatatttccggggacaagctggtgtcgctggggacctgctttggaaaattcactaaaacccacaagtttcggttgcacgtcacagctctggattaccttgcaccttatgccaaggtttgtggggcggtttccaattctgccacgggcgatgaagtcaaggattaggcagattgtccggcagcttctctcccacagagtccctgacagtgtgcttggaggagtttcagcacatggagatgtgtagaggtcttgcagcttgagcatggtcagggctatgggataggaatgctatgtggctgcgtagggttagttttctccagcgaagtagaagagcctagggagacccagctagagatcagaaagcaaataagtggcagcaatgaagacaccggggtccagaaaaagagctgttaacctggccatggaggatgatccttgtagagttgagaaaataactttttctatttttttctttttctttcttgctctgttttttcttttcatttctctttctctttcttcctgacacagtttcactctgtcgcccaggctagagtgcagtggtgcgatctcactgcagcctccactttccagtttccagtgattcttgtgcctcagtagctgggattacaggcatgtgccaccacacctggctgatttttttgtgtgtttttagtagagacagtgtttcactgtgttggccaggctggtctcgaactcctggcctcaagtgatccacctgccttggcctcccaaagtgctgggattacaagcgtgagccactgcaccgggcaacttcctgcatttctgttcaggagatagacagtttgaggaaaacatgagtctctctgtttcccttaaaattatttcagaaaattattcacagatccagcagctagcttgtctgcatggatagaaatagtaacgtttttatgtctcttggattttaattctcttatagtataaagtttggataaagcctggtgcagagcagtccttcctgtatgggaaccatgtgttgaaatctggtctgggtcgaatcactgaaaatacttctcagtaccagggcgtggtggtgtactccatggcagacatccctttggtgagtagagatggtagctgttacagaactcaagtactcttattcaagaagggtatgtcttcaatctgagtgcttgagagaataaattctcagcacgttttgaatcccagaaagaccagaactgtattttttccgtctttgttatttccagccctcaatatgggcatattgaatgacttcagtgagttagtgtctcttcttttgaatcccagggttttggggtggcagccaaatctacacaagactgcagaaaagtagaccccatggcgattgtggtatttcatcaagcagacattggggaata

SEQ ID NO: 1242783 - DNA, 4001 bp, Homo sapiens
cagctactcaggaggctgaggcagaacaatcacttgaacccagtaggcaaaggctgcagtgagctaagatcataccattacactccagcctcggtgacagagtgagactctgtctcaaaaaaagaaaaaaagaagcataaaacatgtgtcccatctctaacactagccttgggaaaatcaggatcgacatttcttacatataaaattggctgggtgcggcgactcacgcctgtaatcccagcactttgggaagccaaggagggagaatcacttgaggtcaggagttcgagaccagcctggtcatcatggcgaaaccccgtctctaccaaaaattcaaaaattagccaggcgtggtggtgcatgcatgcagcctcagctactcgggagtctgaggcaggagaatcacttgaacccaggaggcggaggttgcagtgagctgagatcgcgccactgcactccagcctgggcgacaaagcaagactctgcctcaaaaaaaaaaaaaaaaaaaggcaataatcaggctctttcctttttaagggaaaacatacaataataaacttttcttactgagttatgaggataaaataagatataagaagcaaagtaactttataaacagaaatgagtcttattctgttatgctcactggctgaacagagcagcattaaaattcacattcaacaaccctcggagttttgcctgcattaccatatactttaaagtaaaattgaggctcggtgctagctctcaaatgcatcactttatgtccatattttcccaaagtgtgaaacatgccagtgtggtacctacaaaatattaagtggcttatggatatgcagcaaataaccccatgtagtaaggggtactctttcaaaatctcttgcaatctctttcattaaggaagataactccatttacagctggtatagccttaacactttcccaacacttgctaatttcccctttgtaacagaaagacagtatttaatacaatttcataactttttaatttgtttgtttttttttaatgattactcacccatttgtggcaagtggcactggcttcccattcaccataaggattttgtttcaaggaaattaatttaatttttaaatgggacatagctatacaaaaaaacacatctagtaatcaaaagttcaagcagtactgccattaggcaaaaatcccgaaagtggtacacggtaatttaacgttgagaaaacgacttcatgaaatttcttttttttttttttttttgcgcgggggagacaaagtctcgctctgacgcccaggttgcagtgcagtggtgcaatctcgcctcaaagcaatctctgcctcccgggttcaagcgattctcctgtctcagcctcctgagtagctgggattacaggcacctgccatcacgcctggcaaatttttgtatttttagtagaggcggggtttcaccatgttggccaggctggtctcaaactcctgacctcaggggatcctccagcctcggcctcccaaagtgctgagattataggccggagccaccgcgcccgggctcatgacaattttctaaggcagcacagatgaaacaaggaaagcaggaaccagggtccaaaaccatgtctctctactctaaattcgatgctccttccactacactgatggctttcacagtttacagtgcatgcaaatcacctaaaggtcctgttcacagatcacagataccgaccaagtaggtcggggtggggcccgagaatctgtatttctagcgagcgcccagaagtagcggaggctgctggtcgtcgggctaccctttgcctggcaaggccctgggcaaagactacaaagagagagactcccggagacgctgaattttcagtgtcgccaactgtcctcgactcggaacgctggccgcacctgccgtgacatcactgcacaggggtgcaattgcgtcactccccaggcgtcactgccgaaacaacccctgtcctcctgtcactctcgccgctaactacagaccccgccccgcccgccagcgccccggaggccgaagtcacgcagtcgcgctccgtcgcaggcctgtgacgttacgaacctctcccccgtgacctcttcgacccaaacctcaagcgaaaattccctagctcgctagaccggcgcaggactgtgactgcgcgcctccttttacctgagagggaccgccgggcccccgggcgcagccgccaaaggcggggagccgccgccgccccggcgcaactcattgccggaactaaaaaaagcaaccacttcgttgaacggaactggccaatagtgcccttggctcggactgatgacgcacagcagacgtaaggaaggctcagctcgcccgcgcaccggtgggaacgccccctagctctgcgctaggggttagattggttagatacgacaaataaaaagattttattgggtggggtcactgtcaatcactcggaagaccaaggccaaggcgccttgggttgccagggagatgaaaatgctaaattgctgtttagaaagatcaggacaaggttatgatttctcacccaagttcctggggaaaaggatcatgagggaattacttattaacaaggcacggtatttcctgctttacctacgtggaaggagatttttttttttatttgtatcctacatctactttaaaatagtaagcctgggcaacatagcgagaccccgcctctacaaataattttaaaaattagccgggtctggtggagcacacctgtagtcccagctactcgggaggctgaggtggggggatagcttgagcccggtagctcgaggctgcagtcagccgtgattctgccactgcactctagcctgggccctgtctgaaaaataaataaataaataaaattatatgtatatctaaattacatgcaccacatggttaatggtgttatatagtgttatctctattggtgggctgaaagccaactttaaacttcttcccggtcttttctctattttcagaaacagagaacatgttttatccttggtatccaccttaatgtactgtgtgcatgtatgcatgtatatttgtgcaaattggaattttttgagaagggaggggaaatttagcaacatactttaaaaagatcatataatacagcagtcttacttttaggaatctactcaacgaaataatttttaaatgagtaatgtacatgagggcaaaaatcaaagatgcgtgtctgcaaggatatacaacgtttaatattggcaacatcagggggctggaactgggagaagggagctttcactttctactttacacccttggattatttatatactttatccaagtttaccataaaatattttaagatggaatacaattgtaaaattattgaattcaagtttttagtttttatatcactctagtgttcaaattgacacaccaaaataatttaaaattatgatgaacccaaatactacttagtgaggatgttgtagcactctcatgtaaaactactgagtgtctgaatctggcgctcaaaagccttaaaatgttcaaaacctttgctgtaataccacttctaggtctctgtttcctttttgttttgttttttgtttttgttctttttaaatggagtttcactctgtcgcacaggctggattgcagtggggagaccttggctcactggaacctctgcctcccgggttcaagcgattctcctgcctcagcctcccaagtagatgggattacaggtacacacaccaccacgcccagctgagactgggtttcgctgtgttggccaggctggtctcaaattcctgacctcaagtgatcctcccaccttgtcctcccaaagtgctgggattataggcgtgagccgccacgcctggcctaggtctctgtttctaaggagaaaaaatgttgacaaagatttatagatgtgcccattatttattactgggaaaatttggaaacaaaatgttaagcaacaattgaatatcaaaacatcatgtc

SEQ ID NO: 1242784 - DNA, 4001 bp, Homo sapiens
ctaccaaaaattcaaaaattagccaggcgtggtggtgcatgcatgcagcctcagctactcgggagtctgaggcaggagaatcacttgaacccaggaggcggaggttgcagtgagctgagatcgcgccactgcactccagcctgggcgacaaagcaagactctgcctcaaaaaaaaaaaaaaaaaaaggcaataatcaggctctttcctttttaagggaaaacatacaataataaacttttcttactgagttatgaggataaaataagatataagaagcaaagtaactttataaacagaaatgagtcttattctgttatgctcactggctgaacagagcagcattaaaattcacattcaacaaccctcggagttttgcctgcattaccatatactttaaagtaaaattgaggctcggtgctagctctcaaatgcatcactttatgtccatattttcccaaagtgtgaaacatgccagtgtggtacctacaaaatattaagtggcttatggatatgcagcaaataaccccatgtagtaaggggtactctttcaaaatctcttgcaatctctttcattaaggaagataactccatttacagctggtatagccttaacactttcccaacacttgctaatttcccctttgtaacagaaagacagtatttaatacaatttcataactttttaatttgtttgtttttttttaatgattactcacccatttgtggcaagtggcactggcttcccattcaccataaggattttgtttcaaggaaattaatttaatttttaaatgggacatagctatacaaaaaaacacatctagtaatcaaaagttcaagcagtactgccattaggcaaaaatcccgaaagtggtacacggtaatttaacgttgagaaaacgacttcatgaaatttcttttttttttttttttttgcgcgggggagacaaagtctcgctctgacgcccaggttgcagtgcagtggtgcaatctcgcctcaaagcaatctctgcctcccgggttcaagcgattctcctgtctcagcctcctgagtagctgggattacaggcacctgccatcacgcctggcaaatttttgtatttttagtagaggcggggtttcaccatgttggccaggctggtctcaaactcctgacctcaggggatcctccagcctcggcctcccaaagtgctgagattataggccggagccaccgcgcccgggctcatgacaattttctaaggcagcacagatgaaacaaggaaagcaggaaccagggtccaaaaccatgtctctctactctaaattcgatgctccttccactacactgatggctttcacagtttacagtgcatgcaaatcacctaaaggtcctgttcacagatcacagataccgaccaagtaggtcggggtggggcccgagaatctgtatttctagcgagcgcccagaagtagcggaggctgctggtcgtcgggctaccctttgcctggcaaggccctgggcaaagactacaaagagagagactcccggagacgctgaattttcagtgtcgccaactgtcctcgactcggaacgctggccgcacctgccgtgacatcactgcacaggggtgcaattgcgtcactccccaggcgtcactgccgaaacaacccctgtcctcctgtcactctcgccgctaactacagaccccgccccgcccgccagcgccccggaggccgaagtcacgcagtcgcgctccgtcgcaggcctgtgacgttacgaacctctcccccgtgacctcttcgacccaaacctcaagcgaaaattccctagctcgctagaccggcgcaggactgtgactgcgcgcctccttttacctgagagggaccgccgggcccccgggcgcagccgccaaaggcggggagccgccgccgccccggcgcaactcattgccggaactaaaaaaagcaaccacttcgttgaacggaactggccaatagtgcccttggctcggactgatgacgcacagcagacgtaaggaaggctcagctcgcccgcgcaccggtgggaacgccccctagctctgcgctaggggttagattggttagatacgacaaataaaaagattttattgggtggggtcactgtcaatcactcggaagaccaaggccaaggcgccttgggttgccagggagatgaaaatgctaaattgctgtttagaaagatcaggacaaggttatgatttctcacccaagttcctggggaaaaggatcatgagggaattacttattaacaaggcacggtatttcctgctttacctacgtggaaggagatttttttttttatttgtatcctacatctactttaaaatagtaagcctgggcaacatagcgagaccccgcctctacaaataattttaaaaattagccgggtctggtggagcacacctgtagtcccagctactcgggaggctgaggtggggggatagcttgagcccggtagctcgaggctgcagtcagccgtgattctgccactgcactctagcctgggccctgtctgaaaaataaataaataaataaaattatatgtatatctaaattacatgcaccacatggttaatggtgttatatagtgttatctctattggtgggctgaaagccaactttaaacttcttcccggtcttttctctattttcagaaacagagaacatgttttatccttggtatccaccttaatgtactgtgtgcatgtatgcatgtatatttgtgcaaattggaattttttgagaagggaggggaaatttagcaacatactttaaaaagatcatataatacagcagtcttacttttaggaatctactcaacgaaataatttttaaatgagtaatgtacatgagggcaaaaatcaaagatgcgtgtctgcaaggatatacaacgtttaatattggcaacatcagggggctggaactgggagaagggagctttcactttctactttacacccttggattatttatatactttatccaagtttaccataaaatattttaagatggaatacaattgtaaaattattgaattcaagtttttagtttttatatcactctagtgttcaaattgacacaccaaaataatttaaaattatgatgaacccaaatactacttagtgaggatgttgtagcactctcatgtaaaactactgagtgtctgaatctggcgctcaaaagccttaaaatgttcaaaacctttgctgtaataccacttctaggtctctgtttcctttttgttttgttttttgtttttgttctttttaaatggagtttcactctgtcgcacaggctggattgcagtggggagaccttggctcactggaacctctgcctcccgggttcaagcgattctcctgcctcagcctcccaagtagatgggattacaggtacacacaccaccacgcccagctgagactgggtttcgctgtgttggccaggctggtctcaaattcctgacctcaagtgatcctcccaccttgtcctcccaaagtgctgggattataggcgtgagccgccacgcctggcctaggtctctgtttctaaggagaaaaaatgttgacaaagatttatagatgtgcccattatttattactgggaaaatttggaaacaaaatgttaagcaacaattgaatatcaaaacatcatgtccgagtgcagtggctcacgcctgtaatcccaacactttgggagactgaggcgagaggatcacttgagcccaggagttcaagaccagcctgggcaacacagtgagattccatctctacaaaaaattttaaaaattagtcaggcatggtggtgtgtgcctctgatcccacctacttgtgaggctaaaaggatcacttgagcccaggaggttgaggctgcactgagccatgatcacaccactgcactccagagtgggtgatagacctagactctggctcaaaaaaaaaaaaaaaaatccaactgtatgatgttatgtagcccattg

SEQ ID NO: 1242785 - DNA, 4001 bp, Homo sapiens
aggctctaaccaggctcctctgagccctcttcttatctaggcctcaaccttggcctataaagacttgaacacacactaacataagcatcactcagggccacatcccttaagataaccctacccccctttaaagtgcctgcctgagaaaactcaaggctgtcaaaaaaaattttactgtttgttcaggctaacacttaagaaggatagggcttgtctccctgtgggaaaacagaatcctaactttgttaactgccagctagcagaccaatcttatttataattattcactatcctgactctactgagtccccacctgccttcctccctcctccctcattttttctttgaaacacccagtgacttctgcatgctctaaactcaaggttgggctccgttcatgctagactcttttccctattgcaatagttattactgattaaaaatggtccttatcactttagtgtccagctttctctttgactgatttttagtttttattgcagaatagtattccataaaaaaaatactattctgttgctagacaactggactgtttctgtgtttggctactatgaataaaattgctatgaatatacttgtactaacttttttgtagacacataccttcatttctcttggtggatttgcggggtcatagacattacttttactacacatctttagtttggaattttgtataaatacaacaaaagggggctaggcggtggctcatacctgtaatcccaacactttgggaggctgaggcaggcagataacttgaggtcaggagttttggactagcctggccaacatggtgaaaccccgtctactaaaaataaaaaattagctgggcatggtggcacaaccccagctactaggaaggctgaggcaggagaatcacttgaacccaggaggtagaggctgcagtgagccgagattgtaccactgcactccagcctgggtgacagagtgagactctgtctcaacaacaaaattaagccaagtagggtggcacgcacttgtagtcccagctccttgggaggctgaggagccagaccctgtctcagaaaaaaaaaaaaaagaaaaaaaagaaacagaatagtatgtgccaaaatatcaatattttaatacatgtactgaaagatacggcacaaatatccgcaaaactttgaaaaggaaggagcagatgcaaagtatgactgtagtaccactgagggtcatgagaagattttaggtgaaatacaggtgaacgtttcatcagttatgtatgtatgctaaagtgttaatgcatacgttctaattaaggaaggcgatattagttttccatttatgacaatgatataaagtttcctctttaagaactcctatttaaaaataaaaatactgagtacatagtggcaaaggtggtaagagagtatcacagaattcgtgaagtggtgaggaaacggctggctttcgggaaacaatggactaggctctctgtggccgtgtccacctgtccttccagtggacttggcaatggacttgagaatgggtctgcgactgccagttctgtaaccaacaggctcaggctgcgtgactttcgtaccccgagccctctctgaggctctgccaactccatgaaatgggggtgacaggccctgccccgctgcatctgcccctcacagacagcggagcagggccgaagctagccaggcggctcgcccgagcccgcgccgatgcccttcacctcaccttgctcgtgggccgccccaacggcctcttccccccaccgtcgaacccagctgaagccggcctcgcgccccctccgcgctccccgcctctccccggcttggcagccccctcaccgggcaggcatcgcagctgcaggagcctccagcccgcccggccaagcgcaccagataccgccgccgccgccattttggaagcgggcacgtcgcccacggcgacgcgaccggtagctacgggaccacggccctaaggagggcggaagtcgtcgctccgtggagcctcctcctctcgcgagaggcgcaaggcgtggagtcgacggctggagagaagccgggagcgagcccaggcggcaggtgagagtggtgggggccagctgagcgccagagctccctcaactgtcccctcccggcccaccctcgttcccacatcctctcattttctcttcccaccccgttcctcgatgggaacgcagccacggccgccccgctgaaagccccggctggtttattcctgagaagtcggtgtgaggggccagggccggccctaacctccctggggtcctgactgggaatttctgccgttccccggctgcctcgtcccttgcgcagccggccctactctgaggccccggggacaccacgctgaggagaaacggctccgagcttgggatcggggagacctggttctgagacccggtcctaccagtagccaatcgttgtgaccttgggcctcagtccccgtgacgttttggtccctgggggttcctggcagcaaagcacgaaagccttggagtcggggggtacctgagctcacgattgtaatttcgaacctgcaacttgtccgaacccccagcgtgttgagttgatataattaagtatccagatcggaaggatgcttgttactagaacagacagctaggcctttgtccagaaggattgattgagtgggtctgggtgtggtccaggaatctcattttaaccactccctcgggtgatttgtaggatctgcaagttcgggaaaggctggtgcccttcattctgacattactgagtgccaagctctggatggctcaaggaggtcacggtctagccactaacagagcacttcacgggggtgtcatcagagaaggcttagtaggaagaagtaaacggtttttgggctaagagtaactgacgacaagagcatgtgattctgtcgattttgtgtttgcagtcagaccccatcattgtgtctgttaaagttgtgctttgcacaccccttgtcaaatctagtcttttcagaatatccggctcccccctgcacgggtgcggggaagacctcctaagccaaaacttaccccaaaggttaaaattttagatccatatttctggttttaggtaaaacactcctctccataaggatttgtttctgagttctatccatccatctttgaatgagcctttcctgtggaaactaacatttgggtatcctttctgaaaccctaattcctgacacacgccaaatgcctggagacgttcctgtttcattgttgattctcactttttaaaaaaaattctgggccaggctcatgcctgtaatcccagcactttgggaggctgcggcgtgtggatcacttgagctcaggagttcgagaccagcctgggcaacatggcgaaaccgcatctctacaaagaatacaaaaattagctgggtgtggtggtgggtgcctgtaatcccagctatttgggaggctgaggcgggagaatcgcttgaaccccggagtcggaggttgcagtgagccaagattgtgccattgcactccagcctgggcaacagagcaagactctgccaaaaaaaaaaaaaaaaaaaaaaaaaaaaaaacctctaaggtcttagtctaagtgtctagacagagcgttctcttgagggcagggaacaagtgtcttcttgtctgtctcccgtgtagggacaggcacatagtaggtttcttaggtctcatttgcaggttgtaattgtgccttcctaccattctgctaaagctggcagggaaactgaggcccagagaggggcaatggctgacttggattgcacagcaggctggttaggcccacttggtactggtcacccagaggccaggcagtgacatgtatgtgcacaagagcttcagttagttaattttatgtttttaatttaatttttttttattttgagatggagtctcactctgtctccctggctggagtgcagtggcaagatcttggtccactacaacgtccgcctcctgagttcaa

SEQ ID NO: 1242786 - DNA, 4001 bp, Homo sapiens
caccttgcccaggggcagcaccaggaaggcccctcccccgctggcctcacagatcagggccacaaacttagggttgacagcacagaagccactgtcccaggtggtctgtgagacgcgcacatcttcatagcactggtcggccttggccggctgtccaaacacgtggcggaacttgctggagcggaccacctgccggctcattctgggggcacacagcataagagcatttctcccttcaggtcaactctgatcttccagtggtccccacctcccccaggacacccctcagtctggcttttaaggtcccagcatcatctccaggggctccctattcttccctctgtggctgatgcctgcttgccttccccagcctctccttccctctaacctgcaagcccccttctccctggccccaggccactctgagccaccctctcaatctgtaccctcagcctctgcaacagagcctggcgtggtgttgccccactgcatgtttgttgactgactggctgatggatgcagagcccgtccttcctaatggttcagactcaggcgtcatcagcccagatggctccgagggtgggttctctcttagttaccgtgtccagagcccacctccctcacacccacacagcgcttcctaaaggcagggacaggagctggcctccctcgcctgctggcatggggctggacacaggaggaagtggcgtgggggctgcctgaggggagtgaggcggcaggatagcttccccagcaggtctctggctcaggtccaggtatctcctcctccccatacctctgcctctcgcctccgctcagaaaagcaggtgcccttaagagccatctccacccccatgtaaactgcacacaggaagggagaggccactccgactgctctgaggtccaggtaggatggtttcccccagtgtctgggtggggagcaaggaactccaggggcgaccttgtgccaccgcatcaccttcctgctcagggaaggggcctgtgctgccgcttggagggtgccatgcccagagcctctgcccctagcctcagcctcgcctactcactgggggctccagcacccccggccaccccaggactcccgaagaggctgctaggtcggcctgcccaaagagcggtgaggagcgtatgtgaagagccccagtcttgaggagcagcctgtatctggagagaggggagccccggaccagaggtgggggacaggaagccatcgccccaccctgcctcctcccccaccacaggtaccaggcccggaaaccacggaaaggggaacttggtcttttcttgttttgctctcaaccccttcctgtctccaagcccagggcagctgccccgctcaccccaccctgccctcgtccccaccctccccgagactcaattccgtggggagtcgggccctcgacactgtgctgacccccggccacccacctccatcttggccgcggtggtccctagccctcgcctccgcagagcgctctggggccccggcggcccccactccaagcagcgtccccccacgggctgctgcgcccgctacctggccccggcgctggctgggtcgcggtgacagccgcgcgcccccgcagcccgcggctcccacgcgcgcgccgccccacaggtggccctcgccccggcccacccgcgcctcccaggcccagcctcacctgctgccgagagaggacagtgatcccccaaaagccggaggtggaggaggaggaggaagaggaggaaggagctggaggagccggggactcgcccgctgaagatgctcttgtcaagacaatgaatgagaagcagccgtgcgcccgcctccggggtggccgcgccccttggggcggagctcttccaggcccgccctgcgctcccgggctcccgctgcggccgcctctctccccggcccctgcccgtgcaccacgttggtccccaaccatagcgcaggctgccatcccggctccgggaagcgaatctaaacttctttttaaaatgtcaaaacgcaagagcaccccattgcttctttcctccctgcgtccgcccccagcctcctcgccagcctttccctggcaggcacgaaagcgccccaggcccgcccgccaggcctcggtgcccgccccggcccggctgcgccgccccttcctcccggccccgcagacgcgagcgcagggggcgcggggggcgcggggggcgcgaggggcgcggggggcgcgggcgaggaggagccccgagcgcgctcctggacccccgggacctggctcttgcctggctctgagatctaagcatgggtggccccgggagtcgcttctcctccctggatctcctggcttcatcgggaacacccctgccctcctgctgaaataatccggcatcacgggcacctacttcgtgccaggggctacagggtcgagcaaggcaggcaagccaggcaggtttccgcccctgaagagcccagcctgggggaaggaggaggagcccacggccgctccaagccctggctttggcgaaggctcgagggcaaggaggaatagttcccacccttggattcagagaggcttctggaggcagcaacagcgggcaggaaaggcctgctctagagtcagactatgtcatgagtgcgaccgcagcctgtcacctgctgagtgaggtgtggccgctacttagcctttctcagcctcggtttctccctctgtaacagtcatacctgccacgtaagaggtatggggatgattacctaaaataacccaaggaagtcagtaaggacctcatctagaaagtggcgggtgcttaataaacgttagctctcagccatgcgtagtgactcacgcctgtaatcccagcactttgggaggccaaggctggcggatcacctgaggtcaggagttcgagaccagcctggccaacatggtaaaaccgcatctctactaaaaatacaaaaattagcgtggtgtagtgatgcacccctgtaatcccagctactgaggaggctaaggcatgagaatagcttgaaccctggaggcagaggctgcagtgagccaagattgagccactgttatcacccagtcttctctgggtgaaagagcaagaccgtctcattttaaaaaaagttagctctcatcattcttgtttaaaaagtatctgggctgggcctgaaaggattaggaagagccaacaggcaaggctagaggggtgacctgtaggctgagggacagccctgtcgtgtggagaagttcaaggaacagcaagggacgggttcaagtcccacctctgccactgactggctgtgcgatcttggccaagagggctaatctctctgaacctcattttgtcattggtaaatggggaattaataagatttgaactgcccacctcacaaagttatgaggctctggccgggcgcagtgcctcacgcctgtaatcccagcactttgggaggccaaggcgggcagatcacgaggtcaggagatggagaccatcctggctaacatggtgaaaccccctctctactaaaaatacaaaaaattagccaggcatggtggcaggcgcctgtagtcccagctacttgggaggctgaggcaggagaatggtgtgaacccaggaggcggaggttgcagtgagccgagatcgtggcactacactccagcctgggtgacagagcgagactccatctcaaaaaaaaaaaaaaaaaaaaattacccgggcatggtggtgcatgcttgtaatcccaactactctggaggctgaggcaggagaattgcttgaacctgggaggcggaggttgcagtgagctgagatggcactattgcactccagcctgggcaacaagagtgaaactccgtctcaaaaaaaaaaaaattagctgggcatggtggtgtgcgcctgtagtcccagctactcgggaggctgaggcagaagaatcgcctgaacccaggaggcagaggttgcagtgagccaagactgtgccattgcactccagcctgggcaacaga

SEQ ID NO: 1242787 - DNA, 4001 bp, Homo sapiens
agagatcctccaacctcagcctcccaagtagctgggaccacgggagtgagtcaccacacctggctaatttttttttctttaacttgttgttcagaggggtttcgcaatgttgcccaggctggtctcgaactcctgagctcaaagcagtccacccaaagtactgggattaccgtgagtcatggtatccagcccctccccctaacttttcaatggctctgcactgcaatcagaataaaacccaacttcttccggtggcccttgggttctgcaggaccactctggactcatctgtcaccatactgctccggccatcccctccatccactcatgctcactttccatttctccaccaggctctttctcaattctcacccttctggcctcagctaaaatgccatctactccaggcagcctttcctgaccacgctactgagactggccccctccattctccatcccagtccctcatgtgtgttcttcaatgtcgttatgaaaacctccaatgctcttgtttgtctgcttgctgtctccctcatgaggctacaagtgccacaggggaaggaaaatgccgttgtgttcaccgggatgtctccagcagcttagcacagcataaagtggaagcagaggaaatatagtccacactacaaaaacggaacctctacccagactgccctgacttgctctgggaccctgatggggtcacttgaggtcaactcctaggcccagttatcggaggacactcccaggccttacaaataacacggaaagcggaagagcagagctgacatcgtttccaaggcgcacccctcatcagtcctcctgccgtttcgggggtccgaagggtctcccggcacctggctcagcaattctttggggctccacctgctcaggcttccccaggccccacccagccgtggcagcatcaccgagataaagaaagagcttgcgccagcggcgagaggaggaagcaccggcggaaacccgagggaggggcgcgtgcggccgaggggctccctccccaccactgacacacttgggctcgccggggccagaggagagaggggcgtctccccacagcccagccaggggcaggggcgacccggggcggcagggaggaggagccaggcgccggcagcgccccgagccccggctcccggcgaggccgaccggaagctgggaaggcaggcggcctcgcaggcctgggccccggctaggagggctgcgccgcctcgggggtcccggggcgaggtgggcgaggcgggcagaccgccagggtcaccgagcgccagagcgagtcacgggagtgccggactctgccctccggcggcgacgaaacggcccggacgccggggccctggcctgaaggggggttccccggggatggaggtctcggggttccagacggccctggagggcacccctgtggggtccgggcagggggaggggcagccggacggggcccgaggcgacagcgcccggtcctcgggccggactcacctcgcggcggggcggccgagcctcggtgtgccggaacttggacaccctgaagcggttcatggcgacgggcacggcggcggacgcgtcttcgaggaccccgggcgtcgggtctcaggtgcacgctgagcaaccgcgactcccgctgcctcggccccacccgggacccaatgccgcggtcacgcccccggcgcgccccactgccaatcgcagccgtctccggccccctgggccacgcccccaagcccctctcctttcgcgcgcgcaccaccggtcccgcctcccggccaatccaggtacggccgccccgcgaggccacgccctgataccgaggggacggactggcgcgggtgggaggtcacgtggggcgcagctgtcagcccacgtctcctgcggtgcttgcttgcgtggggtctcggctgcagcattcgcgattttgtgtgcaggatttgctgtggagtctttgcggtgtacctagcacgccttccagcactatctacctcttcctgtagagaggggagaaattagctccatttcagagacaggaaacccccggctaaaggagagtgtaaactgtcggtccccaggtcacaccagtggtaagaggcagagggggaacaggggcccaggtctaaagcaaatccctgtccaccgggcctactcaaaagcctctgcatccggccaggcgctctgcatccggccaggcgcggtggctcaggtctgtaatcccgaactttgggagactgaggcaggagtatcccttgagcccaagaggtcgaggctgcagttatctgtgaccgtgccactgcactccagcctgggagacagaaagagaccctgcctctaaaaataataataataatagcttttaatttttctttagtatttattcatttatttgacacggagtccctgtcacccaggctggagtgcagtggcgcgatctcagctcactgcaccctctgcctcgcgggttcaagcaattctcttgcctcagcctcccgaatagctgggattacaggcgcctgccaccgcgcccaactaattttttatttttagtaagagacggggtttcaccatgatggtcaggctggtctcgaacgagactcaagcagtcctcccaacttggcctgccaaagtgtggggattataggaatgagccaacgcacccagctgattcttgcatttctaaggtttgaaaagcaatgcttacattttatcttagttcgggcagaagtgtatttactgtgaaccaaagtcacttgtggtttattgaaaaggctttttgtttgtttgttttgagacagagtctcactctgttgcccaggctggagtgcagtggtgtcatctcagctcactgcaacctccacctcctgagttcaagcgattctcctgcttcagcctcccaagcagctgggattacaggtgtgcgccactactcctaatttttgtatttttagtagagatgggattttgccatgttggccaggctggtctcaaactcctgacctcaagtgatccacctgcctcagcctcccaaagtgctgggattagaggcataagccactgcgcccagtccaaaaaggtttttagaaaatcatcaggttggccgggcgcggtagctcacgcctgtaatcccagcactttgggaggccaaggtgggtggatcaccaggtcaggagttcaagaccagcctggccaagatggtgaaaccctgtctgtcctaaaaatataaaaattagctgggcgtggtggtgggtgcttgtaatcccagctacttgggaggctgaggcagagaactgcttgaacccgggaggcggaggttgcagtgagtcgagatcgtgccattgaactccagcttgggtgacagggcgagactctgtctcaaaaaaaaaaaaaaaaagaaaaaaaaagaaaatcatcaagtggctgggcatggtggctcacgcctataatcccagcactttgggaggccgaggtgggtggatcacctgaggtcaggagttcaagaccagcctggccaccatggtgaaaccccgtctctactaaaaatacaaggcgtggtggcaggtgcctgtaatcccagctactcgggaggctgtggcaggagaatcacttgaacccgggaggtggaggttgcaatgagccgagatcatgccattgcactccagtatgggagacaaaagcgagattttgtctcaaaaaaaaaaagaaagaaagaaaatcatcaggacagtggtcccactggatcctaggcgaccgaggcacagctcatcatcccctttcatagggaactgcacctgctacagacatcacagaccagaacatctggaccacacattcctcacccacttggaattgtcctatactctgtgtgaagtaaagaaaatgctatacttaagacaaatcatgcccctgaagagctgggctcaggctcttctgccctctgtaaaagatctctgagctcacatgggagagttgcagccattggcagccatgaacttggc

SEQ ID NO: 1242788 - DNA, 4001 bp, Homo sapiens; identical to SEQ ID NO: 1242787

SEQ ID NO: 1242789 - DNA, 4001 bp, Homo sapiens
ttatcctcgcaacagcactgtgagagtgcaggtgaggaaaccaagacccccagagattaaggaactcgttccaaaccacacagccaggaagcagccgttcagggattcgaacccacaccgtcggccgggcgcagtggctcacgcctgtaatcccagcactttgagaggccaaggtgggcagatcacctaaggtcagaagttagagaccagcctggccaaaatggtgaaaaccccatctctactaaaattacaaaaaattagccaggcgtggtcgtgggcgcctgtaatcccagctactcaggaggctgaggcaggagaatctcttgaacccgggagacggaggttgcagttagctgagattgtaccactgcactccagcctgggcaaaagaggaagattctgtctcaaaaataaataaataaataaataaataaataagtaacccacaccgtctggctcagggtccacgccgtaacctccgggctgtgctgccgttgtccgaaagcttgcttccaactaaagaccagagatgggagggagtcgcattctccaatctctttaaaaggtcccattaccaacatcacagagcctctgccactaccgaagggtttatggcgatgcctgccacgtggtctttcttttcatggttcacaagccacagggaagtgcctaaggcacacaaatcttaagtatacagtctgatgatttttcacgcgggtacacacctgcataaccccctcccagatcaacaaatgtctacagagacattttcagctcccagcagtccgggtggtgtgcccctccccatcagtggctatctagccccaaaagctaatctcgattctgacattcacaccatagattagtttcgccttgtctaggatttctaaatggaatcatatggtgtgtactcttttgcatctgattctactcgtcaaattaaaaatcacataaaatcagcacacgggcagacaatgatagcgggagaaaggagggcgcggctgagtttctttcccttccaagcagccccctagcctgttcgtatttgggctcagtgactgatcaaaggggacagtgggaagagctggatggacactggagtttggaaacacaggagttgaccttagaaaaccagtggaccgcagggggcaaaagagctgccccgcctggagaaggcattgtaggatggcggaggcaggtgggtcacttctgttgcttcggatgtccagaggggagaaggttttatgaggccttaaaacgctcacaccgggttcctcccacgccatgcgccaggggcaccccatgtggccaccggttcctcccgggttcgctctggccggggctccccgggtgcagacaacctcccaacgaccgcgcatccgcccggcaggcgcgcctccctacctgtgcactgctggatgaagtgctggtactccgctccctgctcgccggggacgatggtggagccgtcatatttaaaagtcaccctttgggttgggagaagaaaaaaacacacacacacatcagcgctggtggccgcgcgacgcggcgcttgcagaggacaatctaacagacgcgctggccacggagaagcccgcgggggcctggcacgccgtcccggaataaggcgaggaagacagcgcgggaggcccgaatccgtcccgcctggaggccggctcggtgcacgaggccccgcgcgagcccggggagcggggcgtggagacgaatgaaaagttcctaccagatgacggccgagccgtcgtcgcgcaccaggttgtacgccgcccggcaagcctctttgtcgatcttggtggccatcgccgcggagccgcagcgggacactgtccggggcggccgagcgcgcccctggccggcggcggggatgggagcgcggcgggtacgcgccgagggcgcacgggctggcggcggtggcgacggctacgcggcgcctgcaagctgcgagcgcggcggcggcttccactgcggacggagagcgcgcggggaccccaggccgtggcccgccccgcccccccgcgcccattggccgcccaggcggcggcccgcctcttcattggccgtcgggctgcgggggcggagcgtcttgattctctggcggccaatcccagaccggaaggcttgcgcaactccgcggtgggggctggagtaggggctttgcctcctccctctcactctccctcctccctcccgctctcttctcccccaacatccctcttctctctccttctccttctcacttcccctcctcccctcccgacccctccctggaaactcccactaccccaaccccctttcccaccccgccttcctcctctccctcctccttcctcttcttcccccactgcttgcttcccccacttccctgacctcttccccctcccttccctccccctctttctcccttccccctttattcttcttcctctctcctcctccctcttcttgcctatcccagcccaaaacttctccatcctccctatttccttctccccaagctctcctctttcctcctccttgaccccctcccctgctgcccccggcttcgcctccctcttctccacttaccctcctggcatctcctccctccctgtcccctactccctcctcctattccccctctcccccttcctcattctccccacccccctgcccctgaggctgcagggctgcagagctccacaggggacctccacgtggatgatgtaatgcgtcaaacccaaggagacaggctggccactgtccctaccccagcgtttggttccatggattctaggtggggaggaactggaaagaatgaagcattttaaataggagggggtagaaagtggactgcttccaaaacgctggtgggctcgcgtttactctggattctggtcatttgcattcctatcttaacctctccctttgggctcctctgaaagcacgagctgactcattctgtcttcctcattccttcactgactcattcattcattccctcatccagccattccacagagaccagttacagcgtccaggtaggtaaaaaggcaggatcctgaagactgggctcttgaattgcatccagtactgccactttccaactgggggccattggaaagcctcaaaacctcttttaaatgactcctcaaatgggaaaaatagtataactgacatcactgctttgttttaagtgtaattgaaatgatacttggaacaaatatactagacattcgataaaatgtcatcattgttggttattaagtgataaaaacaaatcctaaatagaaacccaaaaggtcagggacaatgtccaattaatgttagaattctcaacaagcaaaaaaacaaaaacgagaaattgaatgaatcaatcaatcagtcaatcaatgggtagttgaatgggtgggtggacaggaacacagtttcagaagagtagaggcagatgctgttataaataagacaaaaagaaattcacatttcataccccacaaagccattcctaccttactccttgacaagggtaatgggacaattggccattagaaagaagaacaaaggtggatcctttgatcagggaaaattccaaaaggatcaaaaatttaaacacaaataaaggaaatcagaccagtcgcagtggatcactcctgtaatcccagcattttgggaggctgaagtgggaggatctcataagctcaggagttcgagaccagcctggataacagggggaaagcccatctctactaaaaatacaaaaattagccaggcgtggtggcagacgactgtaatcccagctacttgggaggctgaggcaggagaatcgcttgaacccggggcggggggcagaggttgcagtgagctgagatcgcaccattgcactcgagcttgagcgataaagcgagactctgtctcaaaaaaaggaaatcacaaaagtgccagaagaaaatatggggagcttccttctaaccataaaccatgttacccaaatccaaatccaaaagcca

SEQ ID NO: 1242790 - DNA, 4001 bp, Homo sapiens
ggtgcagaagatcttttgaaaggggtagatctcgaagcttaaaaaagtggaacggaagggaagggtaagtggggaagtatcagtataaccaaagatccagaagagattcaatttgacttataaacacttcttaatctagaaccaagccctgtgagaacatttatatctcccctaaagaccctcaagagccgaattaaggtctttaaaactccagcacagggctttatacacagcaggagcaaaatgaaattagttcagcctatttaaaagtaagaaaagtcacacttaccatgagctcgtacacacacagaggtggaaattgctcgcttgccaactaggctaaataccctggtagccaacattctgaaagataaaaatgtacaccttctctatgaataaggacaaacagcaaggaattagtcttctttttgccccagagcattttggaatttttttgtttgcttctccccaacgcaaatgatccattctttatcactgtctctgaattcacaaaatgacctaggatgaggtttttcttagtaattggcatgcttttaaggagcttcattataaatcaactgccataatatatacgcgcttcaggtaattaacagaacattggtctttttaaaaaaacaaggagaggccgggcgcggtggctcacgccggtaattccagcactttgggaggccgaggcggacagatcacctgaggtcaggggttcaagaccagcctggccaacatggtgaaatcccgtctctactaacaatacaaaaattagccgggcatggtagtgggcgcccgtaatccccgctacttgggaggctgaggtagaagaatcgcttgaacccgggaggtagagactgcagtgagccgagaccgcaccactgcaccccagcctgggcaaccagagcaagagtccgtctcaaacaaaaaaaggcaagaagaaaaaatgctaacaaggtgactctgaaaaagctagagatcattaaagcactgtgctgccgtgacagactccattcttcagggagcggtggggggaggtgacagctcacagggaccgtggcacgcatcacattcaactgagtgtttaaaacctaataccgcctgtacatagactagaaggggaaattggagaaggctgccaacacagccccgatcaatttccaatccctgaggagagcggaaaacctatgagaccccccctcacccgggccctcctctattcaggcccatcaaccttacacggccccctttaaatcgacccttcggaggactggtgagagtgatgtggggaaataccctccttggggcagaataaacaagcatgacgtcagggctgaacgcccgcgtctagcttctctccttgggcctagcccttgcgtgagcaaacaataggcgccttccaggctggaaagccgagcgccgcccgggagccccgcaaaacccgggaggggttgcacagggaccttttgaaggagcaagggcggaggctgcaggcacagagcgcgggcccgcctccccgcagcctgagccctcggccagcgggcgctccaaggtcagtgcccgaggccggtccgcagccgctgcgagaccgggtaagatggaccgggcacttcggggcggccccccgagcctggagccaccgagcccggagtccccacgggccggcctcaatgtcacctggctccgaggcccattcggtgcttcctgctgaagccgagcggccaggctgcggacgtgcagacttgatggctcccggccccccgacccggcccggcctggcggcgccgcaccggccacctcctgtctcacctgccgccactgcccgccgcgaccgccctctacacccggtgtcccgcgaccggaagagagcaaggccgcgccgcggagcaccacgggatcgaggaagactccgcccgcacccggccgcacggaggtcaccgtggagcggaaaagggtagcgctgcgaacgtcgtaaaatgccgggccgggctgctttccggcaggcgttggagaggctgctttccggcggcgccgggcgagaagcgcgactggagtctggggctgcggcttcccagaggcgcgagtcgcttttccaggagccgaggcccaaacggggccgggcctgaagggtcccccgccagcccgcggccgcgccatcaatcgccgccgcctcgtcccgcttctcggctgaggcgccgcgcggccaggcagcgggtccaggcctcagccgcgcgcccaggggcctccggggccctcccgggtcagcatgcccggggtgaaactgaccacccaggcctactgcaagatggtgctgcacggcgccaagtacccgcactgcgccgtcaacgggctcctggtggccgagaagcagaagccgcgtaaggagcacctccccctgggcggccccggcgcccaccacaccctcttcgtggactgcatccccctcttccacggcaccctggccctcgcccccatgctggaggtggctctcaccctggtaagcgcggaaagggccccttccccttgcaggcagcctggcctcccctcagtcagcagagaggaagctggcccagcggtcgccctccagcaggctcctaggacccgctccctagggttgccgtggccaggaatggggtgatccacgatggcgcttgggtcttggcgctgaataaatagcgtcccgtagtagcagcgactttaaccgtcgtggatgcttttagaggcactttaaggcgacgagttatacgttagtttcctgaaatcagtagcctttgtagaaacaagtcatcgttcacttggtggggattcgacagagtttcccttgaggatttcgagttgcaggaagtgttcacgttgttgggacattaatcgctaggatttggttcttcgcaccttcgcagagccgattccttatctggcaaagtgtaaatgcttctttggctgtcggtactcgggcaccccggagctcagacacttgtagaaaggtagttgcatggtcagatctgtgtgatgcatcttaggcctggctccccttgattgaatgtgcctgagctttgtgtaaagagaatttgttcccgttaatggttaacaacttatctagaatgtttccatggcttttaaaagctaaagaatttctgtggggccgggcgcggtggctgacccctgtaatcctagcactttgggaggccgaggcaggcggatcacctgaggtcagaagtttgagaccagcctgaccaacatggtgaaaccccttctctactaaaaatacaaaacttagccgggcgtggtggcgggcgcctgtcatcccagccactcgggaggctgaggcaagagaatcgcttgaacccaggaggcagaggttgcagtgagccgagatcacgccactgcactccagcctgggtgacagagcaagactccgtctcaaaaaaaaaaaaaaaaaaaaaaaaacgaatttctgtgacattaaacagcaggagcagacgatctgtccaacacgcttttatgtttttgtttgcaatgacagctttattgaagtacagtgggaaaaaagatgtagcatgcaggtagactagttggtaagtgaattttaggcagtagcttttcagttccggtgatcaatgaagggaaaaagaccatctataaattccatcgagttgttaaaacctgaaggaaaagtaaactgtagcttcagacctgcatacctgagctgaggtgctgtttgtttttcatttaagaataaactgtgatgctaaaaaatagtagctaattgatgtaagaagtagctaagcttgagaaggtgtaagtagaatttctttatctgtgtccctcctccaccaagtaaaacgaagccatttcataatctaccatttataacttaactaattatgacacccaagtcagttctgggcaagcaagaagtatctctgggcaaagagtcctggcgtaaggttcctgggcacatctttgagtgcctgttaaagttaaacttcatatca

SEQ ID NO: 1242791 - DNA, 4001 bp, Homo sapiens
acccagggacctgagtgcctctctgggaatagtcgggggaacctatttgtgggcattgaaaaagttttttcactttctatggtgatgggagcctgaggtcatcttttcttgatggggctgagaggtgtgtatcaggggagagggtcaaagagtgtgtgtgtgtgtgtgtgtgtgtgtgtgtgtgcatgtgcatgcacgtgcacgcaggcatgcattggtcatgggtttcttcacacacttcaggttcctctgtaatggtaagtgggcaggctgtcctaggaggtgaagaaatgtccagagctcatttgaactcctgtcccccttgaatgaggtactcagaagccaggagagccaggctaggagcatgtgatttcccatatagaagactcattaagaaagattataggccgggcgcggtggctcacgcctgtaatcccagcactttgggaggccgaggcgggtggatcatgaggtcaggagatcgagaccatcctggctaacaaggtgaaaccccgtctctactaaaaatacaaaaaattagccgggcgcggtggcgggcgcctgtagtcccagctactcaggaggctgaggcaggagaatggcgtgaacccgggaagcggagcttgcagtgagccgagattgcaccactgcagtccgcagtccggcctgggcgacagagcgagactccgtctcaaaaaaaaaaaaaaaaaaagaaagaaagattatagagaattatcaaaagattccaaatccagcattaggtcccaaggcctcacacacaggactgtggagcctccgtctgaaatccagagagctgggattcacagacaccagcagctcaggtgtcaggcaagaagtgggacttcaggatctgcagccctgggctcccatgggggctctgccgagctgccggaacttggacaagtcatttaattcccaagaatctcaggtcttcctcgggagaaggtgaactaaatttataccctgctcccagcgttactgtgaggattcggtgtacgcggaagcccattacagcctagagccctaattattaataggtgtgtgtgagagggaggcctcattattaccaggtgagagacagggagctgggatcgcctacctgtgagtggaggaggctccctcgagcacctccgtatcagcggcgtgggaaaagcacgtggagcgcccaccgcgctaggcgcatgcgcggagcaggagcgcttaccaagctgggcgcatgcgcggagcgggcgcctctgggcgcgctccccgtggccccgccctccccacagagccgcagactcgaagcttcacacctttattgtgtccgggggcgtccggggcctcaggggtgttcgtagcccgtgggcagagggttcacgtggctattgtggaacagagtgtggttgccgtccccccaggggtagggctgtggagagagcgggggagggagcgcgcgtgagcgccgtgagtccggagtccgcgccccgcgcgaccccccccccgcagcacccccccccgcccccgcagcacccccccccgcccccgcagcacccccgtgccgcccgcgcgcccgtcccgcgtaccttggtgcggatgcggaggtgttggtagggacggaactcggggcgcgggcggtggcccgagtggagataggagttgaaggtgcagagggccacgctgggcagcgccagcacgaaggtcagcagacgccaggtacgagctgcggacggagcggggtgagcgcggcggtcctggggcggcgggcctgtgaacaggtgggcagggtaggggagcccccggatccgcccgttccccactcacctcctgctcctccgtggcctcctttggcagcgctggccaagccccgggtcaggggcctcagaggcaaagccatgatggtgcggggagccgggaaccagcgctgtcctcgctccctttcctggggcctggggtcacctcccctctctgggccaatcacctgttgagtctggagcactggcggctattcttaggggtttctatatttaaaatggggcctgactggcttgaggtcatctccagacagctgttgtcctgtgcctcttattttggcaaggaggcatttaagtacaatatgccattctttttatatagttgcagggaaactattttgttccctattctatgcctggtggctggcacacagttgggctttaataaatatttgtagaatgaattaagtgtctttttgagtctcagtgttttcagctgtaaaatgtataataattcgtaccttaaaagattttttaaatactggagacggggatctcactatattgtccaggctggtgtggaactcttgagctcacgtgatcctcccgcctcagcctcccacagtgctgggattacaggcatgagccactacacggcccttacatcatttttatgaagtttatgtaaggtaggaatgtgtcaacctggattttggcaggtaacagtagttcagtatatgtattagtcacagttctttgcaaagaacagaactcactcttactagttttagaagataagtaattgagaatcttaggtagcttactatgtctgatatagccagagatgcctacagtctgcacagtcataaacaagtcattccgttggccagctgcagtgacacccccacagctcacactgctggaccctggatgccaaaagcttcattaaggctgccctggaaaaccagaattttccaccctcatcccctcttgaaaacagattcttcatgaaacctgtatcctgggtcgctcttttctgaaagaattatgtgattgcaccaactggcaacccctaggtcccccagctgcaggaggggatgggaaactgagctctggattctgccttagggaggcaggaattgtagggaaaatctccaggtctaggatgagtattcaaaaggttccaggcagccacaagcctgacaggtgtctactgcaaagtgcattatttcaatctgaaaaatatgactacttggagaaagcaagcctagacagggctggtgtgaaccctctatcaaagcaggtcacaagaaagccacaagaccaggcagggatgacatctgcctgttctgtcctcagcaacgggcagggaccttggcatgaaggaggtgttctaaaaatatgtatgtaatgaatgcttgaaccttgttactttggttaaccctacaacaatgccttttcagaattacaatccaataggaagcttctagctttgatcaagggctgatgtactaatatgaacttaatatacaaaagaagaatgaattatatagacatataatctgaatttaatatataaaaaaaacgaggaagatatattttcaagaaggggctctatacctgtttctcattggtaataaactgaacagtatgttccatccaactttaagctgctgctatttttaaaaaaaataacctccttgagcagtcaaatgttatacagtgttacaaaaattattcctgagctctcactgagctataatagaattcttcctacagtttttttcccagctggactttggcattgttgcagagaagatggggccctattccagttaaagatacctggcatctccctctacacatagccccctccctacgtatataagataatggctcctggagaaaacagacatgaagacaggtatttttacttgacaaagttctagaggcctggcatagtggcccacgcttgtaatcccagcacttttgggagaatgaggagggcggatcacttgaggtcaagagtttgagtcctgcctggccaacatggtgaaaccccatctctactaaaaatgcaaaaattagctgggtgtggtggcccgtgcctgtaatcccagctactcgggaggctgaggcaggagaatcgcttgatcccaggaggtggaggttgtagtgagccaagattgtgccactgcacttcagcctgggtgacagagtaagactctctcaagaaaaaaaaaaaga

SEQ ID NO: 1242792 - DNA, 4001 bp, Homo sapiens
taaaaactgaggactgggaggaggaccagatggggtccagtacttactgttttacagacatagaaaccgaggctccattctcagccatcttcttcccttatgccccagtttttaattctcatgacattccagagggagtgtccgttggaacaccaccagagacaccacacttgccactcatgaagtgctccctacttgcagaacgtctgctccctgttccccagttccagcctcccagccgccctactgtaagctggatcatgtcacagtttgcctcattttacagacagaaaaccccccaagtccaaggggtgacaaggcacgcagacaggaagtgacggccgcaaaacgaacccaagcgtccacatccttcgtccctggttctttccatggagaaacctgcctgggtgaccccttccaatccagctggctggggcggtcctggagctcacctggacctatgccaggcggaatgccataaaaccacgccttcatgctgtgtccattctccaggaggcaggccccggaacatcagcccatttcacagatggtgacccagagggccacagggggggagggtctgggccaagttccctgttggtcataggtggggttcagacccaggtctcccaggcctccccatcagggcaggctgcagctgccagggattacaatctgcgcacaccgcctgtttcctgaaaaccatgggctccctgcagtccgtgaagctgtggatgcccaaggggcagaaaaagccccccaacctttgatgacagcacacacctctaagggagcaaaaaactaaggcagacaaaaaaaagggcgttttgtctggaagatcattcttccagaccccttgtcccttcccccagtacatatggggcaggggattcagatgcaagatgaacaccctattagctaccagagccagcagcatctgtgaccttgggcaaatcacagccccctttgaagcagccccttccccataggagagcttcttgaactcggggggacgtggagcgaggctgggggatggggtgggaagagcagggaagagggtgtaagacccctctattttcagaggagcatcgctgtgagaaacggggaataagagagggccttgttcgcccgctctctccatgcccacccccacaccccctttaaacacacaggtgccagacagctttttcgcaaaaactagtttgcaaacacactccgacttctgggaagctgcccagctccactccccctctgcgctcccagtaccggggctgggagccggccctccggcagttgcctggggcagggggtgggtgttgaggggtgggaggagggcagaggggagcggagaggagccagcgcccgccgagagccagggcgacctcacgccttcagcagctgcggcagcggcgggtctccacctcccgtacgccctccaagcccctcggggcgggtggaagggtccccaaagcagctgggctcggacccccgagggcgcccccctccccagggaccccgcccgcccttccccgcagtccgggagccggcggggcgcccccgcgtggccgggtcggagctgagtcaccgaagcgccggagtccgggttcgcgctggcggcgggggctagagcgccgcagccccccgaggcggaacccgggttccttcggacccgcagctggatcaaagagcccagccccaaggccgaagttgggcactcacgccaagctgccccgcctgcccgggccccactcaccgcaggtcccgcgggcgccaccgccctcaccgcacggctgccgctgcccgcgctccgagccgcccgggcatccccgggagctgctcctgctcggccgggcccgcgggcgcgggacaggctcagggcgctgcccgcgcggccacggcccgctcgcgtgcgctcccagccgctcggggtccggtcctcctcccgggccgggcgggcgggcggcggcggcggcggcggctcgggctcctccctccggccgaggaggggagtggggagggaagtgggaggcgaggcgggagcttcctggaggggcgcgcgctctcccacgggaggagcgggggcgctgtcccgcccgcagtccgccgctcccagcccgcgcccggcgcgccgcggcactcggggcgcctggcaccgagggggcccgaacgttcgggccgaacgcgagggtccgaaggttccaggctgggactcaggtggctgaggatcggaacaacgcggcttcgcgccctccccaggcctgctttgcccgagcctctggcacctccgagttccgagcgccgtgcgctcagggccaccgacgcgggaacagaggggtggcctcagcccgggcctgcggggccccagggccgcttggacccccagcgccgatgggagcggcgctgcgccctcggggcaacacccaaggctgggttctgggttgtattgggcaggattagggccgcagtgttttcttcccttttttttttcaatagcaaaagagctcggcattttcttgccgccagagattggaaatatgacatatttctctgacacagacgataagataaagacggatccgaactgggcctgggtctactcatccgtgcggaaaattaggcgagtctttaaggccttggagcccaggcctccttttccctagaagaggcaccaattcttaggacacttgtctgtcgctgggcgctcaagcctttggccactccgcggtatttaggtgctctctgggcaagttcaccaccgggcatcagaaggctgagcctcacgtaaccagattctggggggcggggctttcccggggatctcaaggccatgtccacagcccttggccctggggctcaaggactgggcagctgagggttaatgccgagtgcttccattgtggcttttcgattccaggcaggtgagggttaatgtgggagcctcgcgcgctgcagcctgtgagcctccctccacgtctgagtcactggcactttgcagccttacaggggccgagactaaacagcccccggggctctgagctttgttctctgcctgcctgtcacccatccatctttcctttctccaagctctcttcacctttcttccaccgaagccaatcaaagccctctgccccgctctggggcaaaccaacctatcaacccaactccagccccgcttcctccaggaagactttcctgattgctctggcctcagaatctgtctcttgtctttccagcagcaggagagccaggcactgggatggacagtggtgaaccaaagcagatagtctctctcaagttgctcacctgtgggggccaagatcaggacccaggccatcatatcaccatatgaaatgtgcaaagattggaggtagggtggcacagaagacccaactcagccatgggagtcagcgaggcttcctttaagaaacctgaaggatgagatagttgggcctgtcaaggaagatactagatccctagccaaggaggcagagtacaaaggccaggggtcacagcaattccactcctagatatctacccgggagaaatgaaaacatatggccacacaaaacatacacaaatgtacgtagcagcattattcataatagccaaaaagtggaaaccacgcaaatgttcatccactgatgaatggaaaaacaaaatgtggtatatccacacaacatagaatattatacagccatagaaaggtacgaattactggccagttgtggtggctcacacctgtaatcccagcactttgggaggccaaggcgggcgattacttgaggtcgggaattcaagaccagcttggccaacatggcaaaactctgtctctactaaaaatataacaattagccaggcgtagtggcaagaacctgtaatcccagcaattcggaaggcaggaaggagaatcacttgagcccaagaggcggaagttgcagccaagattgcgccactgtactccagcctgggtgacagagggagattccatcccccctccaaaa

SEQ ID NO: 1242793 - DNA, 4001 bp, Homo sapiens
cccccacgccaaccgtcctcctccctccgaggggacggggcacccacctgccccagggtgcactccatgccccccaggaaatcgtcctcctgacagctgaagccgctgggcccatgcgtgtcgtacacctcaaagcgcagcctctgcacctcctcgaagtagtagtccaccgtgaagaccttggagaacacgggatgcaggctgctccggaccacctcggttctgcccacctgcaagtgcacctgtgagccgaccccactccagaggcttccaccccgggctccagacctccatctcccctctgccgctcacccacgcccaggtacctcaggaggactcataccctgggaagacctcctgcctgctctctgtccatgggaccacaatcccgagggccaccctgggggtcacccctggccaccactgtctgctccaccctcagatcacagatggggaaagtgaggctcacagaggacgagaatgacacgctgagtcgggggcgagatcagattcacaccctgggctgggcagccctaaagtgcaggccgctccccagcaccagctgagtggggagggggcgtagggtacaggggggccctccctcctggctggggtaccatgggctcaccagcctctcccatcccatgcagttccctggtccaactgccccgtaaggacaagacccagctgggccagtaggctactcatttcagaatcctgaaaaatcctgcacctcaaaccaagggcaaacatgggccacccgtacagctcacgctctgagggtgcgggcacgaggcctccgtggggatggtgggctcgggatgtgaagggtgggctcaggctgtgaggggcgggcacggggcctccgggggcagccggaaccctggggacaggcggtgagggcggggcaggcccttcaccctcaaggtggatgaccggagacgccaccgggtgaccgcgtcccttccaccgcccgagcagccgcccgggcccgcgctggagcctggagagacccctgcgccggggaaaagcgctggcgccccgcgcggactggggttcgagttccggctcctccgcccgctgcggcttcgcgccatgcgtttctcgccctttcgaggtgaagccacgcgtttcacgcgagatggtgaccgaggaagcgcccgtctggcgccggccccgtgccccttcggaccccaaccgcgatcacagcgggttcgcttgagacccacgttggagcgggagccccggacgcctggaggtccgcaccccagcgcgcgctccctcgccggcctgctcccgcccagcctcccgccccccgtcggccggcgcccctcacccctcaatctccttgcgcctcttggtcgagccccctgcccgcgcctcatgcctgggcgcttcactctggcccggggccccctccccgaaccctgggccgcacccctcactgcggggcacccccctctctcctccgaaccccgctcgccgccacctcctccagcccagcctctccccacagctctggacaccccacccccagacctggtaacccccaaccctgaccccgagctgagccccagctccggggggccccgccttgcgccccactggcctcagcgcgcccgctctggtctccgcatccccagctcggcgccagccccggcccggtggcctctcggcctcccacgccccggccctacctgcacccactggccctgcgcctgctgcagcaacgccacgctggggtcggacttggtgagcgggtcgcggtccagcaggtgccggcagctgagccgcagctccaccttcgaggcgcagggcgcgggcaaacccccgggggttgccgccgccccgcgctccgagcccgcgctcatgctcccggcgttcgggggcccggctgggcgcactgaggggccgctgcccgcgagtcggcgccgccgcggcgcccgggaaatggtggccggcccaggcgtggccgcgcttccctgaacgcctgccgggcgcgggcgcacgtggctcgggcggccgccgcgcggggactgcagggggtggggcgcggccggggggcggggccggggaggggcgcggcgggaaatgagggcagggggcagaggcaggggtgcccctcggagatgcccgggaggagacagcttctaattccccggggaccccccccccaactgatagctttggggtcaggtcgggcgcgccctccccggctgtgcgcatccccggcccagggaccggctccgggctggaggctccgagctgcgcggggcctgagcccgggttcggacccaggcagacactaggggaggcaaaagggggaccccagcttggcaccagatccccgcgcccttcccggatctctaggatcccatttccaggctccgctggtttcgggtactcgccacctccatcaacaagcatttagtgggcgcctgttgtgtgcaggcgccgcgctcgtctggggctggaaggaccgtcccggggggccgagggctgaatcgcggtctgattccgaggggtccgcggggcacggtccacaccagtcccccgaggccggggcggggcggggcaggcctgggttccgtggggggtgggcccgctccgccctgaactcactcccccaccttccccatcaccggtcccgggggagggagcagcggaagaggaggcgtcggcggggacagaaaccacctcgcagtccactctttttgccgatttctgcctaaaaatagggcacggacctcgccaaaagccacgggggtggggggcgagggtgagggagacattaagactgaagaggcgggaagaccgggcgcctccgctcagcctcggcgatcaggactctagaagaagaccctgcggtcagaggggaccgccgccgacagggcgaggaggctcagggccccgccggcgggaggcagcacaggcagcctcggcctgggaggaggaacgcggccagcggcgtcccctcgcggtcggacggcgggatggcgccgggcgcggctgcagggcggggaggccccacggggctggcagggccgggagaggccatggagaccggctcctgccttcccgggaggttggctaaagaggcgaggaacaggtcagggcgcagcgaggcctgcagggccccatctgctgtctccccggcctctgcgcctcctccctgaagcccgcagtgggcagaggccagtcccgctctctagggaccagtctgggccttcccggccctgtgtcctcctcagcccagccttccaggctgccgggaggccacatcctcggtccccaaccacttccatgggaaaaggatgcgaaattcaggcaaagggtgcgggcgcccaggcagctcctgcaggccgtgcctcccgctcggttccagcagccctgggacagttttccccagaccaagctccgcttcctgccttgacctcacccgaaagctcctcaccaccgccctgaggtttgctcgtctgcagtgtggcgtgaggcctgaggtccaccaggctgtctgaggggtacccggcttaaacctggaacaccccagttcagcccttggctgtcacatagcggcaccctggcaaaataacagatggcttccaagcaaaggacgcagggagccaagaaagatcacagagtttgggaatttgagtctctgaagcccagggcgatttgggatctccagccacagccctcggccggcttgctgtctcctgactgacagccctgactgcagcctgctctaatggagagaaaccacagaaggaaaagccgattcccctgtggcactggtgtctggacgctgcctgcccctgctcagggatcagcccgcagtaggcccaggtacaatggaaggaccccgcaggccatgtggagccatctttccaaggctccccctcccagctttccctgcagggccagacacaggaaatgagatccacacacatacacgcaggaataataaccgtgttccttgttgaaatattagacaatgcaga

SEQ ID NO: 1242794 - DNA, 4001 bp, Homo sapiens
atggttactcaaatccagaactagagagaatgaggagaaaagctgtcctgagaaaaggagcgaccttgaccttcaggggtggggaggaagacagccaggcgaggcaaccccacagagtaaactgcaagaataaatacagctgccttttgcttctctccctgctctgatttcttctcagggctccccactggctgagcccaaaggaaaaccaaaaggcaaggagcccaccgatgtagctcacggagggcaaacccctggggcatggtggggaagggagaaaggtttggagaggcaaagggaagatattcagcatatacatcaacagaatgtataaggtatataatcatccaatggaatgttgcccagcaagaaaagagcaaaatcttcatgttggacaaaaaagacaaggtccattaaaatacagtcgtcccaggccgggcgcggtggctcaggtctgtaatcccagcactttaggaggctgaggacggcggatcacctgatgttgtgagttcgagaccagcctggccaacatggagaaaccccatctctactaaaaatacaaaattagccgggcgtggtggtgcgtgcctatagttccagctactccagaggctgaggcaggagaatcgcttgaacccgggaggcggaggttacagtgagccaagatcgtgccactgcactccagcctgggcaataaagcaagactccgccttaaatgaataaataaggttttaccatagaattaccggagaaacctactttagataaggtagcaggtaaagtctctgaggaagtgaatgaactttaaaatgaggtgtgacggttgagagagccaggctcaccaaccctgctaaagaagcagaaaacagcaagcgccaagaccctcagggaaagaacggccttggcccttttaaatgcagttcaaacaagggcaacaacaaaacctgttgcagaactgggcaagagagagaatgacaaccctgaaggaagtggacacaagcctgatcatatagggcatttagggtgacttccctgggggtataaagctggtgagagcctgggaggcgatctggctgcaggcagcaaaaagccacagaggggaatcaacaaaccagaaacaaacctccctctttacttagcacctagcatgcgtccaacaccgggttacaaaaatacttttgatctgtttacgcttccaacaaccctatgaggcaggtattatcaaacccatttttaaggcaaagcagataatctaaatccaaaatccaagcacttcactacgactctcgaatgccctccctctctactgctctgatggggcagtgttaccatttcggtgaatgacttaaataaacgtcattatggagtacagaatacataacggtgaacaaccttaataaaaccgacaccctctaacatgcaccgaacgcttatccagtaacacccacaagtattcccgtttcacagatgtggaagctgaggccaagatgctaatgcacagcttggaaaccaggtctcgctgcagagtccaagctgtcattaactatgctttgctaccctcctcttacttcccttctctgggggaagttaggtcaaggccaaggaggctcctagaccagatcgctctctcggcctcgcctctcaactgcgcccctggaatccctaagagcaggctttgatgcagctatggcggctcccaggccccggtgcagccccggatggtgtccgactggcggagcgcacacctgaacaaaaggttcccccggcggaaggttccgcagccccagagtcccctccccgggtgaggggcgggcagtacctgcgggaaacgcggccagggtcctgcccctggctctgtggaaaacaccccccgcctctgcagccgacatggcgagcgagtttctggccttcacttagaacactgcgtgggtggaagccgcgcgacttcacacagaacaaccgctggacctgtcccgctttgggcgacgccctttgatctcggggcgggactggggcgggacggggaggggcccggtggctcggggcgccactagtgctgcctgggcggagcggaggcgccagcggcccctctgggatcgacctgcgcgcctggcgagtggagactgtctagggcacgcgtgggcggggataaggctttggggtcagtccttccctaaaggcagagttactagatttaacaagtaaaaatgcaggactcccggttaaattggaatttcagatttttttttttaaagaatgactgacttggtataaatatgtcctatgcagtatttgggagctacttacgttaaatttttttttcattatctgaaattccaattgaactgggcgtcctaatttttttaaatttttctctttttgcaggtttgaatggaagcgtcctgatttttttttatctgacaactctatcataaagtcagaaggagccactggggtggcttacgcctgtaaccccagctctttgggaggccaaggagggaggatcgcttgagtccaggtgttggagaccagcctgggcaacacggcgagagaccttgccaatacaaaaaaaaaaaaaaaaaagatgaaaaggtggacgtcttggaagactgtctcagcctgaacttcccagtggctgccaccatctttctgttattatctttgcttgctatgcaccaggcagggcgctaagcactttgcacgctgctcacttaatccccactacagccctaggaggtggtgctgttattagctgcatccgtcatttggggaaactgacgctcagagagatgaacgaacttgcacaaggtgacacacatctagagaggtagtaaagctgcgagtaaccaaattagtgtctcttcaactcaagagccattgtagtgaactacttagccagcatttgtcaaacgtgttgaaaatacaaattccagaatggacctattgaatccaaatctctatgaaaatgatctgtgttttgttgttgttgttgttgttttgagacagggtctcactctggttgcctaggctggagtgcagtggcacaatctctgcagtctcgatctcctgggctcaggtgattctcccacctcagcctcctaagtggctggcactattggcgtgcgccaccatgcctggctaatactttgtatttttagtagagacgagtttgactatgttgcccaggctgatctggaactcctgagctcaagcaatccacccacccgggcctcctagagtgctaggattacaggcatgagccacagtgcctggcctgaaaatgatctgtttttaacaagcactgcaggggagctcttatgatcttacaaatttgggaaattcttttctaaactagctgcctacatccaaagcactgtttgagtagctaatatggccataactactgttctctaatccttgacaagagtcacccatgaatcatagtggttaagagtataaatgcctatgagtcctggagtcagtgggcttggattaatcccggttctacccacttactggttgtatgctcttgaaaattgcatagtttctctatgcctcagtttccctatctgtgaaatggaaacaatagtagcatctaggtcatagggttgcagaaaggcttaaatgagttcatgtatcaaagtgcttagaataatagttctaataacaaatggtaggtactcaatgaatattagccattgttattattaatcaatcactataaccctattccctgaacatggcctggcccagaggaggagtcccaagaaatgtgaaggaggccgggcgcaatggttcaggcctgtaatgccagcactttgggaggtggaggtggcggatcatgaggtctacagatcgggaccaccctcgccaacatggtgaaacctcatctcaactaaaaatacaaaaattagctgggtgtggtggtgcacgcctgtagtcccagctactcgggatgctaaggcaggagaatcacttgaacccgagaggcagaggttgca

SEQ ID NO: 1242795 - DNA, 4001 bp, Homo sapiens
aaaccttctgcaccttagcaagccactctcaactatacaaacaaaagcaagcctcccctcgtcccaactgccaaaaattgacctgatcactaacgtctcagcagcacttcacttatacatacaagtagccacgtacacgtctgagagtgctttcacaccaatgcactatttcattttagcagccgcacttcaacggggtgaagtagctgctctcattccttgcctcacaggtgaggacacccgacagaaaagcatctccaagagggtgaaggggcagagcaaggttggaggccagggacatgggggacgaatgccggctggattcaaggtccagggcttctgaaccatgaacaacaaacctttgaaggaaccatggagcttatatgagcttagacatacctgtaactagcaataaaaaactagtaacaagcaaagccactcatgttttccaaattgatcagcaactttcacatcaaaataaattcatatgaggcaagttttaaattctgaaacatgctaagttaccttctatttacatctttaaataagtatacttatatcagaattctttaccaatgagtaaggccatgattccggaggccagccttcttcggttgagaatgcggcaggagaagtgggcttaatggaacacatgtggcacagatctccaaagcaggttctccattagttcgtaatatatttccttgtcaaaactaccaggaccattcactaaatgtaaacgagcatttcccaaggaaggaagtgaaagatttttttttcacgtgaaactcactggaagctgatgttatatttgctatttatacaaagtgctgcgaacatggtcggaaacaaaaagaatcagagtcattcacctgcgtaaggaaaagcacaagactgaaatagaaataagagcagacaacaatgaagcactggcacatggagaacgaaactaacatgccgttttcttactatcttggtaagagaccccagctaagtagcaacattctccatcacctcagaatacaagggcgaacactacaagctgctgcttgttcatgtcaatcgttttcaccactctttcctttctttggcacagaagtaaaccccagttgcaactcaaagggccccatctctatgcccttcctactctcaacccaggagcacttgaaggagaggacaatgggtccaagtcagaccccaaggatcctttctccgcttcttacccatcttccccccaatgagtttcaaaagcctgctcccttggtgcatttccaccgcctgatgtctgggaaagagatacagcaggtatttttttctcttcccgtttccgaactattgtccgctgtttgaaacacaaaaccatagaaaaccatcagtgatcctttggaaaggaaacagctttaagggatctcttcgactcccccccaaaaaaggatactcactgcctcttcaaagagtttaaatatagaaagtcgcagcctcttcgaaggagagaggggacacatgccccataagtgccacccaaattgagagcctcagtgtaggccgcgggatgggtgagctagggtggagcccggctggggcgaggggttcctctcccccgcggcacaccccggagaggggctggggtctcccaaggggacgggccgccctaccttttccgcggggccccgagccaccggcgttgccgctccccacagcgctcggaggatccttcctgggcctcttgctctgcggccgcacgctggaccggaggaagtggtgctggtcctgggggctgccctgcggcggggacggcgcctgcggcgcgccggggggcgcgggggggccgtcggcgccggcccggggggtcttctcgtccctctttgtgccgctgctctcctcggccgcgtctgcgccgccggccccttctccttccagggactcctcatcggccgcccgcttgcccagcttcttgagcccgtcctccccgctgccgccgtcgcccaacttcactgtcatcctgcggccgggagaggggaggcggccggtgaggcgggcgcaggccgggaagtttagcggccccgacgcgctctcaacatggccgccgttgtttgttccaaatcccctctcggcggctcggcccggcccgcccgagcccgcccgagcccgccgcggcccctgccgcccccacgccgccgcccccggccctgcccaccagcccgggaccctcccgggcctccccggacgccccctggccgaggctcgcgtccagacgcccgggccggcggcgggagggcgcgacagctcggcggaccctgcccggccccggccccggccccggccccggggtctatgggagccccggcgcgggcgcgggtctgggcacggttgcgggtccgggccgctgccccgcccacagccacctacccggcggggccgcggctcatggcctggccctgcgcgccggcctcgctccctgcgccgcctcggccggccgggccgcagccccagccctagcccctcgtcccaccccctccccgccccccgaaaggcgcggggctcccgggccccgcgcacctgccccacgcgccggcccccagagctggccctggaggaggacagaggaggccggatccaccccgggacgggagaagcgcgggctcgcctgcccgcacggggaactccatggtggcccaatgccgccggcccgcctgcttattttaaaacacacataaagaataatcagctccgggtctctgggaatcttcttcccagggtgggaaatgtgagctgctgcggggatttactagttaaaaatgcttttgcaacaaaggagcctgttgcatggaacaggttggaaccacccgggaaagtgacagcccagttatgtccgggtccaggtgcaagaagcggtagaagacaatggtgttaaaactcttggcaacaattaataaaattattgcatcaactttgctacccaccgccctgtaaaatgtcaacaacaaagtgcagtgactaaaaatgctgcagcccagaaagcagagccactcaaaaataaactcagacaatcaggtacacagcaagagctgcagcccagaaacagtccgggacgggcacgtgtgaggaagcaaaaacgctgaagattagattcctcagcagatactgaccctgcgttcaactcaactgttgagaacgggggcatttccacttcaaaggaacacacgatcgaggcaccaacaccaaccacgaaatacagggacgcgggcgaggacctctctttccgagagatcgggaaatggcttcaaagtcgcaatgatgcccccaccctgaggtgcagatcacacaaggatccgtggccgttttctcctgtcggaattggtctagggaatctcgagttcatgctagttttaaaaaaaactctgccaaagaacaaaaccacccacgacaaacaccccaacttaagggatttcgtggcaagacttcccactcttccccctcaacccacctctttccactcaagaaacctaaacccccaaagacctcgtctcgggctgagaaccccgctgcccagggacctgtccgcccgcaggccacccgggacccaagcaaaacaaactcggccaccagagtgaactcgcccgctcgccgggctccacacccaagacgccgaccgagcacggggaagcgcttttcgccactgaaaggaccgacgccgtccagactttaccctaagggccaacaagcagggggatggcctccttttcgcgagaacctccaacgagaccggacttttctcggaggcgcagtctcctccagccccgtcccgctccgcaccggctcgcgtctcgggatggggacgcagaagcctcctcgccctgaggccagttgtggctgtaccgggcgctgtggaagcgacgccccccccgcgctctcccgcgccgcccgacaggaccccccggccgggcctcgccatgacagccccgccgcccagccttggtcacctttttcatcaacgccgg

SEQ ID NO: 1242796 - DNA, 4001 bp, Homo sapiens
caaattcattcaacaacagcaaagctacaaagccatccaggttaccagtttcagaagacaagcttcaaagctgaactcgccacgtatgacctacgtctcacagaactgaagactactcaaacacagcaagattaatgaagcaacggagatctgttttgcagtacaacggcatttaaactactgtttccaaatttctcacttcaataagttcattttataagattaacgtcaaactcaacttttatcagctaaaaagaaaagcattagtgatttttatataccatgagcatcatttactcctccccactgtttaacaaattttaactagataagaatctccttatgattgatctttaaaaatcgcttttcacttctacattaatattaaacgtcgcttatcataacttgattccaggaattgtattcaaacttaagccacaaaattcaggttttgtttcaacagcaatagcagttttttttaatatgctagtggtcggtcacagaactatttccacaagttgaacagctgtgtctagtgcaaatctgaaggcagcgatgtaattcaatttggactcattcattagaaactgattttcagatgctaccactgcaagactactggagaaatgcaagctgcgctggagatggaattgttcgcagcggcacacaagtttttgcggcaaaggagagagctctaaaagaggaaatacaactagttcatgttaccatgaaccagcgcagtgggacccagaattactgaattaatagaaaactaaatacttctcttaagcagctatgataacttaagaaagtttccagggaagccgtttaatgaaaggaaacaaacaaaaagatgatttattcagtatcctgctccatttttttgaaaaattggaattcctacattccttaattctttgtacatctacactgtgaaagcaacacaaactcaaatggagattgcagcccaaatgaacttaaacctgctgtttaactttcttttgaagttatacatggaaatgaaacacaccacagcaactttcatgacatcttgctaacgaagtttgggttttgaaaaatggaatgactagttgactaaaaacacacacgcgcgcacacacacacacacacacacacacacaaaacaaggagttttgaaaataagcactaagcatctttccaaggaactcactcattccaagaaacttcggttctaactcgcaagctggcggctgctgtgagtgtcctctgaatgcagcctggtcaatgtgtcgccaatccagaaaacacactgccctacctttggccgcgatcttgctttctctaagcatcaaaggtaccctccgctgtcattcctctggacggccacgcgtgtggacacggccgcggatggatgcgtaggacattaccaaacaaacccacacgctgcactttacttcttccctcctggagtgccactagggtccccgcgaggagggctgatcgggtgcggggaggccgagtgcaccgggcgtgtgctgaccaactcgggcccagtgacagtcctgcgacgaacttccaccctcccgcgcggggcgaggggaacgggctgcggggcctgctccgagctcccggctcgatcggtatccgcgaccacgacccccggacgctctctttcaggtgggggtgacagcgcgccccgggcccccgccgccccggaccccctcctcacctgtgctgtcattcgccgagaaaccgggcgagctgagtttggctcttttggggttgggcggtccgtccagcaagttctcagccattttcacctgctcgcgaaaacagccccgggcacgggcggccgggccggcgagggcccggacgggggtcgggggccctgccggctgcgagggagaggagcgagcgcgggccgcgagcgggcgggcgggcgccgagggagagggagggcgcaggccgggtgggggaggcggcggccaaatctcagccacagcaacagcgccccgcagcgctcaccgcccgcccccggccgccgccgccgccgccggccgcggccccctcatcccctgcccgcctcccgagcgcgacactccgcggtgggggcgccccggcggcccggccgcccccccgggcccggctggcagcgacggcgcccggccgggcggctcaggcagtccccgagaacatggtgccgccgccgccgccgcctcgctccccccccgcgccccacttaatgaattcgctcgcggcccgacgacgagggggctccgggctccgctcccggcccgcggcccgccgccgccgccgccgtgaggaaaaacaatgcgccgagcggggtcgccgccgccgccgcggcccccccaccccccgttccgccgccgccgccgccgctgccgccgccgccgccgccgggctccgggaggccgagccgagaggcgagcggggccgccggggcgggcgccgagggccgggcggagcgggccggccgggcggagcggggtgcgcgggcggttgtggggcccgggaccggcggggccgagtagatcgcgctcgaagccccggtcgggtccgcgacaagatggcggctgttgattcctcaattaaaaaaaaaagaaagttttttttcttctctttccagagcctgaacggggagggggtgggggcggggcacgccggtgcgtcacccccccgcggcgtcaccacgcacggcccccgccccgccccctccacctgcgccggccgtggcggaaagagccgagcgtgctcgggccgaagggctgaaggcgcggccgccaagcgtagggaagctggcggcccggcgcgggccaggcctgcggggcgcctgggctccgggctgagccacagcttttgttctgatggcgaccaggcgtagagggccggggctccgggccccagcgggctccgggagcggcggcctggccgcgggctgggctctcgggcgcggattcgacgccagcccgggcccgcccgtcccgctggggcggcgctgcgtgttcccagctcctcgcgtccccttccccagaccctcctaggtggcgtcggtcgggaacggtcggggcgaccccagcccaggccgcgccactagccttcgccgccggccagggaagtggaatggcctctgcaggttacagaccgcccttgggtcctgccgacgaggtgggcggatggggaaactgaggcggggggcgagcaactgctccaaagtggtcgaggcaggaagtggcagggccgggattcgggtcccgccctacctcgtgacactagggagtgagggggcctcacgcctgttcgcatcccaaggcggcagggcagacaccctcacctgtgagagcggggtggcgagggccggcctgggcggagaagggcccgcgcatcggggcttaagcctggacgctcaggccgcactccccgccccaggcaacttgcctggcgcctcgcaggtgccccagacaggggtgcgggcctggggagtcccccacgcgagaccacagcccgcgggacacttctacgaatacccgaggtgttcccatcccagttagttatctgcccctccaaacttgcccggcttcctcataaaggtatcagcagctccactgtttcctaagccagaaacccgtgagtcagcgcggactcctccctctcacccgccacgcgcccctctacccacggtctttacctgggagactgctcctcccgcactgtcccggtggctatggtggcagctactcacttaagtgttctttgctctccacgttgctccccacgcagcaccagagttaacatcccgaaaagagagggagaaaatctgtttaaaacaactccctggccaggcgcggtggcagatcacctgaggtcaggagttcaagaccagcctggccaacatggtgaaaccccatctctaccaaaaatacaaacattagctgggcgtggcggcgtgcgcctgtaatcccagctactcgggaggctgagatgcgagaatcacttgaact

SEQ ID NO: 1242797 - DNA, 4001 bp, Homo sapiens
ggcagggcccagcctggacggcagctctaccccgccctggctgtgtcatgttgggcacacaccttaataattctgagcctcaactaactccttgtaaaaagtgcccagctaatagagcaggcagtgagctcatccgtggaaaccctgggcatgtctggtctgtactaagcatcatgtaaatgtcagctgcttgtattattacaaatggcattattactattcctactctcacatcttaagaaactctgaaaaaatcaaaatcaccctcttggtttctcctccctgggtacattgtccagtggttttaactggagcccctgtaagacaaaacatcacctgtgtgaaggtcaggttcatgggtggagttggcagtgggcagggaagtgtcttaaagaaagcagggtcaagagtgcagataggacccacctgggggtgacagcattccataccagctgggggatcttaggcaagcacttcaccttgctgagcctcagtttcctcagctgtgaagtgggcatcaagaggcctactccccggggtgttgcagcgatgacaatacaggtaaactgcgtggcacagaccgcgtgcctgccgcacaggcaacacagtcacacacccaccccttctcctgagtgggaacagccagatcaggggcagaagcagaaaatcaggtgcatacaacccaaggagccctgggacagccgacagtcacaactcatggcctcagtctactggaaaggaccacgccccggtcctgttctgcaggctctcctcactgtcagacatcagaccctggatggggaaagcaggctcaccccattctaccagggcaagaggtccaaaggcccaaaggggaaactcacaaccccactctcggttgcaaggcaagctaggcatttgcacgggatgcttctctcagccagggcagcaactcacattttggctgagagacgcccaattcaagttggactgcgatgagcaggcatcagcgaagtcctccctggcttgtccaccagcccagccttagcaagggaggctctgggtctgcagcacatgagggactagccctggctctgtccacgtgggacgaccgatctcccccacactccagagtgagccctccgcttccagggtaactctccccacgcaggagttatgcaggtgcccgctctggctaaagaaacccagaaacgtgttcccccagactgcagaaccctgacatggccccaagtctctacacatccatttgaagctctggagacagacagagctgggttccagccctggctctgcccggacaacttacttcacctctctgaccctcagcatcttcatctgaaatgtgggaagaaggctaccttgcaaatgaaatcacagaggggcgtggccctctaaactgcagctgaatgcacatgccactagatcaccctggtcctccagacatgagtaggacacattctaatgcctgccatatccatgccatcagctttccagttattgacacccactacgaacacaggaatgcaacaaatgctagtgaactgcacgaggaaggcaagagagtaaacagcctctaaggagcaggattctgcgctcagatcggcgttgaatcctgggtccttggagtcctggctgcgaggtcctggacaaatgagttgtcctcgctgagcctcagtttctccatctgcaaaagggcatgtcgcaaagctgtgttccgctatgcaagcagagcactcggtgtggtgccagcacacagtcagccctgcgaggtggcatctgtcctagttattccagcttctcgggggggtaacagtttgcaaaagggagaagcatggaaatcacacttacctccgcagggctccaatcaccagctcgctggcgtctcccgcgtccagcagacgcggtagcagcggcgacagcgcgggcacagcaggcacagcgggcacagcgagcagacagctcaataggagcagccggagacgccctgggatgcgagtgggtgccggggctcagcgtaccgcctcttgtaggctccccggagcccggaggccacgcccccagatcgctggcggcgctggtaggaccgagcatcaccggccccgcccccggccccgccccgcaggctcagcgggctgaaggaggcggggggcagctgaggcgcgggcgccgggtgggcgaggaaggcggggccgctggcctccagggccggctagggacaaggagacgctcagctccctcgccactggccacacaagcatagttttcattgagcgcttactatgcgcctggcgcggtgccaagcgcttcccacaaggggcttgcaaatttaccaaaccccagctctctgcagctcaactggaaaataggaataaggaggcgacctcccaggattttagcaaatgaaatccgcaagggctgggcgctgtgaactgtggcgcggtgcagagtacacagttactgaggtgactcccaccctctacacgtgctcagaaaacttaggccccctcttcccaatttgcagacgaagaaagggagacttgtttccggatggggccgctagcgcggggatccaggctccgcactttaccttcaacgaccctaggacgcgttcccaggaatccagggaggtggaaatcacctcatttcacagatccagtagctgaggcttggagaagagcgtgccccaagtcccgtagctaggagcagtgcagcatgttcatatctcttttgcccggaggcatttagcatttttaacctgtgcaggtacatacggaaatcaatttagagccagacgaaatcacctttgaaacaggtaaatccacgttccttaagagctaagggactgccccgtgctcccgcctcagtcacaaaatgtggacgggtatgcaggcactgcgcggtaaggtgctggggcccaagggcaggagggggcctgtccgcactgctcatctccgcaccaagacaccggaattagctcctccagcattaactcattccccaaatacccatcgagtcgctctgtgccgggccctgtgctatacagcaggcacaaacaagacacctccgggatctcagagtctggggcccccacgagctagggcacgtgggagaaacaaggatggggaatgggtggaacaaggactatggaaggctgcctgcgtgacgtggactcaaacagggaaggcttgcctaagattttggtgcggctcaaatgcagatacagaataatgcagactggccgggcgcggtggctcacacctgtaatcccagcactgtgggagtttgaggcgggcggatcacctgagatcaggagttcgaaaccatcccggccaacatggtgacactgtctctactaaaaatacaaaaattagccgggcatggtggtgcatgcctgtagtcccagctacttgggaggctgaggcaggagaatcgctcgaacctgagaggcagaggttgcagtgagctgagatggcgccattgcactctagcctaggagacaagaacaaaactccatctcaaaaagataataataatgcagatgttttctgttatctttttttcctctttttgttttacttttctcagtctttgaagcatcattcttcagaggcactcaactggcatgcagtcatccaataattaagcacctactatgtgctgggctctgtttcaagcactggagggctcagtagtgaataagactgttccagaacaacagtccttggattgacaaaagacaaatccaaggggagaagagatctgtgttagcagatgcctttggaggcctggcacgatggctcaggcctgtaatcccagcactttgggaggcccaggcaggtggcttgagttcaggaccagcctgcaacatgatgaaatccagttgctacaaaaagtagccagcatggtggcatatgcctgtggttccagccactcaggaggctgaggtgggaggattgcctgagcctgggaggtggaggttgcagtgagctgaaatcgagcca

SEQ ID NO: 1242798 - DNA, 4001 bp, Homo sapiens
ttatctgctaaactccagtagaccctgaggagcagcggctcatgaatcttcttaaacttctgtcatcagcggctgggccagctgaaggtgaccatggcacacgagggagagagaagcccgcgagaggcggagaaatgtggggtcgtccaggagggtcgacaaggcaaagaacctgaagacgacccaaaagggtacctaggtggggccctttcagggacttggggcatagggtagggcgcatgggacgaggtgggtgagcgcaagggacgagatgggtgtgcgcatgggacgaggtgggtgggagcatgagacgaggtgggtggggcggtgggtgaggtctccgcccccagacgggctggcgaggaagcagggaagaagtaacgttgggctggtgaggcaacaggtggggcgcactggagctgcgggataataggtggaacaaactggggactacactcgtgggcgcacgtgcggaagagggactgaggaggttcttgcgtgctcccctcgagcaccgccgacagcttcacccgcacctcctgccttccgcaccgctgactcctaccgctccgcgcactgcgcgcccccagccctagtgcagccagctcccggccgggtccgcgcgagggccaggctgccaacctgcccgcgggcggctggtggttggggagggcgttgggaggaggagtcccgccgggtggacgcgcgcccttcagcggcggaggcggaggcggcagcggcgaggcctgagggtgcgtgctagggagtcctggcgcgtccttcttctgccggcgtccccctgcgcttgcagctgctccccgacgcccgggaggcccacccgctagccgcgatgggcgcgcagagcccaaaagggcgacccccaaacaaaactcacgcatataaatcctccagagacttcctcatccccccgccaacacacacacacccacacacacatacacacaatcaaatcaaatagaagcactgttaggaattttatattggctatgcaaagtgcttgaacgcactgactttggaggcaaatgccttgtccctagtcctgactagtccagaatttatttgctgtgacctatggcaaattgcttggtttctctaagcctccatttcctaaggcttatatctgaaaataactataagaggaaaggatgctattgtatccaactcagagggcagtcctgatacttacattgcgagaacatgttaagtgttccataaatggcagaaggggctgtggaagttcagtgattataggtagtttaatttgtcttagttttcctttgtgaaagcataaattacaccagagaaagtcacatatgtaaggaatactttatgcaaagctgttgtcctagggaagagagaccagaactcagtctaaactaactctgctgaaacaaagtggggcagggtttttaagctctaggatgagagtagaaaggtgctggagggctgtcggaagcatactgagttgtttgctgagtttacaagtgtttcctccgtgattaggccagctgtgtttgctaattggctctcagggaagttaggctcctaccctcccacagaaactgggagatagggggaccgtcttccttgatgattgcatttcaaaggaatggctcccaggtccttgacaaagatgattctggtttgtaaaactagtaagaggctattaaaaagagttacagatatctcaagacagagaaagaatttacagtgaaaagctttctaaagaaaatgctctgtattaatctgttttcacactgctgataaagacatacccaagactgggcaatttacaaaagaaagaggtttattggacttacagttccacgtggctgaggaggcctcacaatcacggcagaaggtgaaaggtatatctcacatagtggcagacaagaaagcttgtgcagggaaactccccatttgaaaaccatcagttcttatgagacttactcactatcatgagaagagcacgggaacaacccatccccatgattcagtcatcactcacagggtccctcccataacacgtgggaattatgggagctacaagatgagatttgggtgtggacacagagtcaaaccatatcatgctctaagaaaagaaagttttgggcctagagtcaggaaaaagccttttcaagtcaagctgagaactttaaggtggtcttggctacctcattttatgcaaagtaggcagaaaatttaaaagaaaagaaacatatttaagtacaattaagaaaattacagtgtttcagttaaagcagttcagtgctttttagaaaaggagctgaaattaaatagtaagtataaatttaattctaataattcagggctatgaaccatgtaattgcttaatttccaataactatttgttcttttgcgactacagtttggcaggttgccctaataattttcaggcattttaggttcatgctccttccaaccctccttttcccttacaagggttgcatccaagttatgagggataagggtggggggtgtttcatatttaggaccaggatgttgatgtgtacttattcctggccaggctgttttggagtcaggactcttgcgctataagatcccccaaatctattttgggaatagtgaaagggatgggatgatgctgaggagccgggcttcggcatttccttattgtgcattatttccaatccgttgttttaccctggaaagggtcaactgaaagaactggccattgtctttgtaggtattaagtattgctctgtcttccccgagaccaaaaaataaaagattgaatgagggatggtactgaattgaaaacttatggttaatattccaaaacattacccactaaaagagcaagagaaaaaagttagtgggagagtgtttcagatgattccttcttcacaggtttacctgttcccccacctgaagagttaattagaaaaacaatacaggtacattacataaaattcaaactctatagacatacaatttgtaaaatgtgtaagtcccccattttccacctcctgaggacatactatcaacagatcttctaccatttttcttttctgtacatgtacttcttttctctacatatatatttttccaaacaatgtgtttatatcatgtataatattttgcagtttactttttctaccttagtagtatattatcctctcatgacagtgtatctatatctatcccttctttgtaacagaggaacaggattttattgaaggtattggcatgatttatgtaatcattctttctgttttcatttgatcttactgttttccagtgttatcatgaacatctttctgcctgaatctttgttttgctatggttttgctttatgaactttgtttctaggtttgtttgctttttttttaaatagcctttaagacttggatctgctgcataaattcctttaaagtttgcagacatgtattgagtgtattgatcagctgcactaaggagtaagcacctgatgtgaagcccccttccatgaaaaatcctttaagaatggcatagttgtgaagttggaaggctgtatgaatcacaaattgattttaccccatcaccacatcagccaaacacctgctctgccattttgattaagattcgtcatgtatttcatgccagtaatcccagcactttgggaagccaaggcagttggatcacctgaggtcaggagtttgagaccagcctcaacaacatggttaaaccccatctctactaaaaacacaaaaaattagccaggcgtgatggcacgcacctgtaatcccagctacttgggaggctgaggcaggacaatcgcttgaacccgggaggtgaaggttgcagtgagacgagatcgcgccattgcactccagcctgggcaacaagagcaaaactccatctcaaaaaaaaaaaaaaattaatcatgtattaattgagatttgcagggccgtgtgctttatataaaacaatgcacaatgcactaagctccatggtgt

SEQ ID NO: 1242799 - DNA, 4001 bp, Homo sapiens
acaatggctctctggcttcccaacaaggcttctcagcactactggtgcactgtatccataccacctgaaactttactgccaaaggaaaaaaacaagtgattatccgctaaggaatttccttccacttgggcttgaaatacatttctgaagtcgctccaattttttccaactttctttctggaataacatacagcatgcaccaagagtaacaaacacagtgctcagggagcccttaaattgagagtggcttttctgtcttttgattacctatttattttctaacaaacggagcccttttggaatttttgctttagggaatttacattttagaacaaacactttactgaacttagatttgtgatgtctgcacattttcttgaaagttcatgggaaaatggggtggaaaaagaagtaatgaagggacatcagataaataaaatttgagcgtcggctgggcacagtggctcacgcctctaatcccagcaactataggaggcctgcaaggagtccttttggaggactgcttgagctcaggagcttaagaccagcctgggcaacatgaccagaccctgactctacaaaaaaattttaaaaatagctgggcgtggtggcatgcacctgtagtcccagctacttgggaggctgagatggatcactggagcccaggagttgaaggctgcagtgaactatgatctgcactccagcctgggtgacagagtgagactctgactctaaacaaataaattaaattaaattcaagcttgcattgcccattatagaatgtgactggggtaccttacaaacttttgccctgtggggaggaaaatgttacataccactcataggacactcaccttcaggatttttacaaccactctctcattgttggtgatattaatggcctcaaatacttcactatattttccccgaccaagttttcgaaccagttggtaatcatcttgattactgtaaaaggaagacacacacataaatgccaggactgggggttaaccaagcctatgcccactgtacacgtcattcagccgcttccaccaggcaaacacttggaagtgtctatacatcacgtcacaactcattccctaaatgaaagccacgacataatcttggctcccttcactctgcagagctcctaacctaattggtctctcctaacttgggaagatggggcaggaaggcaacgctctgagccaatccagaggggcgagcaaagcacccgtcctgaaggcctagagggtgccccctgtgccccgcggctccccagcacctgcttctcgtttcacatcttcaaggtagacaatgcctgttttaaaaatctggacgtctttaagaaatttcctcccaccacctcatctcagaaaacctaaaaggcagggcattttaatagctccaaaggacagctgttgacttcccaccccagtggaaacccagaagtgtgaggaagggcagctccctcacttccacccggcgtcgatccctggaccccacacttctccccgagtaaaaaagcattccttgggggaaaggggtgcgcaaagcggggagaaagggacgaaacgggggtaaaggggagggaagaggaagacgaggacatgtgcgagagcgggacctctgcctccctgcgggcccgcggaggggtcggcgggagacaccaccgggcccgagtgcggttcgcagggggtggccgggcgggggcagggatcagcgggcccggcggggggcggcgacggctttacccccagctcgggacgtgagcctcgtagtcccagtactcgcggctcctcagactgttcacctcggcgtagacccgggccctgctgcccgcggccgggccgggcatggcgggcgggaccggggggcggcgcggggcgcagagggtggcggcggcggcgcggcgggggacgcggggcgtcgggcggaggaggcagcgggccgccgggcgctggaggaggaggaggaggagcgcggcggcgggcggccgcgccaggccgggcccgcgggggcgggcgggctgggggcgcggggggcgccggccgagccggcccggccctggagcggccggcggggcggcggggcgggcggcgctcgcgctccgcggcggtctccgctcggctcgcggcccccaggaggcggcggcggcggcaccggcagcggcagccaccggccgggaaaggggcagcggcggcggcagcggagaagaaggaggagaggaggaggaggcggaggaaacccggaaaaggggccgcgctcactgggagcggccgccgcccggcctggggccgcccaggctcacagcgccccctggagcgcggggggacccgccgggcggtgccggccccgccccggccccgccccggcacgccccgccgcctacctcgcgccctccgccaccctcgccctcccgccgccacaggtcggactgtccaaatcgcctcaccctcgggctggcttgacttcacgccacaggagcccccccttccactggccgttgccctagagccctcgcccgcgactcccgaccctttcactgtccttggagaccctatccccagccctgcactcacccagcttttacccacccaacacatcccatactgaccctattctgaccctcctgtcacccaaactgtcaagtccctccccagggcctcactcaaacctcagaacctcccccacctcaatacttctcccttcccccgagacatacccctccttccccctctggaccctgccctgttagggtagactcctcagtccccaaggcttcctacccccgtcattcagagtgctcctcacaaaacctttctacacttcccccaaatgcccttccagagccttccctgaatatccactttggtcacttggttaagctggcattgaccaggttgtgccactgcaaagttacaatttttccctttgtgattaataagtcatttgtggggagagactttgagagtgtaaatctcctgtttgtgtttaggaggagggagagcaggagaattgcaaatccgacctgaagggacaggctgggttggggatgtgcccagagtaggtggtcaactgagctggcctggcttccagtgctgcctgcagccttgaacacccttctcctttgatcttctaggcctttcttctgtcttcctttcccatccctcatcctttatcgacagcacctctgcacccagtacaggttgctttcattccagtcccttttcacattctgttttctggatgaaaccctgggccttcctgcttgacacagctaagagcacagtctgtggagtcagatctatccagcactgctacttagaagctgtgtgaccttagggcaattactcaacctctctgtgtcacagattctacagcataaaaccagtaataacgctcacttcacagggctgcaaggagaattaaacaaggtaaaccatgtgaaacacttaggatggtgttcactattaggatagcatgtgttcaatatgattatttccaggcctagggcctttctctgctcattcctccctccctgagaccaccgtgcatccgtcttttggttccttctatcctccaagcttaactaggagccacccccaacccctccaccccaccttcccaagggtgtctcctttttcctattcaaatttcacctttttctttattagtagtatttttttagaaatagggtgtctctatattgcccaggctggagtgcagtggctattcacaggcatgatcccactactgatccgaacaggagttttgacctgctgtttgccacctggcaacctggtggtcctccagccccaggaggtcatcatagttgatgccaaacttagtgtggacacctgattggcattgcacactacagcccagaactcctgggctcaaacgatcttcccaccccagcctcctgaggagttgggactacaggcatgcctccagctcaagtctcagcttaaagatcactttctctagagttgatactt

SEQ ID NO: 1242800 - DNA, 4001 bp, Homo sapiens
agtggactggacaactttggttaggaccaggctgtttaatttcttcataaacttaacatagcttccttcctaaaaacaggttaatccagactttcttctctccaaaacaacccgaactgatacattaactgctgcaatgaactatattaaggcactagaatatttacggaaaagcaaaagactcccgcaattcaacgggatgctttttagtgaagaaagaaaacttaaggaccgaataaatttaaatatatgccttgtttaacttcctttcccacctatgaggacttggtttttaactttcctagttgatcgaaactcaaagtatgaagactacgtatgcgaatgtttacttaacgctgaactcggggctacaggaagtctcctactaaacagtagttacattaggcgtagatatttataaaccatctgcagcaagtgacccaggattcaattacaacatcaaccctcatatttcatcgcatgggcaaattaccagtcgagtcaagaataaactcattctgccctactggcgctctagatcgagttgcacaatcctggggcagaaccgccttcacctagccctagagcatcaggtactaagttagtgtgaggacattttaaagcgggagggaaactcaagggacttagcccatactcccaaattcagaaatttgtcacgtcacttgagatcagaatgaaatttaagtttcagtccctttgagatctctgagcgcacaaagtcaggctgctatcactcggctggggagtccgaacccggctggataaaaactacttggtgcggaactcgcatcttttccgcccaccgtgggggggccgcaccggtcgggtccggccaggaacccgggcgcgagtttgggggcgcagcgggggcggcgagcgcgcgtccccccgcccgctcaggcagcgtagaggtgcgagcagctcagccagccttgcagagggagctctcggcagctctggggtccctctgctcgcagccgctgcagcgccgcctgcgccactcggcggagacggagaccagcggcggcgacgcgcggactgggagcgaccgccgagcagccaagcagctgggaaggcacgcaggccggcagggtaggttccggggacggggctggctggaggaggggcagcccgagacgcgacggccagggcccgacacccatacggcaccgggacctggcttagcgcgcggcggcagtcggtccgaacccttaagctaggcgggcgccgaagccgggacgcggagatagtgtctcagctggggccacccgccgcgggaggggcggaggacacaggacagagggcgggccgcggccgggcgatcggccggccaagaaccggcctcgagggcagacaaaggaaggaaaatggagtcgccgggcgcgcgggcctctgcctctgccgccgcccgaggcctagcgcgctgccaggagggaggcctagcgggcgggcgggcgggcgggcgtgggggtggggggggcggccgggccacggcggcgacgggcaatggcggcggccgcgccgcagcagggacggtagagggagacaaacaccccccggcggcggcgctggcgccgggctgcagccagcgccgaccggagcggccccatcgtgacacctagaggcggcccgcgaaacctcctccaccccgggcccccttacctccgcgccacaccccccgcggcgcccgctccgccgccgctccacggctccggccacccggcgtctccggcgagctccgcgcgtccgcaccggccaccgccgccgccgctgccgccaaagaagcagctccgcgcacggtttaatcgctccacaggctcagacacaaaatggcggcggcgcggtgcagtgcgcctgcgtcggcgctgccggggccgcgggtgctgataagggaagggacgggtggggggaccggccgggcggcgagtagagggcgggggaggaaaggtgaggggaggggttggcgcagggcagcatgggaggcggccccgggcgccaactttcaaaagcgggcgcgatggcgtcacgggacgcgccgcgagtcgcgtcgtcacgccgcacgcgccctcgccgggtcgctcgtgggctctgccggcgccgcggcgtcctggctcccgctgggtggggcttcctgggcggaggccgccgcccctgggcggtgccggatccagtccgcttgaccttattccctagctgctgtctccggccccctgaacccgtacagggttggggaagtgggggtggctggaggaagcgcgcgcggggcaagccagtggggctgaggaggctcccgggcccggccccgcccagtctccgccccagccaggcccgacccgccctccgaatgtcttacagctgcccgccccagagtaaggcccggtcggttcccgcgcgctcccagctccgtgcccgcgagcgacgactggaagggctgtccttgctcagcggcttttggtgatctctccgccctagaagagggccacctaaaagcgggtgcgagaggagagtgggagggcctcctcttggtgtccccaggccacctcagcccggagaggtggcggaaaaccagacttgatgctttaacacgttcatagcaatcgctttttactgaaaggagtttctgtatttagcgctgtgtaattctgtggaaacgtgcatttcttgtctttgcgggagagctgttctctgtgggcggagaccttcagtcccacccctccccaggaggcgcctgcggacccttcccaacctgcagtcaagttgaccaagaactgactgcaaggtgctggtggctctgggatgagagccttttggtacttacagggaatatgactcttcccttagatatcaaatggacccaatatctagggagcagcttcttctccatccatctgaccgttccgttgtgagaatgctggcccaataacatactctttttttttcccctaaaggaataaaaaaatctgtatttttaagatgtcaaatctccagagtttttagatgttagcaactgaatcagatgtttttaaacttcatgagctgattaaaccacacagatgagctgtcagtttacgacccctggcttggcttggaggaaagagtgaagagaaattccatggccaaatcctggggcactccaatattgggagggtaatggagaaggagtctgaaaggcagcatctaggaagtcatgaaagctagcgctgagttgtggaatccctgggcagagaaggtttcaggtaggaggcatcagctgagcggtgtgataaacttgggccagagatgtggctattggattgggtcaccttgcaagtcactggagaatgtcactgatggccttggcttgattcacgtgagtatatcagggaggtggacctgaccggaatgggttaaacagtcaccaggaaagtgaggaaatggagacagcacatgtatgcaatttgagagaggttttgctgtgaagggaccagataagtttggggatagatatagaaagaaatcttttaaaagatagtaggggccgggcgcagtggctcacgcctgttatcctagcactttgggaggccaaggcaggtggatcacctgaggtcaggagttcgagaccagcctggccaatatggtgaaacccggtctctactaaaaatacaaaaattagttgggcatggtatcgcgcgcctgtaatccaagctactggggaggctgaggcaggagaattgcttgaacccgggaggcagaggttgcagagagccaagattgggccacagcactccagcctgggcaacaaagcgggactccatctcaaaaaataataataaataaaataaaagatggtagggttcccagagcatgtttatgtgccattgggagggatatggtggggaagaaagatgggtgatccaggagagaggaggcttgcttgacctatataggagtgaaatccatcagaagatataaggaaacagggagggttgaccttggagagg

SEQ ID NO: 1242801 - DNA, 4001 bp, Homo sapiens
tatataatatatatcggttaggcgtggtggctcacgcctgtaatcccagcactttgggagcccgagatgggcagatcacttgaggtcaggagtttgagaccagcctggccaacatggtgaaaccccgtttctactaaaaatacaaaaattagccaggcattgggctcagtggttcacgcctttaatcccacactttgggaggatgaggcgggcggatcacttgaagtcaggagttcgggaccatctggtgaaaccctgtctctactaaaaatacaaaaattagtcaggcatgatggtgggtgcctgtaatcccagctaccagggggcctgaggcatgagaatcgcttgaacctgggaggaggaggttgcattgagctgagatcaggtcactgcactccagcctgggtgacagaccgagacttcgtctcaaaaaaaaaaaaaaaaattgtccaggcgcagtggctcacgcctgtaatcctagcactttggagggctgaggcaggtggatcacgaggtcaagagatcaataccatcctagccaacatgatgaaacctcatctctactaaaaatacaaaaaaaaaaaaattagctggacttggtggcacacgcctgtagtcccagctacttgggaggctgaggcaggagaattgcttgaacccaggaggcagaggttgcagtgagccaaggccactgcactccagcctggcaacagagaaagactccatcccaaaagagaaagagagagagagagagagacggagtcttgctctttcgcccaggatggggtgcagtggtgcaatcttggctcactgcagcctcgacctcctgggctcaagcgatcctcccgcctgggtctcctgtgtagctgggactacaggcatgcgccaccatgcccggttaatttttgtatttttttgtagagacagggtttcgccatgttgcccaggctaaaaatgcatagaatcttatgggacctccattgtctgtgcggtccacctgttgaccaaatgttgttatgcagtgcatgactgtactgcctcctcagtgaagcctccagaatcacttctcctttataaacgaactccttcctttgacttaaggccatttgcatgagttccagggtagctcttttaacggcttttctgtgtgtatctgccttagcctgagagccctttgaagacagggcttacatatttctacctcagtgactgctagtggacttcaacatcatcgaagtacagaacttcatatcaaaatgtgccttgaaggcccattttacagatagggagactgacttccatttccatttctctccctgatgccccatccatgcaaggcgctggcctggctagtcagcgaatcaaggtccgcaagagccagtgtctggcgccccgggagggactccatttcccgaaacgcacagcgcgcgcccgatgcgtgctggggaatgtagtcctgacccggtgccccgcccccgccccacccccgaagtttcccagcaccagtcgcgatcctcagcagcccagactttcgtctcctgttgtcactcactacttcctgtgactccaagactgccttcccttactctaccccttccttcagccccccagctctgattctttcccgagactcagtggacgcaggggtcctgccccagccccgaccccagtcctccccctgggtgtactcgaaccggtgatctaagccctgagcccaggtccctgaaacctcagccccaggcctcctctaaaccctagcgcctgctgtttctcacaactcacccgctcactcgttacctgacaccggagccctgcccttccccgccaaggccgctcccctcccggacccgggggtggcggaaacccagacccccagctcccaatccctctgactcctgcgcccctcagcgacccggcgtccggtccctcagccccttacccagacttccctccctccggctcatgctggcccctggctgatcccggctcccttcacgcccccctttcgaggggggagaaaggggaaagggctgggggcgtggcccgggcgcagccaatcagagcccagaccccaaacatttcatcctacccccccttttgagacaggattccttggccctgagctcagctcctcgtccgtggggcctagtgggggaaggggcccgagggggaaggcaagttgtctgccgggtggacaggacctcggggctgggggtgtcagggcctgggaggcagcccaatgttctgccgcgggctcaggcttggacctgaggcagcggctgctttgggtgtaaagctgaggagacaggagagggaactgccggactggcaggacaggaatgcgcaggccctctctctagtctggggcgcggcttgcgagggaggctacgatgggggccgtcaggcttggggcatgtttgtccagacatacatctcctggcctatcttagatggcttccaatctcattgtcacacccaccaggagggagacagatacactgctctcctcttcttagcaggcctagtaacaatcacaccccgccccccacccccaggagaacaagctacagagacctggacaggaagtcacacccatacgtcaaccccattaacctggtgtagacggaaaggaaggcacatagggatgatccatacttggtttctggcccccgcgaggggctcgcggtctgtcgaggaagcccatagacaacagaagctaatggggtttgtgaatgaagacgaggaggcccgtgtgtgtgtgcgcttgcgtgtgtctgcgtgtgtgcgtgcatgcggacgtgtgtgcgtgtgagcatgcgtgtgtgcgagtggatttgtgtgcgtgtgagtgtgcaggtgtgcgcgtgtgtgcatgtgcgcgtgcatgtgtgtgcgtgtgttcgtgtgagtgggtgtgtgtattgccgtgagcaattgctggaataaaagaagaaagagtttaactggagagggcacagcagatagaattgagccagacaattggtagggcccacaatcacatgtgtattaactgtaaatatttattgggcatttaccatgtgctgggcactgttctaagagccatatgcacattaactaactcctgtgttatagatgcggaatagagagaagtgacttgtccagggtaacacagttaggtgtggcacaactgggattttacctaagcagcttggctcaaaaaaatgctgtcttaaccatgctcctaaccccttatacccttaacctctggacatggtcacgcccaaattcacagacacaacagccacaccttgaaacacacacacacacacaacagcagcacaaattttgacatggtcttatctgctgacaagccagcctcaaataaagtcaacaaagacacactcattttatttaagtaatgtacattttatttaagtcatgtgatggattttcacagaatacatatgcccagggaaccagcaccagattacacaacagaactggatcagctcccagaagctctcccctcgtcccctcccaaccctaagggcgatcactatcttgactttggtgcactataaattagttttgtctggttctgaacgtaatacacctggaaccatctagtatgtactgttgcatttggcttctgtcactcaagatttcatcatgcgacttgtctatgttgctgtgtgtagccgggcatgtcaatcccgttgctgtgtctatgtgcatggtagtgagtagggcatcattcattttccattctgttgatgggttatttccagtttggggctgttatgaaagggctctgaacattcccatgcaccctcttgatgctcacacctacacatttctgctgggtgttgacagcctaggagtggaactgctggatcacagaggtggcatatgttcggcttcattagaaaactgccagttttccaaaatgtctctaccaatttacactcccccagaaatacaagagaggtccagtcgctctactttctcgcctccacacg

SEQ ID NO: 1242802 - DNA, 4001 bp, Homo sapiens
caggagttcaagaccagcctggccaatatgatgaaaccctgtctctactaaaaatacaaaaattagctggggtggtggctcatgcctgtagttccagctactcaggaggctgaggcaggagaaatgcttgaacctgggaggtggaggttgcagtgagccgaaatcatgccactgcactccagccagggcgacaagtgtgaaactccatctaaaaaaataaataaataaataagagaactagatggtggcatactcacacaacagagcacgcattataaaaatgcaggtgaatgagctgaaactccacgtcaacatgcaggaagtgagaagatttgagtagggaaaaagcacattgttgtagaatggaggtagaatggagtattagttacatcagccaggcacagtggctcacacctgtaatccagcaccctgggaggttgaggtgagcagatcactcgagcacaggatttcgagaccagcctggacaacataataagaccccaggtcgggcatgggggctcacgcctgtaatcccatcactttgggaggctgaggtgggcggatcactggaggttaggagttcaagaccagcctgaccaatatggtgaaaccccatctctattaaaaatacaaaaattagccaggtgtggtgatgcatgcctgtaatcccagctactcagtaggctgaggcaggagaaatgcttgaacccaggaggcggaggttgcagtgagccaagatcacgccactgcactccagcctgggtgacaagagtgaaactctgtctcaaagaaaagaaaaaaaaataacaaaaaaaacctccatctctacaaaacaaaacaagtttttaaacttagcgtgcctgtagcgccagctactcgggaggctatagtgggaggatcactcgagcccttgagtttgaggctgcaaactcacactactgcactccagcctgggtgacagagtgagaccctgtctcaaaaccaaaaccaaaaccaaaaccaaaaacaggatagaataccgttccattgatgtaacctttttgaaaccttatgtatagatgtataaaaatatgtagtacaattgtataagctcacactgcaattattcatagaaagttcagaatcaagctcacattccagagagggaaggagggagaaaagggaagcctgagtacaatctgttttagaaatatctgaagcaaatgtgcaaaaagatttgctgaattctgacagtagatacaaggatgtcatattcttttctgtattttcttttactatttctcttttaaaaaatagaaaacacggctgggcacagtagctcatgcctgtaatcccagcactttgggaggccgaggcgggggcatcacctgaggtcaggagttcaagaccagcctggccaacgtggtgaaagcccgtctctactaaaaattagccagggttggtggtccatgcctgtagtcccagctgctcgggaagctgaggcaggaagatcatttgaacccaggagatggaggttgcagtaagtggagattgcaccattgcactccagcctcggcaataggagtgaaattctgtctcgaaaaaaaaaaaagaaagaaaggaagaaaatgcttgacaagtacccagcacaataaaaaccccggtggaggccttgggaggtctcctggggccacaccttaccctgcacaaggcacccccaccccagccacttctggagcctcagaccatggcagagaccagcatcgtccttcccactcctggagcaggttgtgtgggctcagaaagccccagaatgcaccctctcctgagccctcaggttacctgtgctggggatgaggccccagggggcagagcaggggactcagatccccctctcagccaggctcagggctccctcaggacagacccctcgggcaccagcactcaccaaaggcggcccccacaagggagaagcaggagaggagccagagggaagccatgccgctgcctcagaaggtgtggggcctgccagctgcggggccccttttaccaccttgggggggcagggagcccagccccccccgctcccccagccagggaggcctgagcccaccctccctgttacccagggaccttgggcaataagtggagacagagccccgcctggctctctaccagacaaccccagtccctgggaaaggggcagctgcgctgacatcaccggtcagccttggggacatgatcccacagagccagctgtgagctgcagtatccctgccaggagacggcaccaggctcttctgttcccagaggggaagtggaggcagttccaccccagggctcgtggaggaccagctgctgtcatggaaccaggtctccgggaactcaggctctcagtgaagggtgtttccgcctaacactgtcctagaagcaaagggtgactcagggcatcgtggattctccagagtgtcactgcaagtcaccagtgaagccaagccacttctgactgtggcgagggtctgggtgacaaggaccaacccgctggtggccgtaacaggtgggcaaagccactgacacgcgtcccacctgtgctgtagaacccaacagaattcactttttctgcaatgactcatgatataaggaactaatcatttcataaagtttcagtttcttacaaaatggaacttggattccgcaccataaaatgacacagaaaacaaactttttaagatggagtctcactctgtcacccaggccggagtgcagtggcgcaatttcagctcactgcagcctcctcttcccgggttcaactgattctcctgcctcagcctcccaagtagctgggattacaggtgcccaccacacccagctatttttttttttttttgagatggggtcttgctctgctgcctaggctggagtgcagtggcacaatcttggctcactgcagcctccacctcccaggttcaagcaattctcccacctcagcctcttgagtagctgggattacaggcatagcaccaaacctggctaatttttatatttttagtagagacggggtttcaccatgttggccaggctggtcccaaactcctgatctcgggtgatccaccttcctcggcctcccaaagtgctgggattacaggcgttagccaccgcacttggccaattgttgtatttttagtagagacagggttttaccacgttggccaggctcctcttgagctcccggcctcaggtgatcctgtggccttggcctcctaaagtgctgaaattacaggcgtgagtcactgcgcctgtctgaaaataaattttgaggaagcagaaaaacttttttcattgtcacaaaacaaggaggaaagacaggtgtgggtgacaggtcggtgactgggcagaaagtgaaggccaagggatcctcagcaccctgtgggcagatattcaggggacagagcccgcagcatccctgcccttatgggcctgagacgctcatgacagacacacacgacacagatgagcatgtaatatagtgaccacagtcacctggggcaaggctggacaggacaggctgtactgcatttccggacgatgagggtatgaaagtaagacacagtgggtggatggtgtttccatggaaggccttgggctctgtggtcagcgggccaggtcaccttggcatttagaatatcccctccccactcccaccgctgctggagaatgcacaactataaagcaaaactaaacttatatactaaagagaaaatttcaaaagttcacatcaccatgttaccctttttttttctttttcccctgagacagagtcttgctctgtcgcctaggctggagtgcaggggtgtgacctcagctcactgcaacctttgcctcccaggttgaagcgattctcctgcctcagtccccccaagtagctgggattacaggcgtctgccaccatgcccagctaatttttgtatttttagtagagatggggttttgccatgttggccaggatgatctccaactcctga

SEQ ID NO: 1242803 - DNA, 4001 bp, Homo sapiens
gacctggattttatttgcatttgggggattttaaattcagaagattttcaataacgaacgggcagttaggagcgtgttggaatttagagccaaacggtcacggggggactccacggccaggcagcccagaccccagaggcagccccgcggcccctcaccgttgtacttggtcttgccccagcctgtggtggcacacagtgtccccgcggggaagtcgtcgtcggcgctgggcaggcacacggcggacactgtctgggagaagcgggcaggtgtggccagcttcagcagggtgatgtcattgttcacggtcagaatgctgaacttggggttcttgaagacctgggggtgggggccagagtgccggggtgaggccctgggaggaggcaggacctgcaggcttcgaggacagactccttccctggtgcccgttaaggagcagtccatccccagggccggaatgggaatcacgaggccggcccggccccactgggcgcctgtccctgaagcagccgaggggtctccccccgtgcccacggccctgccctctgctgcacggggcctgggtaccttggcgatcttcaggacctggatgttctcctcgtcagagccctggtcaaactccccagccacgaccacgtcggaggtcctgggcagagcgttgtgggtgagagaacatgccctgctcccctcccacccgaccggtgctggaagcggagcccaaggctgcccggtcctcacctgaccccgcagtgggcagcggtgaccacccagtcctcgctgatgagggagcccccgcagaagtggaagccggttttgtcctgtgagcaagatggggagggtcagcacctcccacccgggggcacccccagcctggcccctacccagggtgccccccaccttgcagaaccccctcacctgcagggacacctgccagggccaggagccggggacggcgtcctccccattcacgatcctggacaggccgctgagcacagggtggatggcggggaccccgcagcctgggggcgggagtgggctgaggggtgggtaccacccacccaggtcctaatgctccagcctcctctcactcccaactcttttccagtctctgggacctagactggctcccacatccccttctctgagaagttggccctggctctcctctccgcagagctggaatccccaggtacaactgagtccaatgaactgggctgtgggctgctgaggaatggggtgttggccccacctcagttcggagaagtcacacaggtggagcgtgcggtgggcggcagccccggcgctcagtctgggaggccagactctgtgggtttgaacctggctccctccctgcccagctaagccactcagtgtccccatcagcaaagtggggatcacgctgtttctgacctcacaggtttggtagagtgagcaggcagagcgccagctctgcgcctggcacccgggaagtgctccgtgagcaggagtttaagagggtgaggctcgaggttctgaaaggtttggactgaacggtgccaagccccagctgcccacacattcaccacccaaacctgtgctggggccgctgactgtttgggggtttcccgaaggcctcagggcagcccccggacacctgcctcctccccccgcctcctcccctgagagcctcaggtctgctgggggtgaggaaggggagcgggactccccatctcctgagctcagaggcggcagctgagcctgggagggaggcattgacctctcagcgcccacggcagagatggagccggtgactcgcccaggcccacactgcggtgcacagctgaactgggagctgggaccctgctgcctcttgctggcctcggggctgggagtgagaggagaaaacccttcggcctccgcagggcctggcactcaccgaaggtggtacccaggagggcccagcaggagaggagccagaggaaagccatggtgccgctggcaggggtgtaggacgcctgtctgccggtccccgttatagccctgtgtgcctgctgttatctggagaccttggggcgataatcccttccctgggagtgggcaagatgtgtcggtgcagggctggccaggaagcctgggatggcagcagctgtggccttagctgagccgggctaacccaggtggccttcgaccattgcctttctcctccaggcccaggcttgggcaggggcctccaggggctgagtccagcatccccgggtttgagccccagctgagtctcttgtgctctgcaaagaattcacttgatcttttcatggtttgaaaacccctgggcaggccgggcatggtggctcacgcctgtaatcccagcactttgggaggctgaggcggatggatcacgaggtcaagagatcaagaccatcctggccaacatggtgaaactccgtctctactaaaaatacaaaaaattagccaggcgtggtggcgcacacctgtattcccagctacttgggaggctgaggcaggagaatggtgtgaacccgggaggcggaggttgcagtgagacgagattgcgccactacactccagccttgtgacagtgagactgtctcaaaaaaggaaaaaaaacaaaaaaaaagaaaaaaacccaatgggcaatgtgaccaagtagaggagaggctgggggagcaggcctgtgccccatggtgtagccagaggctggggtgcgggtgctcgccgggtcccaggggatggctaagaaggctcagtgaaggcccagtcgacatctgtgttggtcacttgggctgtgtacaggggaggggtagctacctgctgtcctcacactgggccacccctgcacacaggcgccagcacacctgggccctggagctgagcaggtggcatcagagggcaagactgggcctagggcccggcctgggggcctggcatcgccctgatgagaactgatggaggctgagcctcagggcagagcatgggcggggacacctggttcctcgtgcgggtggcagcatgggtggtggagccctttctcagcaactgggaaacgggggagggagaaattttggattgaggctgccagatggagggcaagttccccaaaatgcacaggaaaaggtgcctcgtggctgttttcaattccaccacactgatgcctgcagcatgtgtgtttacagcacgggttgtggggtcaggcagctgtggagccgtgggcaaatgacttgccctctctgatcctgtatgtaattgaggatgcttagagtatgggtcccatgacaaaaggaagagccttcttgagcaccaggaccaggccaagcatgcaatccacgctggcggggcccctacattcctctttcttgagtgaatcacctgttcaggcccttcgctcattctagaagattgtctgaggacagaggggttggcgggcaccagcaggacggagcatggcctggtcgggatgagacgcacccacctctgcatgcacatgggctcttcctgccagccagtgcccaccaggcccacgggaacagctgaacaaaaccaacaaattcctgcgtgtggcagctgacagccgggaggaggctggagagtttagggaagagagtcaatttttaaaataagtaaaatacacacaccagcagctaaagagttcttcttctcattattattactgatactgaggccaggagggcctcactctgaaggggagatttaagcaaacagcctaggagtttgtgggagcagtccagagcaccctcggaggagaggaaacgaacctggggtcgcaggacccaaagaggtctgcgtccctagggcagcgaagagctcagaagtcgagggggcgggcccaggagggccctaaggagacggtactagagcctcaggggcagcccctagctataagctggctggggcagatgggggaaagggcgcaagccctcacctggcctgagtgacctgtggccccagctgtgtggccttaggagctaaccgctggccaggacgtc

SEQ ID NO: 1242804 - DNA, 4001 bp, Homo sapiens
atgatgggacagggcctgggtctttaatgggttgagctggggagggcctgtggtgagctcagttgtaggctatgacctggttgatccaggtgctgaacttgctaactcgagtatacacagcaggtgcgcgcacattgcagtttttggtgccccaggagacaataccaataagcacccatgtgtttcccttctggcagacaagagggcctccggagtcaccctgagagggaagagggagggagaattgagtagggggggttggggaggtataccacaggacagcgcagaggagcgggtgctggggcttacctggcacgaggaggcacctgcgccacctgcacagatcatggagtcagtgatacttgagccccagtactgccggcactgattcacagtgaccaggggcaaagccacctgctgcagatgtgctggtgtcacattgcctgtgggccaggaggggtggtcacatggggcccagaacactggtccccaccccagtcctcccaccctgagctttggcctgagtccctacccacgccactgaggcgaccccagccggtggtgacacacgtgaggccttcagtcagagcctcgtttgaggatgccaggcaaactggcgagatgcgtgttgtgtactgggctggcgaggcgagcttcagcagcgtcacgtcattgttcatggtggtagagttccagctagggtgtgtaatggcctgtggggtcagaaacagtccatgttctgatgggtgctgagcagggtaggccagggcatgtcctgaattcctcgttcccagcacccacccacctgcactgcccacttttcctccgtgtctgcagcccaggcactcacccgagagacggacagaacctgcaagggctctgcgtttgatgatcggtcatactcgcccaggacaacaaaatggcggccagggctgcaagggggtgggattaggcagctgcagggaggccagcgcgagagggggacagccaggggaggaggcaggaagaggcgaggggcggggcaggtggaatgcaggcactcacctgacattgcagtgggcagcagtgaccacccaggactggctgatgagagaaccaccgcagaagtggaagccgctgctgtcctgtggtcagggctcagaggtcagagtgggggtgggctgctgaggctgcccctaggcatgacgtacccaggaccctgcccacccctctggtggtgtacctgcagggacacctgccagggccaggagcccaacactgcattctccccgttgacaatcctctggctgaagctcagtgccggtttgatggcaggaatgccgcagcctggccattgggctaatgaggacctgcttcccatgcctcagcccatctttccccacctccttttgggtgccccaggctgtgcaccccagagaggtctgtcgagagggtacagcactaccccttccccaacagggtacatgcaagcaccttcgggccccacagctatcttggttatccctatccacccagtcccccagccctgctgttctcctacatctgtctccagcctagtccccgctgttccccatctctacccctggtctctctgccccctcccgacctgaacagttcatacccttcatgcagccagaaggttctttctaaaagacatggacaggtcttcctgtctcagcttcctaaaccctcccgggctccagggcctggctcaatctctggtcctatttgtgagaccaccccacctcttgccccctcccagccctgcaggcctgttccctgctccactgccctggcatatcctgtttcttttgcccactctgtccaccttcgtcccttccagccagcctagctccttccctgggctgttgctgggagctgagttgctcccagggctgaatcagggctggtcctggcccactcaccccaggaggagccgaggagaaccaggcttagggtcaggctgagcagcaacatcgtggcagatgtgaggttgggagctgggtctggctttatgggtcttctcgtccttgagctaaagctccaggcctgaggccaggccagctgtgtagactcagccccctcccacgctccaggcaagacaggccctttaggccaaggtcccctgaccgagacctagacttatcagacagagcccaggtgtgagactcacctctgccacctcccaaagcctggcctctaattggctcccagaaccacctcccattccaaatgttgagccctcggtactgaggacagatggttaaattaggtctatagtgacaacctggtggctgggatcacaggagtcacccagggctaacaaaggcaccaggctttcagagaaggccgctcagcgtccagggtgttctgactggtggatggaatgctcactgcggtcaactttgctgtgaagggccaggggctgtgaggttctggcaggctgggagtcctaacacatcatcgcagtggttcctcgtccatttggaacaggagtcacaggtctgctcagagatggtgactctcccaccagcacgtggttgagttgtacacaaactcgcatttgtctggcgctgaagcctccgctcttaacaatgagatgatacttatgaagggcctggcatttaggagggcaaagtgtgagctcttggtgcctggccgaccgtggactgaggctgcaggtggagagtgacagacatcaaatctctgccaccctctttaggccttggggctcccatgggcaagcccctggtgtctgtagcccatttgttactgagctgcagaccaagcttgaagggagaagacaccctgtgtgcaaagttccaacaggtgcattggctggcggccttctgggagtgtgagggctttaactgattcaagaacagatcagggctgggtgtggtggctcacacctgtaatcccaaaactttgggaggcagacgtaggaggcttgattccaggagttcgagaccagcctgagcaacatcatgaaaccctgtctctacaaaaaaaatttttttaaattaagaaatgagctgggtatgatggtacacacctgtagtcccagcaactcagaaggctgaggcaggagggatcacttgagcccttaagttcaaggctgcagtgagccatgagtgcaccactgcattccggcctgggcgatggagctagaccccatctcaaagaaacagcatcagccaaaaaatgagatgaattggctgggcacggtggctcacgcctgtaatcccagcactttgggaggccgacgcgggcggatcatgaggtcaggagatcaagaccatcctggctaacaggttcagtagaaacctcgtctctactaaaaatacaaaaaaaaaaaaaattagccgggcgtggtggcgggcacctgtagtcccagctactcgggaggctgaggcaggagaatggcgtgaacctgggaggcggagcttccagtgagctgagattgcgccactgcactccagagcctgggtgacagagcgagactccgtctcaaaaaaaaaaaaaaaaaaaaggagcgatgaattaatggatagagggatgaatagatgataaaacaaatataacaaaatatttgcactccagagcctgggtgacagagcgagacgccgtctcaaaaaaaaaaaaaaaaaaaaaaaaaggagcgatgaattaatggatagagggatgaatagatgataaaacaaatataacaaaatactgtcaggtctgtggtgacctgacagtataagggtattcaatatacaactctttctacttttctgttacatttacaaatgttcattaatagaatgttggggtgcagggagcacactcagcggcctggggatgtgcagcccggcatagaccctccctgggccctgggtagactctccctgacatttctgaagctccagcggagttcagccgttctcgctgaggacaggatgctcttgctggcacccagcagccaggcctgagactcagcaggggcccagcaaagg

SEQ ID NO: 1242805 - DNA, 4001 bp, Homo sapiens
ctgtggaccaggagagcctctgcgccctacaccaccagctgggattcaagcgtggtgggtccacgtgtacatgctgcgtctgggctcctgaaaccacgctgtcccctgtgggtcagggaaggccaaggtttctcccacgtgctgacctgaatgatccctggggatcccagctcgatgtagattcctaaggccttcccctagagagccggctccccactgttccttgggaccagcaagcacagcaaaagcccttctggccacaagggcctagcatacagccacagcagcctctcctcagtgaattctgccggcagcctggtgttcttggcaatttcagatgctcctgggtggttaaagaagtacctatcttggccaggtgtggtggctcatgcctgtaatcccagcactttgggaggccgaggcaggtggatcacttgaggtcaggagttcgaaaccagcctggccaacatggtgaaaccctgtctctactaaaaatacaaaaacaattggccgggcatgatggcaggcacctgtaatcccagctactcaggaggctgaggcaggagaatcacttgaacccaggaggtaaaggttgcagtgagctgggatcatgcactccagctgttgcactccagcctgggtgacagagggagactccatctcaaaaaaaacaacaacaacaacaaaaaaaccacgcaccaccactgggaattaagagggctaaaaggagagagacctggtcctcccttcagggagctatgagtctagtggaaacaactgaacaatacaatggctacaagccaagaaagacatgacaagcgcctgggggaaagctagaggtcttccaagcctctatcctgccacagatgaaacaagcatctcacacgagattaaaaactttcacccagaccatctgccaagttcccaagatgctctgatccgcccctagatgtattccagctgcccccaaacgcctggtcctcctacagcttatcccagtctagacaccacggccccacttccaactgtccccataagttccatcagaaacctcatcaggggatctgtggctagctcatgggaaactttcccaagcaggaaaccaatgctttcgcctccacttcaacaccaggggcacgagggaccccatcaggagcaggaataaagtaagtacatgtttttaaaaagaattaacaaagcatcacaagttgcggctatcctgtctgctagcgaggccatgtttgccagggtctcagccacctccaggcctcacctgcagaaggcatctccggctcgtatcaccacaacgggctgcgcttccttgcacttcacacacttctgctcacggctttggagatgggaggggggagaagagagaaacacagatcacatcttccccacgcctagtgggctttggggagacagctcctgtttctcaccctgagttgggtcagagaaaggcacctcggtacacacacaaacccaggcttgtgttctgtccaaacttcaagaaaaacaaaggctctggggggatgtttagcctagaaaagccggctcagggggcacataaaggccgcttttcagtctcccaaggctgacacggggaggcgagacagcttcacggcaccagttctctccgaataaggacagcactgtcagcggcagagccgtccccagtggctgctaggatgagaggcgcgagccagtggagtaagtccccttctaggtggccgtcaccgcttgacaggcattccccgagtgctagggagcgaggtcccgctctccacgcggggcttcccggagcaagcccggccgggacccttcggggcaggagtgcggcgggaaggcgaggggcggcctggcgggtccggccgccagctcttacctgggccgcggcgccgggggcggctcctcaggcgccggctccccgtagtcctcgcccacctgacacatgggcacgccgggtcccgtcgcagactgtggcggcgacagcgcgagggcgcgccccgatgacgtcggagtggcgccgtgacggccgcgaagcccggctgggggcggcgccctacgatgacgtcagcgcggcgcagtagcggctgtgactagcgggccggcccgggccaggacagcgggcggcgggcggcgcgggcctggccccgggatggctatgttccgcagcctggtggcctcggctcagcagcggcagccgccggccgggccggcgggcggcgacagcggcctggaggcgcagtacacctgccccatctgcctggaggtctatcaccggcccgtggccatcggcagctgcggccacacgtgagcgcgcccgcccaggggccgcggggagggggccgtgccccgccgcgggaggggtcgcgaggccggcggccgccccggtgcagctccggactgggcgcgcggggactcggggcgccggggcctcggggcgcgtggggtccgggtttccctgtgccgcgccgcctctgccctctgggcgcgttcatcccccgcccagcctccttcgcgccagccgcaggcgcccggtccgactgctgcttcggttcaccgggcgacctgcggccctgcccaagctcggggtccccggcggctgcggcgggcgctccggtactcagagggcagcaggtgccaccgctccgccagtggtggtggatttgggcttgtgcggctggaatgggcagttgtaaataaataacttgtagtttttgctatcaactcttgttcggacccgctgtctgcctgttttgactacagaggaaaggagttccctaaagtttagaggggcttgtttggagtctgatgttcttagttttgtttgaaggagaacttgagtcacaccgatcactgagtagccaggcaggctggtccacagaggagcagacactgaccaccttgctggggtttccagctgcaccagggctcacagccggctcctccagggtgtttcaggaacagaaactggaggacgtggctctcctggcggggagctgtgctcaagtattctggagctgccagccccgttgggaggaagcctagatcagtgtctgctccctcctaagtgctgaataatacagctcttgagcaaaatcagcagtggcaggggagagagagagcaggagggcttccccgcagacatccaagctgctgaggtggtggagtggaggggggtgcacccagactggtaggaggctctagaacattttgcaagcaaagtcagctgacttcaggggctcctggtacagagggagctgggactgctaggtggatgtgtgctggtcacccacggaggtggcagggccagtgtcaggatgcagagctgccttcattacctgtgtcaggcagcacaggcgcctgcccacgctgggacagctctacctacttctcttgtgaggctgctacaggctctgcccctgctcctccatctcacttagccgtgacattttgggggggcagcctctgaacgggaatatttttttttgagacagagtcttgctcttgtcacccagcctggagtgcagtggcgccatctcggctcaccgcaacctccatctcctgggttcaagtgatcctcctgcctcagcctccagagtagctgggattacaggcacccgccaccacgcccggctaattgctgtatttttagtagacaaggggtttcaccatgttggccaggctggtctcgaactcctgacctccggtgacctgcccgtctcagcctcccaaagtgctgggatgacaggcgtgagccaccgcgcctggcaggacttccttcttgtgagcaggtagcgggtgtttgaaggtgtgttccgcaccttctcatctgttactgagcgctgtgaggcttgacttaggccttgttttagaaaagcctcccgtaggctttgggtgccaacaccttcaccgtgtggtcggccacagcatctccactttcctaacctgcacaaattggtctttgcccttctttttcaaatatgtcttttcctaaa

SEQ ID NO: 1242806 - DNA, 4001 bp, Homo sapiens
taatgaggcgggtaggctataggagcttaaaacagattcgtttttttttctctttcttgccaggacttgagtgggagtgaatgcgtcagctcttggagtgggggggcaatgctctgcactgactcgtagctgcaggtttgttatataaagtacagaagcctcctgcctgacacagccccacaaacccacatttggggactgacgcagctgccccacactagtcagggcagcagctacgaaccccccagcctcctctcggggtctctctggcttccaaaccacccccttgtcctacaggggctcccgagggcctctcagagccatacatgtcagcgtgggagaggacttccaaggtgagcctggtcaaatgcctagttttacaggaggagaaagtgaggctgagaaaggttccaataatgcccaggatcttccagtaaagccaatgaccaagatgagggcagaagcctggttctaaagcctcaggctgctagtctgagcacccagggtcccccagtgtcccctttccatcctagcctaggacccttccctctctcagcttagtaaaagtaatcctcctcctccgccctcttcaaaacacctccataggcattggaacctcgtcaccctcccccaatccaccggagaggtaatagctatatttaaagatgcagcaactgggaccagaggaggcaagaccctgctcacggtcacataacaggactgtggcaaagcagccgccatctgactccctgctttccagatctcactgtccgcagacacctcaggcttcagggccccagcccagacagcaggaagccagcaggaatttgcctccaccactctcacgtgcccacccacccacacacctgctccctgccccagggtgagtttgctccatggaaatatctggacagtggggactacttctcattctcccagacttgctgtgtgcccaccttctctgaaggtcaccctgccagatggtgggggcactccctgaggagggggctggctagcggttcatggaggtgatgtggcccacagaggtggtgagtgtgcatctgtgctctctcctgcattcagtcccatgtgtcttaccttctcctgccctacttgctggctgtgcattgtcaggccagtttctaaacctctctgggcctccatcttatccatatcaggtaggatggttaattatgtacccctaccaggtcctgggcttcagtaagcaagtgactagaggcaaaagcattttctacactgtgcttggaggaggaagacagcatgacgggtagacacaggcagagcaactggggctatagactagcacagcagtggcaagccccaaccatgagctgcagtgaccttgaccttcactggtcctgggccccctaatcctgggggctttgaaaacaggacaggagaaagtcccaactgtggcctggcccagggccagggctgcgggttacacattaacgcttgatggaaagagccagccactgtcagccagggcctcccaccccagtgcccagcaggagcttctgcaggctctctccacccccgccctcctggcacacccacacctggctcccttatgccacccacaccacctctctgtgcttccaggcacagccactttgctcgctgggccaggcagggcggtcgctggcaactggaaatctgtccagcgctgcatctgggggaagcgaggtgcccagccccctctcgcacatccctggggaagcggctgccaccggccttgagctttacccaggcagggtctggggcccctgatgtcaggcttgagggatagacaaggggctgggggctccctaccctgtttgtgcccaagtcaagccccacttaccagccagcaggacagtcagatggcagaaggtggccaagcggagcagccacgacagagatatcggagccatggctgagggtgggcaagagtcccggcgggggccaggcaggcggctagagccaggcggcagagctcagtgctgtccccttgccgccgccagagatctgtggctttttataatggggttggctgcctccgcctccagcccccgcaggcaggagggtgggaggggagaggaagggagccagtgtgcagccgctggattcctcaggatgttgccaaggaaccaagccggctttgtgtccctgggcttctcaccatcctaggcttgtcatactgggaccttccccgggaggctggactgggcctgcctgggtacaaaggcctcctctcctgccacaagctgggaacatgccctaggatctggcctggggcccttgatcctaagtgggcaacacacaaaaggccagcaggccgtggaatagagagcggggcgccaaggggccgggagagactcagggcccctccatcctgggtctgacaagctcttctttgatccagagaatgcctcgcccacatcaggatggacccctaaatttcccctcttagaatcccaagctcctgggggaccttgttgatctatgcatctccagagcccagcagggagcctgaagtcagcaggggcttggtgcagggtctgctgaaagaaggattgagtccaacttcatatggatagatggggaaactgaggcccggagccaccccaggttatccacagcatcagagtggagaactcccctcccaccaccatgatgagcagaatgtggacagctcaggacccaggagagagccctggcctccctgcctccacctcccggtctcccgctccctgctttgcacccactcccacctctgctctggcccctgttagcccaaagaacaaggtggctgccaacccatccccgataactctgtggctcttggctcctcaactctgtagccgtggcttggataaggcttgcctctcgtggggcctgagttctctatctgcccaaagagagcattgggctagtgcaatggggagagggcttcccagcaccggccctccaacaggctctcaccgaagggtgcagaggcttgccagccttgggagcacattagaacacagtctgccttcatggcagccttccctaaaggcagtggcaacaatccctgagactccagaagagtcagcagctctgccttggtataggactgagctgtactggtgtctccaggctgccaatctgagggaaaccagttgtggagccagcatcccacgctatgagccagttgggctgggcagaggggccacagatcccaaggccagggacctctctctcctcaaccacccccccccgcccccccacccaacccaatgggctgcctggtgcatggggttaggggttaggaggctagatacttcttgaagtagcggaacacccttggcaggagccaaggtccactcatgctcagagaatctgtcctggcctgtgcacatgggaagctagtagccttctcattcccaatgtccaatccctctttttataactggtgaaactgaggcccagagagggacaaggagggataaaaactgaggtcgtgttctttctgctctgttcatgtaagaacagaggaggaggccgagtgcgatggctcacgcctgtaatcccagcactttgggaggctgaggtgggtggatcacctgaggtcaggagttcgaggccagcctggccaacacggtgaaacctcgtctctactaaaaatacaaaaattagctgggtgtggtgcacacctgtaatcccagctacttgggaggctgaggcaggagaatcgcttgaacctgggaggcagagggttgcagtgagccaagatcacgccactgcactctagcctgggtgacagagtgagactctgtctaaaaaaaaaaaaaaaaaaagacattttcttaggttcaccagccaggaaatgagggatcctggattcgtcccagccagctggctctgaggtctgagctcaagaccagtagggtccaccacctgcctccaccctcactgcgaggaccaatgtgaagactaagtgagtttatgtccatagg

SEQ ID NO: 1242807 - DNA, 4001 bp, Homo sapiens
gtagctgggattacaggcgcccaccaccaggcccagctaatttttgtatttttagtagagtcggggtttcaccatgttggtcaggctggtctggaactcttgatctcgtgatccgcccgcctcagcctcccaaagtgctgggattacaggcgtgagccaccacacctggccgggaaagtacttttttttttttttttgagatggaatctcgctgggtcccccaggctggactgcagtggcgcaatctaggctcactgcaagtgccacctcccgggttcacgccattctcctgcctcagcctcacgagcagctgggactacaggcgcccaccatcacgcctggctaattttttgtatttttagtagagatggggtttcgccgtgttagccaggacggtctcgatctcctgacgtcgtgatccgcccgtctcggcctctcaaagtgctgggattacaggcgtgagccaccgcgcccgaccggaaagcacttttaaaagcataaaatgccatacaccatacaaatgcaagaagttagtaaattctgagtttgttaaattattgttcactattaagatttattaaaaataatgttctttgggggaaacttttaaattttaaaagtttttagaattaaaagtcaggatgcagagatttctcttttaggccccaaattaatcgaaaaaatatttcactagtatatttgcttcagagaaatagaagtgaactttcacaagtcattaatctattgctcaaaataaaatgatcacacacaaaccgaaaatcaaagcttcaaacatacacacaccgaaaatcaaagcttcaaaccaatctttagcggctgcatatcactagttgcctggggttgggagagaatgactgcaaagggaaaggaagctttttagaatgatggaaatggtttatgtcttaacatggatgaatacatttttcaaaactcatcaaaatgtacattttagataggcacaatttacgtatgtacattacacctcaataaagttttaaatatttagaagtctatcctgtttccttaaaaaaaaaattagttgcaccatggtctcaaaaataatttttaaaatgagatgtaatgcaacagacttgaagattaaataaaacagtcttgaatatttaagaaaaatgacaaaacatgagtcaaaaacaaaaaaaaagggttgatttatgagtttctggcctcaaggtcaactcagattagggggaaaaaaaaacagtggaggcataatcaagatggggaagcgtgtggagagaaatctcagcttctactctagaagacgaaaaccaaaaccggtattacttcagaaggcacactggaaaagcacagatgtgggtgcacttcagacctaggttcaacggatctaagctgctaactctatggccctgagagtcctcaacctgtgagcctcagtttccctttctgtaaaataaagataatgatggcttagagtttagctgagcacacagcaaatgctcgacacataagtaatacatgatattacataaggcaccagaactcggagctgactggaaatgcatgcaaactaaagccctcccccaatcccaccccagtttccctctgagggtcgtgatccctttcttacgccttatcgcccccagccaagcctcccttccttcccacatacactccacacagccttttcacccctcgccccagcagcttcagaggcctcccacctcccaggccccacctcgttgaggaagcgggtgacatcgtagactcgcccatggatcacaagccacagttccttcaaggagttgcgctttgccacctcctccaaccggtaataggtgactgaggtctcgacttcctgccctttcccatcgctgccgctagcttccgcagtcgccattgaaccggacatactgcctctccaccgctaactgagattccgcgactactttccttgagagcccgcgctcagccttcctcggcttccgtaaccagggcccataaggccttgagacggttcctagcaacagccaatcacacttccgaatagttcctggttcgttttcttttcaccaatgaagggagtggctcagttcgaaatcccgcccactcctcgcccgatcctccagatgaaagtctggttcgaggtccaactaaccaattagggtcgttcagccccctccaacctcgccaatcagataccgcgatttttggactggcgcccaaaagaggcgtgctgacaggtgtcacttcaggagaggtaccacttctctcagcctgtgggcctttagggtctccagtgttctgcttcccttcccatcgctgtggctttctcctgagtctcagaaagttcctatcccctacactaccggcgcagcctgtatcccaaccctgattttacatctttgctgcctccaggtcgtgatctggccaatcccgtctctcctcaatttccccatcagtaaaatgggcttgataaagcactctcttacagaggggtttgccttttttttttttttttttttttttgagacaagttctcgctctgtctcctaggccagagtgcagtggcacgatctcggcttactgcaaactccgcctcccaggttcaagcgattctcctacctcagcctctcgactagctggaactacaggcatgcgccaccacgcccggctaatttttgtatttttagtagagagtaggtttcaccatgttggccaggctggtctcgaactcctgacctcaggtgatccgcctgcgtaggcctcccaaagtgctgggattacaggcgtgagccaccgcgcctggcccggtttgcctattttaatgagagtgcctgtaaagcgcttggcgcatagtaatcgctaaacatggcagtcgattagaaaggcaattgctgtcccggacagcaattgggggtagaatgtggagtatcctatgtttctaccatcattcagaatccgattttcaaacgaattctgtgatgatcaggatcaatcggcactattttagtctctacgtgatctaaaatagaattgaactcaactgctctccgctagaggtcccagcactttggaattccaagtttggttaaggtacagtgttgtgcgccactttttaactgccattacaactgacagattgctcttcctatgatgtcgtcgttttcatcctgtcactctcgcagtctaccattcagggctctccacaatccattcgcaacctctttcactaacgtataatattttccaccattccctttataagcctgttgcacccgccccgactctgaaacctgctggtttaaaaccacatccgtggtcatcccaggtccaccaagttaattttagatcacttagagactaaaatagtgcagattgatcctgatcatcacagaattcatttgaaaatcggattctgaatggtggtagaaacatgggatactccacattctaccctcaattgctgtcccaaggactcctcttcctttcaatgcctaccggcttttcaagttcctcttcagtttcttctattttcaaacttctcctaccgttttgagctccagtgcttccatccctttgtagtacctaagaaagcatattactattttgggaagcctgctacgtctgtaaattttaactttacgtattttacctccctagttagactgacactatgagagcaatctcacaagattcttaggatcctccacaaactctagattcaaatatttacatttattccagacatttactatttactgttacaagtcttatgataggcattgggagtagagagataacataagaaacaaaatctctgaaagaaataaaaacatttacaggctgaatgtggtggctcaagccccgtaattccagcactttgggaggccgaggtggacagatcacttgagcccaggagttcaagaccaggctgggcaacatagtgaggctcttgtctcttcaaaaaatacaaaaattatctacgcatggtggcacac

SEQ ID NO: 1242808 - DNA, 4001 bp, Homo sapiens
ctgccaccatacccggctaattttttgtatttttagtagagacggggtttcactgtgttagccaggatggtctcgatctcctgacctcgtgatccgcccgccttggcctcccaaagtgctaggattacaggtgtagccaccttgccctgccagccattctgtttttgtctccacatggtcttgttggaagatttcctatccttggtttgagcccagctacacattaactctctgggtttgtctgtctgcgtcggaggaggggagggcagtgtccttgagtctactcagccaattgtccatgcatctttggggaccgtcctggtcccgagcctgccatccgaaagagggtgcaaagctgccgctggtgccaccagggaggtctgaggacgtattctggcacccagccacatttacagagcacctgctgtgtacaggggggactctttgtcaaggccctgctgtctccgggccagctgcctcctggggctgcacggtctggaaggacctccccaggcaggtggcatttgaattgagaaataaatgagacagccatgaggctctgcagaagcagcagcttgtgccgaggccctggggcacgctcaggagatctaggaacagaaaggaagcacggcagctggaggagggggccggagagccgggaggccagggcgggcagtgcagggcgtccagtctggctctaactcttcgggccaggagcccctggagggtttcagcaggaggccagactagagcccaggtctcctggctcccagctgggtgccctcagtccgtctacttcctgtagggagtgcggggcaggcagggtgagtctcacggggcagctctggggagagctgtctgaactgacccaccgacttcttggccgctgactcgaagcaggcggtcactttcctgggcacaggacaggctgcagggccccgtcctccagccctcccaccctgaggtctctgctcccactccagctgccacgcaccctccagacaacagggagggcgctcagagccccaggggagtggtggcagcgggcccctcctcctcaccctcagcccccaggcccttcccaggcactcctcccccggtgcaggtccttcctggagctgctgcagtggtgcctctgccctcagacctcgcctgagcccagcctcacccgtgctgggccagacactccctggccctggtcccgagagggtccatttccaaatggagtccgctgccctcaccagaacctctgagcaaatgcacaggagggtgactgggggctgtgccatcccaccccaagagcaaagtgcctgtgcagctgggctgggcagggccgtcactgggtggtttcggcgccttgtgaaatctcagaccgcctccagcgcagactccagatgagaagggctgagccccagggcatgagcccattccccaccccaagcccagggagagcgacctccaggccagctggctaccgaggggcaggggagcttctcccgatgcccaggccggagcccccactcgggggcttcggggcggtgaccccggaaaccaccggggctgaaccgcctcttcccctgcgctgcaacttcctccttcgcggagtcgggggaccgagagaagggaatgggggaggggcgccgcgctccgcagggtctgcaagggaattactgggggtctcagaactcctccttccagcccgcggcctgagggtcccgcccccgttccccgcaccctcctggcctgaccccggcccggcctggcccgcctggcgccccacttccccaccctgtaagtagcccgaggtcccggctggggtcttgggacacccctccaggctgcagcctccaccgtccctgacgtgcactcactcaggccggacgccagcgcctgttcgttggcccacatggcccactcgatctgccccatggcgacacgaacccggctgggacactgctaggcgcgcactgccgcccctgcgctcccggccgaaccccgccccgcccaggccccgcccccagccccccaggtgaccgcggctgggcggagacccgcatctgtagggtgcagggctgtcccggagccttctgcccccgccctctctagccacgccgaggcataggaggggccctgcccggcagccccagcccaggcggggagttcctgcgcttccccagggcttcccaaacttcagctctcaaacactgacaagtgcccctgcccaatgctccggacccaaccgagggtcccgtgtcaaccaggcgtctattaatagcaggacaaggtgtgaaggtcggcttcctgagcaaatcggcctctccagagccttggggggtgggggagtcacccctacagcccgggaacacctctgcaccctgatgctaccaaggacaagggtggcctccccatggggaccagaggcccagcccccatttcctccccctggctctgggctggcacaggcgtggcctgggtcagacactgcagggggcctcccgtcaccaggtcactgaactgtgactgagactcgagggaggggacaggatgtgtacaactgggaaagcacagaatgcagggacggccccgtcacgtccggcctgggtacgggaggcaggggctggcgtgggggtggtgagcccagcgcccatgggaagactttagacctggggttgctcctgagggtcccacctgagccaatgtggggtttgaggggagcccctctgtggctctgcccagcctgcccctcccccaggccctcatggggcacacctggactccctgacaggtgccagggtcactcagagcaggaaccccgggatgctggtttacgaaacagaaaaacggcggaggccggaggcagcaatgctggtttattccccatggccaccggggccgcactggtgcccactcctgccaccattccagccacacccaggccgtgggcagccaccctccgagacacctgggccgggggcagggtctcagcagaagcgccgtgggcagccaccatccgaggcacttggtggtttcctgaggcccaaggaggctgctcccagcacggtgaccccttccctggtccgctggagggaccacctccccactgagctcctttctcagagaactgggcatagccagagctggggtgagaaagcccttcagccctgctgcaccgaggctctgccagttctcataccccctccccatcccatcttggcaaagcgctggtgcagcttagggcagctgaagcactcggcggggacctctcctgacacctgggcggccgcaggactccctgcactgccccacagcaagctgcccatgggcccggggtcaagccaccacccacatgtcccaggagtccggccagcccaccacatccgctccctagctccggcgaggccaccccttctccaagcggcatgcggtccctgctgaggcagtcaggcagctggcttcggcaggccgtcaggacccaggaggtgggcgcaggggtcatccaggatttgaggccctggccccacctggggatagaaatccatgtcaggtcaccaggaatggcagcgcctcatcctgtgcccagcatctgtagggccggacacaggagggtagcggtgtgcccccgcccttcctgtgggtcctggtcagaaggtaaagcgcctgagtggtgacacccacacgcagctcctgcaggcacagccgcccctgccagctgcgagccccctgccctgggcactgcttctgtcacaggggggacagagaaccacagagcctgggaacaggcagcccctgagaggaaggtggcggcaatggcttgggcggccgtgatcactggatgcaagcttggccctcggagcaggtcagagggcaggaactccggtctgctggggtggttggggtgggggggtcccagggaccccagcagcccccaccccaggcgctccctattcaagggtctgatactccccacctgtctccctgggagcctgtgtcagactcaccct

SEQ ID NO: 1242809 - DNA, 4001 bp, Homo sapiens
agcctggcatatgctaggcactgaatacagagaaatgaatgaaagactcaagtggtaacagtgaaaacaaaattgcatttcctcctcctgtttaagggattaaaccaagagaaagagaagagaaaaagactcaggaattgggagtatttaatgaattttgcctaaaacttcagtaattctctagataaaatgaaatcatgctaaaccacttcattgttatacatataagaagaaacaaatacggaaaatttcacaattacgaaaccaagttgttttgaggtttatttgatactagcttcctacagcctcaactagcatgtatgatgcttataaattctgtacaaccaatgaaaaaaaaactaatttaaatcatagtgtgaaaatcaggaacaaaatactaatagtttgataaacaacataactattcctttctctctccctgtgttggagacttccttaaatcaaacaaaaccacagtttaggtgtgccagactataaaaatcattgctgcttaatgttagttgtgctttatataacaagccttatctgcttctcacaaaagttaccacccagaggaaggtttatttgcaagaatactatacaattttgcagcagaatattagagaatgttctgggtgttacttcaataagaatttccagcaaatcattttctcctaatactgttctagttcaaatccacctactgctcagtggggaatgggaggctaaattcttaaggccattcagtctacttggggcgtgagggggtgtgtagaaagccaacaatcaaacgaacaccctctcaaggcctgggtgcttctctgagagccaatgattgcaaaatgaacaatcttattaagatccctaattagcccgaattcaaaagcaaggtaggcatgctccttagctgagctaaggataaaactttccaggaaaaattgaggagaagaaggtggcagggatgatgggggctgggagactgcaaggccacaggcttggtggctggaagatgacaactatcctaaaacattcaaatgccaaggggtggaagagaaacgatgccaagtacatgaataaccggcagctgacccagctgagtaccaaactcaacaccatctcctgaagatttcatgacttcgcccccgccccccattcgccccccacccccctcgattgttaacatgaaagaaaaacataaagaaagaatacctgtcacagcagggcgcacctttcaactaaggaactccgggtggctgtgtagaaccatcctcaccctagaaagggggaaactgaaagaaaaagcagaacacgccattaacaaggccagaaccccgactgccattcctggacgggagccaccaacacccgcaaaatcgatcggtacgtacgccccgcggcgcggtcggtaggaatcacagccccgggctcctgaggccaaccgtggccgtcggggcccgccagcggcctgtgcctcagtctcccaatctgtaaatggggtggggggcgggagggggacagcgtcccgcgcggctcccgccccaagtcctctctcctctgggggtcccgatggtggcgaccccgcacgctccccggactcgcagccctcccgggaagcctcgggggatggggaagccccggtgggggggggaaacccgggctgacgtcagcgggctcggcaacccgcgggcccggccggctcgggcccgggcaactaacgggccggcgccgagggcccgatggtcgccgcggcggctccggacgccctgaggccaggcggctgcgccgaggggatccggccgcccgccggccgccagccgcccgctcattcactaacctcgggcggcggggcgtcgcccctcgccccggctccccagcccgcgtcccgggccggccccggctccccacacccaccgccctagtatttacctccgacgcgcggcccccgcgcagccaaacctgctacctgggcccgcccccacctgccccgcctccgaaccgcacagggaagagggagggagcgggggcggagggggcagccgccgcgctagccaatcgtaggccgagctgcgctcctgagcgggccgtgattgggcctccctgtgacagaccttcctccaatggctgccagcccggcgccggccgaagggactttccgctctgtcaagctcggtggaaccaaagggaaagcgaaggggcggggcagagaagagcggcggatggaggcgggaagctcaagctgattgggcgaaaggctgtgggtgccgcgtcaccattggctgatgctggagccggggcggggcgctgcgctgccaccagctccgcctcccgtgctcccgcctcagctgtcaaaactgtagacgcttaggtttgggctgggttaagagtccagatgaaggttgaaataggattccaggatgccgtgagagagcaaagctttagaatcagacctcagtttgaatctttggcgctttcattcagtggctgcgtgacctgaggaagtcacaaccacgctgagcctcaatgtcctcatctgtaaaatggagatcatagtatcggttgtcttacaggattgtggcaaaataccgagctaaagttcctggcacgcagtaccagctcaggaaaggttcatctcttcctcctccgcagattcagcctgggacgcttgctgtttccgaacctctgttgccacctatcccagtttggagggaattttcccaaggatggtgaagaagggatttccacacgccgcctcactcagccccgcacccctggccaccagccaggacttagggtgtagttaaggatctttcaattagaagggaggcttctgattcccaaaagcactcaaaatatttaaggaagtgctttttataatcagtcctagagccttgctgcactggatactcctgttaattaatttcttctcctttgacattttaagtgctaattataggagaaggtgattaacactgagaaaggaggaggggtgtgtgtgtgtgtgtgtgtgtgtgtgtgtgtgtttttaatcatgacacaaatttcccccagtggaaagtgacatgtttctggagatccagggaatttaaaccaatgaatacataaaaacagtcacatgagtgatgactaacagtagcagtagacaggccaccactcttccttgccatagtcatccaaaatgaaatgagcatcttttgaaaacctaagcctcattctactcctgtccctcttttgtcactcctatcttcctgttttccaggcttcatgaccacactgctgtaggaagccataagttggaaatcaacgggcctggcttgaagtgtggccttaggcaacaccgttctcatctacatctggattctccaacaaagctggtaggactcagaggtcacagtccaactgtctggaagaaaatttcagctgaaatttgtttttgcctaacccatacgataaggaggaaggagaaaagaatgtgaaggagagagatttggggtccttttaggcaaggcaaacattctcatgttaccactgggaccacttctcttatctgcacgatctacatccactggtcccttaaggcatctgagtttgccactctggactagaatattttcatgtcccttctttttgtttttgttgttgttgttgctggggtgtttgtttgtttgtttctttgttttgagacagagtcttgctctgttgcctaggctggagtgcaatggtgcgatctcagctcactgcaacctccgcctcccaggttcaagcaattctcctgcctcagcctcccaagtagctgggattacaggtgcctgccaccacacccagctaatttttgtatttttagtagagacaaggtttcaccatattgaccaggctggtctcaaactcctgacctcaagtgatctgcctgcgtcagcctcccaaagtgctgggattacaggcatgagccaatgtgcccggcctatttttgtgtcctttctgttgatggtgtttggtgctgctga

SEQ ID NO: 1242810 - DNA, 4001 bp, Homo sapiens
gccactccactgccaaactgtgaattccccaagtccttcatttttatattatccagtgcccacacgagagcctggcatatgctaggcactgaatacagagaaatgaatgaaagactcaagtggtaacagtgaaaacaaaattgcatttcctcctcctgtttaagggattaaaccaagagaaagagaagagaaaaagactcaggaattgggagtatttaatgaattttgcctaaaacttcagtaattctctagataaaatgaaatcatgctaaaccacttcattgttatacatataagaagaaacaaatacggaaaatttcacaattacgaaaccaagttgttttgaggtttatttgatactagcttcctacagcctcaactagcatgtatgatgcttataaattctgtacaaccaatgaaaaaaaaactaatttaaatcatagtgtgaaaatcaggaacaaaatactaatagtttgataaacaacataactattcctttctctctccctgtgttggagacttccttaaatcaaacaaaaccacagtttaggtgtgccagactataaaaatcattgctgcttaatgttagttgtgctttatataacaagccttatctgcttctcacaaaagttaccacccagaggaaggtttatttgcaagaatactatacaattttgcagcagaatattagagaatgttctgggtgttacttcaataagaatttccagcaaatcattttctcctaatactgttctagttcaaatccacctactgctcagtggggaatgggaggctaaattcttaaggccattcagtctacttggggcgtgagggggtgtgtagaaagccaacaatcaaacgaacaccctctcaaggcctgggtgcttctctgagagccaatgattgcaaaatgaacaatcttattaagatccctaattagcccgaattcaaaagcaaggtaggcatgctccttagctgagctaaggataaaactttccaggaaaaattgaggagaagaaggtggcagggatgatgggggctgggagactgcaaggccacaggcttggtggctggaagatgacaactatcctaaaacattcaaatgccaaggggtggaagagaaacgatgccaagtacatgaataaccggcagctgacccagctgagtaccaaactcaacaccatctcctgaagatttcatgacttcgcccccgccccccattcgccccccacccccctcgattgttaacatgaaagaaaaacataaagaaagaatacctgtcacagcagggcgcacctttcaactaaggaactccgggtggctgtgtagaaccatcctcaccctagaaagggggaaactgaaagaaaaagcagaacacgccattaacaaggccagaaccccgactgccattcctggacgggagccaccaacacccgcaaaatcgatcggtacgtacgccccgcggcgcggtcggtaggaatcacagccccgggctcctgaggccaaccgtggccgtcggggcccgccagcggcctgtgcctcagtctcccaatctgtaaatggggtggggggcgggagggggacagcgtcccgcgcggctcccgccccaagtcctctctcctctgggggtcccgatggtggcgaccccgcacgctccccggactcgcagccctcccgggaagcctcgggggatggggaagccccggtgggggggggaaacccgggctgacgtcagcgggctcggcaacccgcgggcccggccggctcgggcccgggcaactaacgggccggcgccgagggcccgatggtcgccgcggcggctccggacgccctgaggccaggcggctgcgccgaggggatccggccgcccgccggccgccagccgcccgctcattcactaacctcgggcggcggggcgtcgcccctcgccccggctccccagcccgcgtcccgggccggccccggctccccacacccaccgccctagtatttacctccgacgcgcggcccccgcgcagccaaacctgctacctgggcccgcccccacctgccccgcctccgaaccgcacagggaagagggagggagcgggggcggagggggcagccgccgcgctagccaatcgtaggccgagctgcgctcctgagcgggccgtgattgggcctccctgtgacagaccttcctccaatggctgccagcccggcgccggccgaagggactttccgctctgtcaagctcggtggaaccaaagggaaagcgaaggggcggggcagagaagagcggcggatggaggcgggaagctcaagctgattgggcgaaaggctgtgggtgccgcgtcaccattggctgatgctggagccggggcggggcgctgcgctgccaccagctccgcctcccgtgctcccgcctcagctgtcaaaactgtagacgcttaggtttgggctgggttaagagtccagatgaaggttgaaataggattccaggatgccgtgagagagcaaagctttagaatcagacctcagtttgaatctttggcgctttcattcagtggctgcgtgacctgaggaagtcacaaccacgctgagcctcaatgtcctcatctgtaaaatggagatcatagtatcggttgtcttacaggattgtggcaaaataccgagctaaagttcctggcacgcagtaccagctcaggaaaggttcatctcttcctcctccgcagattcagcctgggacgcttgctgtttccgaacctctgttgccacctatcccagtttggagggaattttcccaaggatggtgaagaagggatttccacacgccgcctcactcagccccgcacccctggccaccagccaggacttagggtgtagttaaggatctttcaattagaagggaggcttctgattcccaaaagcactcaaaatatttaaggaagtgctttttataatcagtcctagagccttgctgcactggatactcctgttaattaatttcttctcctttgacattttaagtgctaattataggagaaggtgattaacactgagaaaggaggaggggtgtgtgtgtgtgtgtgtgtgtgtgtgtgtgtgtttttaatcatgacacaaatttcccccagtggaaagtgacatgtttctggagatccagggaatttaaaccaatgaatacataaaaacagtcacatgagtgatgactaacagtagcagtagacaggccaccactcttccttgccatagtcatccaaaatgaaatgagcatcttttgaaaacctaagcctcattctactcctgtccctcttttgtcactcctatcttcctgttttccaggcttcatgaccacactgctgtaggaagccataagttggaaatcaacgggcctggcttgaagtgtggccttaggcaacaccgttctcatctacatctggattctccaacaaagctggtaggactcagaggtcacagtccaactgtctggaagaaaatttcagctgaaatttgtttttgcctaacccatacgataaggaggaaggagaaaagaatgtgaaggagagagatttggggtccttttaggcaaggcaaacattctcatgttaccactgggaccacttctcttatctgcacgatctacatccactggtcccttaaggcatctgagtttgccactctggactagaatattttcatgtcccttctttttgtttttgttgttgttgttgctggggtgtttgtttgtttgtttctttgttttgagacagagtcttgctctgttgcctaggctggagtgcaatggtgcgatctcagctcactgcaacctccgcctcccaggttcaagcaattctcctgcctcagcctcccaagtagctgggattacaggtgcctgccaccacacccagctaatttttgtatttttagtagagacaaggtttcaccatattgaccaggctggtctcaaactcctgacctcaagtgatctgcctgcgtcagcctcccaaagtgctgggatt

SEQ ID NO: 1242811 - DNA, 4001 bp, Homo sapiens
tctagatttggttcaaaccactaatgaagggaggttggtggtagtctggagaggaggctgtgggcctgggggctgggatgtcacacatgggcctttgtcccgccgttctctctacttttgtaaggttttcaaaagtaagtgataagtaatgacagagtcaccaatgtgtgatctcatgaggttccacaaagtaggcatcactggccactttgcagacaaggaaacaggagttggtgtcaagagcgtgagccctcagaggacagggccctgtcttcccactaactccccaccccaggcagggtactgcacagagctgcgacctgtaggtaaatacctgtgcactgattgagtcaggtgtctgaagcccccagccagtgactgatgggctcagaaactgaacctgctttctctgccttttaagctgctgggaagtcctccttttttcccaaaggaggagggaaaacatattaacctccactcccaaatgccttgggctcccacagccctgcaggggaagcagaactgtctccactgacagaaatggaaattgaggctcacaggggcctgactgcccacagttcacagctggaaacagctcggagacccccaagccctcactcccaacctccaggcttcctatgtccacaaagctgctactgggaatacccaggagcctgggactatcagtgttaagaaagagctctggtccctcccacaaatgacaaatcaaaacccaaacccaccagccctggggcatttgtccctataccttggactgcagatacacagggtgggtggacctgctcctcccggggacagcccttcgggctccagaggatgccactgtgtgcggctgggggactgagaggttcccatgtagttccagagcggcaggctggcctgcctgtgccctcaggcacctgctggctccctggaatgggagctctaggaaaccaggaggtggtgggcttggctgggcaggtggaggagtctgcagtttgcatccaagttcctacctaggcaaatggaaccccgaaagcccttttggaaaagtctctgatcgggaaggggggaggttctgagagctttcttcccgttaccgactccaaggtcctgcagtagggcctccaccatcagggcagggagcgctccacgcgcacctaccctccccgatgagcgtgcgcctgggccactcccggaccagccacccttgcagctctggagtccccggcaggccgcgcccgtgcatgccccacatccccaagacccatctcagcccctcgcccctggcaggatccctgcccgcgagtctacggccctcgccccccgggactcgcggctgggcgaacaaagcggacgcgcttgcaagcggccagcgtcgccctcacgccccaccgacagggaccccaaactccagccccggaacccccctcccccgctccccgggtcaccggctggcttggctgggagggggctcaggacgaaactccgggccacccaccaaggagcgtgccgggcacggcttcccgggccgggagcgcagagaacaagggggcggagactcggtccgtgtgcccccagccccgcgcggggaccgcgcccgggaggtgcccctggcccgccggacgaccccgagctgccaaaggggtcttcgcgactcccgggagcggcgaagggtgagccctggggggaggggctgcggctcgctgcggggaagcgctgcgcgggggtctcgggggctggggctgaactcacctccggtgccggcgccctccgggggctccatgcggccggtgcggtctgggaggggcacgggcgacggcggcgtcgcctggcccgggcgccccaacagctgcggcagcgactcggccccggctccgggcgcagcgcatcggggcagcaaccggggggccgcggcggcagggaggagcccgcggggcggggcggggcgcgcagctgctcccgggccccggccccctcccggcgcccccccagccgcaggacaggtgcggccccgccccggcccgcgcgcgccccctgctggcccctggcccagcggacccctcccccgccgacccttccctcgcgggccgcgccccgccgcggacaccaccgggacctggctgcgccctcccgaccccggccgggcgtccggggctcctgcgcactcacttggcggccgcgcccgctggcgtcctcttgttctcttccaggtacttgcgtgtggggcgccgactgtgtgcgggcgcccctcggggctggcgaggggcacaggaggggcctgactcgcgctgggtaatgacagactcacagagcgccctggatggcgcgaattaacgcggggggcgggtgggggcgagggcgtgtgcttgggaggctggaaggggcgggatgggggatgggaggtaaggagagggcggcgggcccgggctgcagagagcgccaaggcagtttcgatgaaactgacccccatgtccctatcgcccagattcagcgattgccagctcctggcctgggccactgcttctctgtcctcattcacttccctccactgctgggtcattttgaagcaaattatatacacattagatcattgcatttgtaagtacttcaatatttatctctcaaagaaagtccgtttgcaggagcattgactcatgcctgtaatcccagccctttgggaggctgaggtgggagcacagcttgagctcaggagtccaaggctgccgtgagctatgattgtatgtctcaaaaaaaaaaaagaaaagaaaagaaaagaaaaagtctagtcttcataaacactcttgttaacccagcatccaggccttcactgagttgatgccgtggcctgaggcggtttacctggtggatagtgggtggcaggaagcatcagacatcagacagagggcagtcggtttgtttgtattaacatttgctctgggattttgcaggaaactcagatgccatttatctgggtttctgagctgcacagcttgacactgaatgaaagtatcttaagccacatatgtgaagaaaaggctcttttctaaaaatctgaactcgaattcaatatgaaaagaacaggtcgcagtgggccctgtcgggatcccagggagccgcaattcagggctccctgaatgattcatctctgcagcccacaccgacagaccaggattgctcttagcttgtgaaaaatgagtaccctgtctaggctatcctgagctaaccctcctattcttgccctttttgctgaaaggaattattgttaatacagctatttaattcaggacactcatccagacttctgaagcaaaaagccaatcagcatgaagctgctagcatattggttttgtgaagtaagtgttaaattataataattacccccactgtgctctccagcgtcactgtctgaccaccctgtcccagggggaggaggcccctctcaggccaagggagtctggcacagtgatgctggctcctggttgcccaggcacagtgaccagccagacttcacagaggcctcagggcttactataaataaatcactgctttgtgcaagctgagccaatgcagttcttccaactggctgctcctctccaagaacaatcaggacttaggtgggcaaacaggaagtctctcatcacagtggttctcagattcccaccactgtgtgggtgcctgaggcctgagcaaacccagctcatgtggcaacttcctcccccagctggacaggaagacctaggtccaccaggccttctttcatttctcacactttgcccccagcacaactttctacgagcatggattctgtactcttcatccccagacacatgggagaacaagatctgctacaagaccttttctttttttttttgagacagggtctcaggtctcattctgttacctaggctggagtgaagtggtgtgatcttggctcactgcaacctccacctccagggctcaaacgattctcccacctcaacctcccaagtagatgacca

SEQ ID NO: 1242812 - DNA, 4001 bp, Homo sapiens
agttcacagctggaaacagctcggagacccccaagccctcactcccaacctccaggcttcctatgtccacaaagctgctactgggaatacccaggagcctgggactatcagtgttaagaaagagctctggtccctcccacaaatgacaaatcaaaacccaaacccaccagccctggggcatttgtccctataccttggactgcagatacacagggtgggtggacctgctcctcccggggacagcccttcgggctccagaggatgccactgtgtgcggctgggggactgagaggttcccatgtagttccagagcggcaggctggcctgcctgtgccctcaggcacctgctggctccctggaatgggagctctaggaaaccaggaggtggtgggcttggctgggcaggtggaggagtctgcagtttgcatccaagttcctacctaggcaaatggaaccccgaaagcccttttggaaaagtctctgatcgggaaggggggaggttctgagagctttcttcccgttaccgactccaaggtcctgcagtagggcctccaccatcagggcagggagcgctccacgcgcacctaccctccccgatgagcgtgcgcctgggccactcccggaccagccacccttgcagctctggagtccccggcaggccgcgcccgtgcatgccccacatccccaagacccatctcagcccctcgcccctggcaggatccctgcccgcgagtctacggccctcgccccccgggactcgcggctgggcgaacaaagcggacgcgcttgcaagcggccagcgtcgccctcacgccccaccgacagggaccccaaactccagccccggaacccccctcccccgctccccgggtcaccggctggcttggctgggagggggctcaggacgaaactccgggccacccaccaaggagcgtgccgggcacggcttcccgggccgggagcgcagagaacaagggggcggagactcggtccgtgtgcccccagccccgcgcggggaccgcgcccgggaggtgcccctggcccgccggacgaccccgagctgccaaaggggtcttcgcgactcccgggagcggcgaagggtgagccctggggggaggggctgcggctcgctgcggggaagcgctgcgcgggggtctcgggggctggggctgaactcacctccggtgccggcgccctccgggggctccatgcggccggtgcggtctgggaggggcacgggcgacggcggcgtcgcctggcccgggcgccccaacagctgcggcagcgactcggccccggctccgggcgcagcgcatcggggcagcaaccggggggccgcggcggcagggaggagcccgcggggcggggcggggcgcgcagctgctcccgggccccggccccctcccggcgcccccccagccgcaggacaggtgcggccccgccccggcccgcgcgcgccccctgctggcccctggcccagcggacccctcccccgccgacccttccctcgcgggccgcgccccgccgcggacaccaccgggacctggctgcgccctcccgaccccggccgggcgtccggggctcctgcgcactcacttggcggccgcgcccgctggcgtcctcttgttctcttccaggtacttgcgtgtggggcgccgactgtgtgcgggcgcccctcggggctggcgaggggcacaggaggggcctgactcgcgctgggtaatgacagactcacagagcgccctggatggcgcgaattaacgcggggggcgggtgggggcgagggcgtgtgcttgggaggctggaaggggcgggatgggggatgggaggtaaggagagggcggcgggcccgggctgcagagagcgccaaggcagtttcgatgaaactgacccccatgtccctatcgcccagattcagcgattgccagctcctggcctgggccactgcttctctgtcctcattcacttccctccactgctgggtcattttgaagcaaattatatacacattagatcattgcatttgtaagtacttcaatatttatctctcaaagaaagtccgtttgcaggagcattgactcatgcctgtaatcccagccctttgggaggctgaggtgggagcacagcttgagctcaggagtccaaggctgccgtgagctatgattgtatgtctcaaaaaaaaaaaagaaaagaaaagaaaagaaaaagtctagtcttcataaacactcttgttaacccagcatccaggccttcactgagttgatgccgtggcctgaggcggtttacctggtggatagtgggtggcaggaagcatcagacatcagacagagggcagtcggtttgtttgtattaacatttgctctgggattttgcaggaaactcagatgccatttatctgggtttctgagctgcacagcttgacactgaatgaaagtatcttaagccacatatgtgaagaaaaggctcttttctaaaaatctgaactcgaattcaatatgaaaagaacaggtcgcagtgggccctgtcgggatcccagggagccgcaattcagggctccctgaatgattcatctctgcagcccacaccgacagaccaggattgctcttagcttgtgaaaaatgagtaccctgtctaggctatcctgagctaaccctcctattcttgccctttttgctgaaaggaattattgttaatacagctatttaattcaggacactcatccagacttctgaagcaaaaagccaatcagcatgaagctgctagcatattggttttgtgaagtaagtgttaaattataataattacccccactgtgctctccagcgtcactgtctgaccaccctgtcccagggggaggaggcccctctcaggccaagggagtctggcacagtgatgctggctcctggttgcccaggcacagtgaccagccagacttcacagaggcctcagggcttactataaataaatcactgctttgtgcaagctgagccaatgcagttcttccaactggctgctcctctccaagaacaatcaggacttaggtgggcaaacaggaagtctctcatcacagtggttctcagattcccaccactgtgtgggtgcctgaggcctgagcaaacccagctcatgtggcaacttcctcccccagctggacaggaagacctaggtccaccaggccttctttcatttctcacactttgcccccagcacaactttctacgagcatggattctgtactcttcatccccagacacatgggagaacaagatctgctacaagaccttttctttttttttttgagacagggtctcaggtctcattctgttacctaggctggagtgaagtggtgtgatcttggctcactgcaacctccacctccagggctcaaacgattctcccacctcaacctcccaagtagatgaccactttttaagaagatgttaaagatgagagcttagggctgggcgtggggctcacgtgctcccagcactttgggaggccgaggcaggaggatcacttgaggccaggagtttgagaccactctgggcaataaagcaagaccccgtctctattaaaaacttaaaaaaaaaagctgggtatggtgtctcacacctgtagtcctggcttctcaggaggctgaggtgggaggattgcttgagcccaggaggtcgaggctgcagtgagttgtgatcacagcctaggcgacagaaggagaccctgtctccaaaaaaaaaaaaaaaaaaaagcacctgtttatgacaaactcagctttctgggtgacatagatggttgtatgtaggtaacagggtggtttcacggatggcagattcattttagaaattgtaaaatggctagcagttttcagaacaagagattagttagaaaaggaaagtggcagctgtttgttttctgcagggcctgtcgggaagcctctggtttcttttcatccgtgaggagtggggaggaggcctcttcaggaagagcagtttatttttgtgaaa

SEQ ID NO: 1242813 - DNA, 4001 bp, Homo sapiens
ggcctcagcccaccacgcacacctcccaggacgtcccaaggggcctcagcccaccacccacacctcccaggatgtcccaaggggcctcaccccccaaacacacctcccaggacttcccaaggggcctcagcccaccacccacacctcccaggacgtcccaaggggcctcaccccccaaacacacctcccaggacttcccaaggggcctcagcccaccacgcacacctcccaggacttcccaaggggcctcagcccaccacccacacctcccaggacgtcccaaggggcctcagcccaccacccacacctcccaggatgtcccaaggggcctcaccccccaaacacacctcccaggacttcccaaggggcctcagcccaccacccacacctcccaggacgtcccaaggggcctcaccccccaaacacacctcccaggacttcccaaggggcctcagcccaccacgcacacctctcaggacttcccaaggggcctcagcccaccacccacacctcccaggacgtcccaaggggcctcaccccccaaacacacctcccaggacgtcccaagggccctcagcccaccacacacacctcccaggacttcccaaggggcctcagcccaccaggcacacctcccagcccagccctgatgccggcctcacctgctggggactcggtgttgaggttctcgtcgtccgagtcagcaaagacctcggccagctcctggtccgacatgtcggtgagctcagtgaggtccaggaggtcgaagtggacctccagagaggagacgctgctcagaggctctgagggcagagggggtacagtcagccctcaggccctcccacaaggctgctcagagccccgggggtctaggagagagtgtgctgtgtcctcccacaaggctgtgggtgaaccacagcttcctgcaaagcccacaccggcaggatctgatgagtgttgcgtatactcatgactagaaggctttcacttgacagatggtgcagctgaggctcagagaaccagagctgcaagagcctagcacacagcgccggacctagaccccccagggagtgtttggacaggaggtggaccctgctgccttgtctcttgggggagctcacggggtccccatagcgtgcgctgggcagggagcagtacttacgcctcctctccgtgacctgcaggagccccggtgctggtactgggatgcccccgacctcctcctccacaggcgtgtggccattgtcccctgtcccctgggctgggacgcccagcgcagcctgcggcacctcagcctccttaacgatctctgcatccaaagacacagtgtcaccttgagatccacagggctcccacatccccccaggacgcggggctgggtgtgaggacttggcacatccagtcctttgaaactctgggcagtgaccagcaggtgatgggatggctgggcttgtggcctcatgcctggacccagacaaggggttgaggggcttcaaggaggctgctccttccccttgggccctggcctcccctagtgaacaaggaatctgagatccagatcacctttggtacgcaagcacccatgaaagccgaccatgcaggcgtggaagtcccaccagggcccgcgtggctgcattccagtgccgtcctggcctctgatttctagctcggcccagggtcccctgaaggatcgcccatggatttccatgtccagcctcttggtccccttcaaaccagaacagcccctctccactgtggactgacttttccttttaaaaactgatgtcgtatttgagttcagaataatacattctcattaaatgaaagttacaaaccaggaggaataggcaggcctgccattctgtgatcccttagccaccaaccatgcctcacagttgagcaaatattcttccaggtttctcccatgtttatttattttttttagatggagtctcgctctgtcacccaggctggagtgcagtggtgcaatctcggctcactgcaacctctgccccttgggtttgagcgattctcctgcctcatccccctgagtagatgggattacaggcatgcaccagcacgcccggctaatttttgtatttttagtagagacggggtttcaccatgttggccaggctgaactcctgacctcaggtgatccgcccgcctcagcctcccaaagtgctaggattacaaggtgtgagccaccgagcctggcctcattttttttcacaaacgtaactacctttttttttttttttttttgagacagagtctcgctctgtcaccaggctggagtgcagtggcgcgatctcggctcattgcagtctccacctcacgggttcaagcgattctcctgcctcagcctccttagtagctgggactacaggtgcccgccaccacacccagctaattttttttttttttttttgtatttttactcgtgatccacccgccttggcctcccaaagtgctgagattataggcatgagccaccgtgcctggcccaactgtttcttttatatacttaacaattgttttgtcagatgagagcaggaggccccttggctgctgacccaaagccggggacattggcgagtcttatgtccatccctccacagatcccctcagcccctcctcagctgctcaccctctcatccagggccacgccgtcctagcggccacctcacttgcctcaggcagccagtgagtcctgttagtcagagtcaggcctgtccctgggtgcatgcccccctttggccctaggccctgtgggtctatctctcagggaagagacaaagcgctggcttccttccccccacccattgcccctgcaggaacctgtttccagatggccctccttccctcagctgcttcctggaccctgcatggcaggggccttctggggacaccagcacctcccacctgagtgggtgcccagcgcacgcttgtcagatggataggtgccttcccgttgctgccagcagcaccctgaggaccctgtggggtatttttggcagcccccagcggtgagcactgatcgtagctgggtgtgcttgaagccgaggggagcagctgctgccatgaggctcttgctgagggggctgcagctggggttcacagcgccagcagctgcctgtgaggggtgggcctgtcctcccccgtggcactagctggcagcctagatactgccaggtgggcctggagcgtccgtcccggtgcacccccacccctccccagcagagccaagggagctgaggcccgcaggtgcccggcctcctgagtgaggggcaccggtgcagggctgggaggtccccagtggcttaagagctgggcagtgtggttgtgggcaggtggcctggcagcgagccgagtgttaggctgtgcctgggggcagccctgtggcctgacagtgtcccctcgccccgtcggccgtgtggtcattctgtgtggcccacctgcctcctgtctgagaagccgagtgctgtgtcatggcatggcccgtttcaggcctgggggttgggcgggctggacggggctctcgcggaatctggtttccacctttccactggcatctggaatgaggtttctgagcatcctaaagggtcaagttactggtgtcctggcccacccccaagcccagcagggatacctctccgcccagagggcacaggggacagggggtgagatgtggactctgttctaaggctgtgagcagggggacctcccggacaccagcaggaagaagcctgcttgaccattgtccatagcgctgagggggtgcccaggagaggggactccaggagacccagcctggcccttgggcccttcctcaaggagagacagtgtagaccaaagccccaggcccccgcccacagtgtgttcatgtcctgctggactgtgctgtggtcacaattccaaaatgcttccacacagctcagagcagtggccgtggctgcagagggcgtagccctgtcctagcctcgagtctcaggagggtg

SEQ ID NO: 1242814 - DNA, 4001 bp, Homo sapiens
acaaaatattagccgggcttggtggcagctgcctgtaatcccagctactcgggaggctgaggcaggagaactggttgaacctgggagacggaggttgcagcgacctgagatggggccactgcactccagcctgggcgacagagtgagactgtctcaaaaaaaaccgaaacaaaaaaaaaacaaaaaggagatccaatttacaaaataaaaaatttaaaaacaagagaattaaaaatgtaaacaataaataggagatatggcaacattttatctgccctgctgtggtgacaattagcagaacgcaagctaaggtttgcagcctggagctggctttgtcccttaccttgccattgagaacgatgttctggcttccacacaacactgactggcgactgactttgttcccagatgcctaaaagaaaacaacggaaaaccggggaaagcaaacttaataggtttctggactacaggtttccatcaagaaagctcccatttgagagaaaaaaacataaagtggggtgctgtccacaatggagtgagtccaggatatcaaaaaagcaatgatggattaggaaactatggctgagtatggtggctcatgcctgtaatctcagcactttgagaggctgaggcagacggatcccttgaggacaggagctcaagaccagcctaggcaacatagtgagaccccttctcaacaaaaaaaaaattttttaattagccgggcatggtggcgcgtgtctgtagtcccagctcctcagaaggctgaggctagaggatcgcttgagcctggaaggccgaggctgcaatgagctgtgattgtgccactgcactccagcctgggcaacagagtgagaacctgtctcaaaaaataaaaacacaaaggaaactagggactcaaggaataaactcataatttgaatgtctatagcttggtggcatcagacagacgcggattcaaatcccacttccacgcgtgggctttacggccttaaaacgaggataatgactatgagtatcagagttgtgagaaagcaaagaaaaccaaaataacgatagtaacgttaattgaccacttgccctgtttccaagattttacaaacatatcatgtactgatcataaagaaccaaatcggcagggtgcggtggctcacgcctgtaatgccagcactttgggaggccgaggcgggtcgatcacctgaggtcaagagttagggacctgcctggccaacacggtgaaaccccgtctctaccaaaaaatacaaaaattagccgggcgtggtggcgggcgcctgtaatcccagctactcgagacgctgaggcaggagaatcgcttgaacccgggaggcggaggttgcagtgagcagagatcgcgccgcggccctcaggactgggcgacagagtctccgccccccaacccccttcctcaaaaaaaaagaaccgaatcgtttttagcgcaagttaacagatacaaaaggcagtgtaaaagggcccgaagtccgagctgtaattcgtatgaacaggatgggacttgtcctatcctcccgaaggcactttacccctatgagaaaatcaggaataaatacaaaaggcctcaactggccaagcgcggagtaaacagcaaagccagacggtacacggggcatcgctagataatccgggactaatggccaaagggacaggggttggtggggtaggggcaggttgggaacgccgaccaggcctcaaagggacgcagggttggaaagaggaggatacatatctggacccgcgcaccgtctcgatgtactcagacttgttgtagagcagctcgcccaactccatggccgccgcctccttccctcagccccggatcctgtcagagtcagtcggtcagtctttcagagattccggctacttccggccgctcctccacttccgctccaggtggcccactgggactcatcgacagcgcggctctcctttaggcggcctcgctccactgctcggccgtctacggctgcgcgtgcgcaggccgaatggtggatttaattggccggagtttagggcgcgcttggcccgcgtgggtcagctgatcgcgcactgagggtgcgatcccgggctccccattccttcctggggcgcctccccggcccagggccaactgggtcccggtgtcggcaggcctggggtcggcgacggctgctcttttcgttctgtcgcctgcccgatggacgagcctcccgggaagcccctcagctgtgaggagaaggaaaaggtgccgggggtgcgggaagggcggacgcaggactctgaccccgctttcccagggttttaggcctggctttgtgtcctcggcagtccgagggcagcagtatcatctgaccaccccctcctcttagggctgagggggcacagaaaatgaaaatgtggaaatagcgtggtgctcacgtggtggcgtttaaagaacaaatttcattacagtagcagcgcattaatacaatgtgtaacagtttgtagataaagctgtatcgacacccttgctcctcccccctcccacaccctcaatctttacttctccccccggacggcctcaagtaaatcttttaagtctggtacttccaggtcctttcgtgtgttaatgtgggtggtggaggaggggcgtatccctaaccaccaaaaaggaatcctatgtatattttttggagaagggaatgttcataaatggtatgatctgaatggttctgcaggttccgtttagctttcctgtcaggacatgtttatctaccttgctttcttttttaagttctagacagtatgttgtagtttggaagtgccctcgttttgtttcttttttcttccttttctgtttttcttcttttttgagacagagtctcactctgccacccatgctggggtgcagtggcgcgatctcggctcactgcaacctccgcttcctgggatcaagcgactctcctgcctcagcctcccgagtagctgggattacacgaacccgccactgcacctggccttggaagtgcccttgcttctttagactgtactttactgatagacttttaggatgtttccagcttgtgctgatgttattcttatcctggcttaccttctggtggaggtgagaaagatcatttataagtaaacaagataatccccagacattgataagattggtgggaggccagtctccctggctcacgcctgtaatccccgcactttgggaggccgagatgggcagatcgcttgagctcagagtttgagaccagcctaggcaacgtagtgaaaccccgtctctactaaaaatacaaaaattagccgggtgtggtgacgccagcctgtagtcccagaggctcaggcctcagaggctgatgcacgagaatcgcttgaaccaggggacgctgaggttgcagggagctgccgagatcgcgccactgcacgccaggctggacgacagagtgagactgtctctcaaaaaaaaagaaaattccttacggttggcaacttgtctagtagcatgttttgcacataggttttgttttgtttgtttttgagacagactctccgctctatctcccaggctggagtgcagtggctcgatcttggctcactgcaacctccgcctctcaggttcaagcgattctcctgcctcagcctcccgagtagttgggattacagacgcccaacaccacgccgggctaatttttgtatttttagtagagacagggtttctccatgttggccaggctggttttgaactcctgacctcaggtaatctgcccgccttggccttccaaagtgctgggattacaggtgtgagccactgcacccggccttttttttttttttttttttcaagcagagtctcgctctgttgcccaggctggagtgcagtggcgtgatctaggcccactgcaacctccgcctccgggttcaagcaattctcctgcttcagcctcctacaggcacccaccaccacacccggctcatttttgtatctttagtag

SEQ ID NO: 1242815 - DNA, 4001 bp, Homo sapiens
caactctctggtgtcccctgccccattctctcagtgatccatccaatccaccctgtagacacagtgacctttccaacactcatatctggtcaggtcttctgtccaaactctccatcatactctagccctaatcatatctttgtgggttcaactcccacccctctcctccacagccctatcactcatccaacgtgtgcctattgagcgcctactatgcgctgggcacttgggacacatcagagaaaacagatcccaaatccctgatttttcctgagatgcttacaatgaaggagcgtcagattctccctgaattgaacttgccctttcttgcctcactgcccctgcaaatgtagttcccatgtctggaatgccacaggcaggtcctctacagaataccttcctttcagccccagaggcagaggaaaagggttgttgggccaggcgtggtggctcacccctgtaatcccagcactttgggaggccaaggcgggtggatcacctgaggtcaggaatttgagactagcctgaccaatatggtgaaaccccgtctccactaaaaatacaaaaattagccaggcgtggtggggggcacctgtagtcccagctactcggggggctgagacagaactgcttaaacccaggaggcggatgttgcagtgagccgaaattgagccactgcactccagcctgggcgacagagcgagaccccgtctcaaaaaaaagccaaaaaaacaaaaaacaaaagaagggaaaagggttgttgccactgcttcttcctagacgggacctgtcctgatgctttcacacctcacacctctctcttccaggaggctgagtgcccctagagggcagggacccgtgagtcctctctgcatcccaacaacagcaaagagcctagcaatcaggaggggaaactgaacccatgaatgtttgaagaccaaataaatgctcccctcccctcccccacaactcagactctaccaggaagctttccatctactcacaagagttctgccagctcccccacttccccaaccaaggccaggaggagattccgaggctgatggaactgttcccagtctcgttccgcagcaaactcagcatggaggcggcggctgaaataggacaaaggagtgtaagtccaagtctccgggttagagggtgatgcaggggccagaggcagctacccccgtagtatgtaatggggcctgggaccaggagattctgcaactaattcattggatggtattgtgcaggtcatttcctctttccggaacttggttccctcatctataaaatgggcgtgcccctgaactgcccttaacatctcgccaaaactaacaaaaccctcttcattattccatctcctgctgctacttctgcagtttcctccacctggaatcgccgcacatcaaaatgcaatttctcttacagaaggtagttccacagacccttcctctaagaagcctttcttgacctcctccagcaaaaaataacgtctcccacctctcagcacttcgtttgcccctctcgtacccccggcgcctggagagcagaggcggtatctggtgccggtatcttcccagggctaggctgaagggcgttcctagttaccactcggaggcaccacccaatttcccttgcctcaggtgtgcaccgctgcgcccattttgcagatgaggtaagaaggctcacccagggacagcccacagagccaggacccgagccccgctgccagcccgcttcccgaccacgtggaggaaccctccccaaaacgcgggagaaaggggcgacttccccaccccgagctgggccaggcctgcttacatgtcctcgagcgtgggctccgggctgaagctgaaccggccgggagcagcagtgtcctctccccccgtgtccccacgaatctccccaccggccacagacatgccgcccaccgctgcaccgcgacttcacggaaaacccacgagccacgctcgaagccccgcctccagagctccgaccaattacgggagttctctattgcctcacggggcggagcctgaggaaagagaccaatgacttttgtggagtttgctacagccctccccttccctcactggaccaatctgagggagcttcaagcgcgcgtttctagtcttaggccctggaattcttccgctaggccctgtgtctaaaggtagaggtaccaattcgacctggggaagagacgaagggcagagggtgggggaagcgcaggcgcgtcacttcgtttatgggcgccagagggcgccaaagcgaaacggcagcggaagagggcccgtcaggtggaaaaccctataaatgaaaggccctatgcataggtattaaatcagggcttaaggacgttgagaaacctcgaggccaacccccacactatttggatgggattgaaggggaagagcggagtaagatcagacggcagtaggacttcagctccccgccatcgctgtgtcctgtggttgaaacgatggaggtcgccccatccctgtcctaagggaggcagtaggccccagcgcaacgtacattgccctgaaacacgtggccccttatggtctggcctgtgccggcctctccagcctcatgggtccccagcacggctcctccaccccacacacgagaactccaggctccactcacaccagggaatacgcgaggtggcgagtcacagggttgctgctttcaaatcagaaccactgagttattggccatgggaggagcagagatctttatgaaaccctagaacaggtgtagtcttgcaaagaatgatttattattgtacccttattagggctactatctctgatttccacgtttaaagaggcttccagcttgctggaagtgaaagcgtaagaaagcgcaggaagaggcagagtcagattttggaaattaaaatcccaaggctgtgacaattgcaattctaggtatatgccctagagaaattaatgaatatgtgcagagagacacatgcaagaagttcattacagttttgtttctaagagtgaaaaaaattgaaaataaaatgactatcaacggaagaatggctacatggaagtatatttatacaaatgatattatccagcagttaagattggatacatgcaacagaaacaagtttaaactgcttttagcaagaaaaagaaatctattatttttattttttaaattttttatagagacagggtttcaccatgttgcctaagctggtcttgaaccaggattgctggattgggctctagcaatcctcctgccttggcctcccgaagtgctgggattacaggcacgagccacccccaccggccacaaggaatttattgtaaggatacaagagtgtctccagaatacagtgggacctcaggaatgaactggaactggggtggctgttttaagcattttacatatttaatcctcatagcaactaatttaatcctcacaaaaaccctatatggtaggtaatattgttgtcatccccattttaaagataaggaaactgaggccgggcgcggtggctcacgcctgtaatgccagcactttgggaggccgaggcgggcggatcacgaggtcaggagatcgagaccatcctggctaacacggtgaaaccccgtctgtactaaaaatacaaaaaattagctgggtgtggtggcgggcacctgtagtcccagctactcaggaggctgaggcaggagaatggtgtgaacctgggaggtggagcttgcagtgagccgagatcgcgccactgtgcttcagcctgggcgaaagagcgagactccgtctcaaaaaaaaaaaaaaaaaaaaaaaaaaaaagataaggaaactgagaggttaaataacttaacagctagtaaagtggtagagctggcgtcaaatccaggcagtttggcttcacagtctgttattagaccctatgatgtattgcctgaaatggcgataaatatgaaaaaaataaatgtaactgtattttaaatactatgaaaggctgggcg

SEQ ID NO: 1242816 - DNA, 4001 bp, Homo sapiens
cttcctcagaaagatcctctttgactgcatctacagttaagacactttcaatcacatcactcttattttcttcagcgcttgatcaaaatctggtttactgggatatatattatgtctctctctgtccccagctcccactccgatgtaagctccatgaaagggtgaaccttttgcttgtgttcacctgtgtacacccagtgcctgaaacactggctagcacttaggagtcaataaatgtttgttgaattaatgaactgtgaactttttagtcaatggcaaactaggttctaaatcagttaaagtgagaacagtagtcattcttctgttgtatttttgtgaaacatctaaacacgctgttactggtataatcaagcattaaatattctgttttttagggcccgaaagccctgaataggacttcctagcatcagatcttcctagcactatgcatatcaagctcagttacagaaggacaggacttacgggcactttctaatcaaaggactccgaaaatgtaggcactatctcttaaagttcttcagaaaacagtttcagattctacaaaagatttccgaagaatgtatcaacaccaaaaggaaaatcataacacttcactctgatatctgtctgagaggctagaagagtgctccttgattttttttaaaccaacagcatatcaacaaagaggccttctttccattctttgcttcaaataattttttcacatccgttattggtttgtattcgcccttaaaccaaaactaaacagatcacactgtctcatttaggacccccatacacaaagaatcagctacgtaaagatgaaaatcagcacaagctgaacgtgtcactgatgatttgtgtgtcacacataaatggagaaaaacataaaagagctattgtccaattgtagaaacaaaaaagtaatatggggttttctgttctctgaagtgcatcatgaaaagtgggtggagagaaacacagaaatccagaattagcctagcaaatcattttgggaagagctgacaacatgtaaattcctcacacataaagtatttcgagcaagagaccttgattcctgggctatgatgccattcaggattccttgcaaaggctctggaattccagtattcataaaagaaaatgctcattataatcggagcgtaagaggtactcccaacgtgacagcctgtatgaagtattacaaagcttacagttaagatctgggatagaggctgaacaccaaattcaaaagaggtaaccaaggcactaagtgccataaaggaggaaaggggaagaaaaaaaaatccactattgccactcagccacagagaattaaagtggaaaccaggggtgtgcatgggggaggatgaggggtgagaagtgcggggggtgtggtggaggaacaaacaatacatttgtcaccccgtcccacttcctatagaggatacaggcaaagcctccagcctcattacctcggacacagatggttatcgtttatagcaaaggtgcacaaaaaggccttcaggtctgagccccttaattccagggctgttaatgattaaagagaacgatgggggtggggagggaaatgagggcggagggagctgggagattcacccaccacctccccctagggctcctacctcacagcgctcacccaggacagaggaccagagtctgcaccccctccagggcagctccaaccccatatccccaggccctgggttgaggggtgctggcggtggggaggcagggacagtaggtaagttttctgagccctgcggctgacacgccacaggctcccctcacagcctcttctttcagaggtaccactccagacaacgcgctgacttccactcctccctttccacccccctttctcgaaggtacccaacccccgccccttcatctctcaatgcccccccgccttttcctcaactccccccctccccaaaactcacagctgctccagaggttcctccagtcaaaccctttctggaaacgacggcggcccggcgggtccaaaccacctaccatccccgctcgcgtttccaggctccctacccccgccgccgccgcctcttcttccaccactgccaccgcctcctcttcatctgcggcccaccggcggcggccgccccgaagccccgccccctccatcgcctcctgcatcatcacttccggtaaccccgccggccgccagctccaggagggagaatgggagaggggcaaggagggaacgagtggaagattgcgtcacgacgcacataaagacgtacgaagccgtcgccaagtaagggcaaagacctagcaacccggagggagctgggctggaccatttttttttcttgttttacgggaatggagcggggaggataatgaaagcgtaaaggaaaaatagggggaggaggagctcagcttattgttggatgcggcgggagatgggtagagtcagtcagtcgagactcccccagacctggaactggtgctcccacagaggtgggcccggtggtttggtccggcctggcctactggaccagcctgtgctcggtcggccacggctctgctgggctcctggcgccgcctcctcccagcccgccgcgggctgcgcgcttctgtgggtgggggaaggcaggactgacgcagagtgagtgtaggggatggaggcgccgactccaggcgcgggagactggcggggaaggggttggctccccacgggcagggatggtttggaggttgggctgcggcgttgccgggagacgggcctgtgtgaccccagcttcgcgggggcggctcggtgtcatcgccaccggcctcggggacctgcctcacggaagtggctcgcgcgtccaagaggggaggcctggtgtggggacgctcaggtgccggcgtggggccccctcggaggctgtgaatcttttggacccccgaatgtaaatgggagatggtaggggccggtccgggggcgagaggtgtctggctggggaacgttgacccacaccaggtcccgtacaggaacggagactccctaggaccgtgagagccagcttcgtaattctcttgctcttcaaacctgagagtagggtgttgctccgttaccttccattcgtgtgcaggagagagttaagtaaatcaataaagaaggtatcagcaagtgagaaatgccccccaaagaccggatgaggtgacagaagatggggggagggcccctcgaaatcgggtaaggtcgttcaaaggaggccacggttttgcggggatccgagacaatgggttttctgggtggagagaagagccaatgagaaggacttttaggttggaaacagccagaaggccatgtggctgaagcaaacagagccagggccggagtgccctgtgatgtagttggggaagtggcatgactgtagcagcgccttttagcccaaggcaggggtttggctaatgtgtaccttaagggttttaagaagggaagtgacctgacctgatttacatttttaaaaatccgctctgcctgctggatagagaagggtggaagtagttagacctgttaggagactgttgcactgtaagacaaaggagaggtgaagatagtgttgaaagggccggccgggcgcggtggctcacgcctataaacccagtactttgggaggcctaggcgggcggatcacgaggtcaggagatcgagatcatcctggccaacatggtgaaaccccatctctactaaaaatacaaaaatcagctgggcgtagtggcacgcgcctgtaatctctgctactcaggagaatcgcttgaacccgggaggtggaggttgcagtgagccaagatcgcgccacttcactccagcctgggcaacggagtgagactccgtcttaagaaaaaagaaaaggccctcagtcacagtggaaatggagagaattccattcagcatatatttgggaggtagtgcttgcaggacttgctggggaattggatgtgaagtgtgtaggagagggaggaaccaa

SEQ ID NO: 1242817 - DNA, 4001 bp, Homo sapiens
catgctggagtgcagtggtgtgatcacagctcactgcagcctcaacctccctaggctcaggtgatcctcccacctcagcatcctgagtaactgggactacaggagtgtaccaccaccccgcccagctaattttttttgtatttttgtagaaatggggtttcgccatgttgcccacactggtcttgaactcctgggttcaactgatctgcctgtctcagtttcccaaagtgctaggattacaggtgtgagccactgtgcccagccttcacctctttttttttttttttttttttttgagacagagtctcactcagtagcccaggctggagtgcagtggcgtaattttggctcactgcaacctccacctcccaggttcaagcaattctcatgcctcagcctcctgagtagctggtattaacaggggacgactaccacgcctggctaacttttgtatttttagtagagacagggtttcactatgttggccaggctggtatcaaactcttgacctcgagtgatctgcccgcctcggcctcccaaagtgctgggatcacaggtgggtgccatcatgcccggctgccttcaccattctatcaaatctgcccttcctcccactttcctattcctgttattgggacgttagtagtaccaataggatccaggttgaaaacagaaacctttggctttatctcccttctctcctttattatgttagcaagtcctacccattctaccttcatatcttatacccatcccttaattttcacttccactgcccaacataggccctctatctcggggctatcagaataacttctacactgatatttctattagccatcacttctaacatattctgttctctgtagttcaataaatccttgccagccttgtctaattctgtcaatagccctctcaaaaatccccataccggctgggcgcggtgactcacggctgtaatcccagcactttgggaggccgaggtgggcggatcacttgaggtcgggagttcgagaccagcctgaccaacatggagaaaccccgtctctacaaaaaatacaaaattagccgggcgtggtggcgcatgcctgtaatcccagctactcgggagactgaggcaggagaatcgcttgaacccgggaggcggaggttgcggtgagccgagatggcgccattgcactccagcctgggcaacaagagcaaaactctgcctcaaaagagaaacaactacaacaaaaaaaaagacagtccattatcactaaacaaacctaaagtttaggtcttagatataagaacagaaagccacagtgtatgctgtaattacattccagttgaatgaatattcattactgaaagaacaagtacatgaaaccgttactttacacatcaatgaaacaatttgtagtgcctccttccaacatctgcagtagattgaggtattaaatccaaaagtcaatctgttattctgcaaagagctacaaactaccaaccacgttaagcatggatctaagaaatgttaaatacagagtagtacagaaacatgcgaagaacagtcgcgtaatgaaaaagagaatcagaatctaaacttggctttccttataatcgtcaccgaggaggtcaatagaggaatgacagcatgcatagtggggcggatttaccaaaggatgaagtccttaaccagcccagatggagataaaaagctcgacattggtctctttagctctaagagcaaatcaagggcaagtgactgccctagcaaactgcaggagcgcgttgcccaggggcctccccaacccggggagctccctgtgcttttgggaggtttcgcttgggcccctgctacgtcctcctcgccaggagctgagctactgaccgacttgacagccgcttcctgctcgtccaccgccagggcccacgagtcggtggccatagtcccggacaagggagacccacttgtgaaaatatgcgctgcaccacgtcgcaacgcgggccctaacctcgccaccggcgcgagaatgcacctcacgcggaccggaagcggcggtgagcacaggtgacgtcagttcccacccagcgtgcgacatcatcattctgcgcggcgccaggtctctcctcgggcctcgcctttcccttcgtgcgcaaacctcgcgctttttgctcacccttccaggacgcggcctcctcgcttcttaaaatgtctgagctctacgaagtggaactgttagccctccgtttattgccttacttcacactgaaataagccaacgtttattttattttatttattttattatttattttattattttttttcgagacggagtctcgctctgtcccaggctggagtgccgtggcgggatctcgactcactgcaacctccgcctccgtgttcaagctattctacctcagcctcccgagtagctgggattacaggtgcccgccaccacgcccggctaatttttgtatttttagtagagatggggtttcaccatgttggccaggctgatctcgaactgctgaccttgtgatcctcccgcctcagcctcccaaagtgttgggattacaggcgtgagccaccgcgcccggcccccaacgtttctttttaagcctgtcatatctcacattaaatgtgtaagtctctgaactgtagggctttgaacaaaggaaagttccatgagaatactatatgatgccaatttctactgttaggaacgcgataacaggtaagaaaacaaaaaccaaaacgcaacagaagacccgtaaaccccataattccaccatccaataaacacaacacacaatgcgttttttcgtttcttttttgagtcagggtctcattgtgtcgcccaggctggaatgcagtggtgtgatctcggctcactgcacccttgacctcccacctcagcctcccaggtagctgggcccacaggcccgcaccaccactcctggctagtttttaaactttttgcagagacggaagtcttcattatattgctcaggctgcttttgatctcctgctaactccagagatcctcctgccttggcctctcaaagtgttgggattacaggcatgagccaccacacctggccattatgttgaaggaccaccaaatacataatgtataatctatttatatgagattcaagaataggacaaataaaatctatgctgataaaaactaacagagcttacctgtggagaaggatgtttggtccagacacaagagaacttcctgggtgatagaattattctgtatcttgattgggacctggttacatagatgtgtaaatttgttaagtcatgctactttgtatttctaaactcatggaaccattatttacagatatcacccaggctggagtgcagtggccgggtcttggctcactgcaacctctgcttcctggattcaagcggttctcctgcctcagcctcccaagtagctgggattacaggcacacgccaccacgcccagataatgtttgtatttttagtagagatggagtttcaccacgttggctaggctggccttgaactcctgagctcaaggatctgcctgcctgggccgcccaaagtgctgggattacaggtgtgagccacagtgctgacctgctttttcttttttataagcagttcccaaggaagaataactgtttttgtttgttttttgtgacagggtcttgctctgtcacctaggctggaatgcagtggcacgttcacagctcactgcagccttgatctcccagactcaagtgatcctcgcacctcagctccccagcagctgggaatatagcacttcgccaccacccctggctaatttttgtgtgagaacttgtgcatttaaaatatcatggtatataaattatacctttcaataatgttgattaaaaatcaaaaaaagggccgggggcggtggctcacgcctataaccctagcactttgggaggccaaggctggtggatcacctgaggtcaggagttcgagaccagcctggccaacatgg

SEQ ID NO: 1242818 - DNA, 4001 bp, Homo sapiens
agaaaggaagggatccaagagatccaaaagacaagagaaaggaggaaggaatctgcagaatgaggctgaagggaaatttgccctgttccctctattccccaatatgaactgtgctctaaagacaggagtaactagtccaatttgaagcagacttaaaggcctaggagaaatggaattgatagaatacttgatgagtctaagcatcctgagataaacttagacaactggaagacagtttggggttgaattgataattaagaaaaaaaaatgaagcataaacataaggcaattaagaattccaagtaaaataaattttatagaaaagtaaagggccaggcaaagtggctcaggcctataatcccaacactttgggaggccgaggtgggaggatggcttgagcccagcaggtcaagaccaacctgggtaatatagtgagacctcgtcttcacaaaaaattaaaaagttagctgcatatgttggcacatgcttgtagtcccggttactcaggaagctgaggtgggaggatcacttgagcctgggaaggggaggttgtagttggcaagagatggtgtcaatgcactccagcctgggtgacagggcaagaccctctctcaaaaaatatatgtaaagaaagaaagaaacagaaaaaagaggctggatgcagtggctcacacctgtaatcccagcactttgggaggctgaggcaggtggatcacttgcacgctggagttcgagaccagcctgggcaacatggcaagtccccatctctacaaaaaaaatacaaaaagtagttgggcatagtggcacatgactacagtcccagttactcaggaggctgaggtgggaggatggcttgagcctgggaggcagagactgcagtgagccaagatcactccactgcaccctagcctgggcaacagagtgtgaccctgtctccaaaaaaaaaaaaggagttgcctctggggaggaaaaaaattggcgggaaccgttgtttttaaaataacttcactctttaaacaatgtgtatatacaacttattttttatgagctataaaaaataaaagacaaggttcttattcttgaggaagtcatagcaataagtactaacagaagtaggttcaaagcctactaggatttaaagtgtttcggtgggagaaattaattctacgcagtagtgtttaacacatctcttgcttaccatgtgtcaggtccagaaaaaaagaacaaagtgaagccgatgaggaaaggatttgctgactgccacacctactgggtccatcatttatcactgaggaagcacacaaatatgagcaaagacatggtccctgagccaaagaagctctgaatgtagaggtggagaatgacacctaaaataactattacaaaccggggcggccaggaacaatggctcagcctgtaatcctggtgctttgaaaggccgaggcaggaagatagcttgagaccaggagttccagactagcctgggcaacctagcaagaccatgtctctatttcaattaaaaacaaacaaaacacaatctagggtgatgggtgcaatctatgattcttcctggttccaggaagacagacaggcagctgagcgctttaccgataggagcactcacctgcgcttacgtaacgcggaggcggctgcgtaaacaaagccagctcagggtccaggctccatccctatcctccccgccaccccatccagcctctaatcaacctgggaaacattctttcccagggaccaagtctccgaccagaactagtcccctgacccttttagggctgaagccaactcaccgactcagccgcagcttcctgctcgtccaccgccagggcccatgagtcagtggccatggtcccaggcgcgggtgggacgctcgtgctggtggattcgagggatggcacgagggatcgtgggctccgggggttcgcggcaggctctgctccagccccactacaaggctgcagaccggaagcggcgcgccacagtgacgtcggaggccactcctgtttggccaccctttgcccacttgaggctgtcgattctgttgccctcagacccgtacccctcaaccccgggcagagcaagctttcctatcaagctgaggtagttatcttaaaatgcctaagctctggttaacttggatctccaaccaaagaacaaaatcagattcccgcccaacacagtggcagagtaggcactaatacagattgaacagattgaatatatcaaaacagaaaaccattaccaatagtcaccaaaatgcaaaacaagcacagagctgtttcccttttcagattggtaatttaaaatgtccagatgttggcaatcagccctgacaacccatttggttaaaagtccacttgaccactatgcaatcttgttaggcatgtaacaaaactgcacctgcactcataaatttgtaccccaagaggaggaattgcagctctcctatgtaagcgttgtagaatcaggagaatgttaaaaaggaagaaaacagacggtgcggtggctcatgcatgtaatcccagcacttctggaggccgaggcggaaggatcacttgagcccaggaggtctaggctgcagtgagccatgacagggccactgcactccagcctgggtgacagagcaaaactctgtctaggaaaaaaataaataaaattaaaatagtaaaataattaaatagagctaggtgtggtggctcatgcctgtaatctcagcacttgggtttttgtttgttttttgagattgagtctggctctgtcgcccaggctggagtgcagtggcacgatttcggctcactgcaacctccacctcctgggttcaagaaattctcttgcctcagcctcccaagtagctgggattacaagcatgcgccaccatgcccagctagtttttctatttttaatagagatggtgtttcaccatgttggccaggatggtctcaatctcctgacctcgtgatccgcctgccttggcctcccaaagtgctgggattacaggcgtgagccactgcacccggccttttgtttttttaagatagagacagatcttgctgtgttgtcctggctggtctcaaactcctgagctcaagtgatcctcccacctccacctcccaaagtgccaggattggccaggcacagtagctcacatgtgtaatcctagcattttgggaggtggaggtgggaggatcgcttgaatccaggagtttgaaaacaacaacatagcgaggccttatccttacacaagaaaaatttaaaaattagccaggtgtcgtcgcacatgcctgcagttccagctacttgggaggctgaggtgggaggatcacttgagcccaggaggttgaggctgcagttagcagtgtttgtgtcactgcactctagtctgcgcaacagagtaagactctgcctcataaacaaataaataaataggaagaaatatcttgggcttttagtagttgtaaaataaggattaaatgaaagaactgctttctcctaactagaatcaaagaagcttctcttcccttgttacttccctagaaagaaactaggcattttcctacaatctgaaaaaaatgaatcccaacctctttcattttgccaatattatacaacaataagttaatttcaagccatgaggccgggcacaatggctcacacctgtaatcccagcactttgggaggccaaggtgggtggatcacctgaggtcaggatatcaagaccagcttggccaacatggtgaaaccctatctctactaaaaatacaaaaattagccaagcatggtggtgcacacctgtaatcccagctacttgtaagcctgaggcaggagaatcactagaacccggaaggcaaaggttgcagtgagccgagatcatgccatcacactgcagcctgggcgacgagtgaaactctgtctcaaaaaaaataaataaatagactgggcacggtggcttgcacctgtaatcccagcactttgggaggccaaagcag

SEQ ID NO: 1242819 - DNA, 4001 bp, Homo sapiens
gattattttttcctgcactctcacagggttaactggagaagacgtttttgttttttgtttttgaccttacacatgaggatgtgctaaaaagaaaaaggcaaacaccaccttggtagccatgacctacatctcatcaattcagaagcaaccctggggatattttcccagataaattatattgtttcacagggctagaggttaatgaaatttgcaaaacattttaatgaggttaaaaattacatcgcccaagttgcaggaccgtatatagtaggttcacttgtacaaaacaaacaggaacccccaccccaaaagcccccaagctcccatatatgcttttatacactatggaaaatgcctaagaagaccggagcagtggcctgtgtctgcagtcccagctactcctgaagctgaggttggaggatcgcctgagctcagaagttcgaagccagcctggacaacatagtgaaaccatcgcctcttaaaaaaaaaaaaaatgtggccaggtgcggtggctcacgcctgtaatcccagcagtttgggaggccaaggtggtggatcacgaggtcaggagttcaagatcagcctggtcaagatggtgaaactctgtctctactaaaaatacaaaaatcagctgagcatggtggtgggtgcctgtaatcccagctacttgggaggctgaggcagagaattgcttgaacccaggaggcagaggttgcagtgagctgagatcatgccactgcactccagcctgggcaacagagcgagcctctgtctcaaaaaaaaaaaaaaaaatgcttaagatacacacaaaactgataaccatggctgcccctggtgagggcctctagaagggtgggggtggattgagtatgctttatcctctgaaattattttccatatgcatggttttttttaaattagagacagggtcttgctatgttgcccaggctggagtgcagtggctattcacaggcaccattacagcacatactatatccttgaactcctgagttcaagaggttcacctgcctctgcttcccaagtagctgggactacaggtgtgtgcagctgtgcttggctccatgtttcccttttaaaaatgtatttcagacaaacaagaaagggtataacaaatacttagattcccacctcaaaacttaataaataaaattactaaggtccaattgataatctccgtatactcatcccaggaagacagcagctatgccaaatttggtgtttatccttcccgtacacgattttagcatgtgttttttcttctactaaataaatatgcaagcctgggcaacatagggagaccccgtctctaccaaaaaaaaaaaaaaattttttttaagtagctgggcgtggtggcgtgagcctgtagtcccagctactcctgaggctgaggtgggaggatcacttgatcccaggagttcaaggctgcagtgagtcgtgatcatgccactgcactccagcctgtctcaaaacaaaacaaaaaacaaaaaaacttaaaaatagcatcggggtttcagactctcctaagttcacccccaatacacctgcgctttgtgagactccggctaagaaggaacctggtttccaaagcgggcgtggaaagaagagtgttcggggaataagagcatctggattggaattcagcctcctgcatttattcccacgtgagcctagccagtctcagtttcccctgaaatcacaggaagtacccacctcacagatggcggattctagatcacaaggctaagaccttgggccgaagcctcgagaaatattgttattcctctacccaggagtaggggcgaggaaggcacctaaacgtgggaggaaagggtctggcttctaccctcgcagatactcacgtcgcccacaggcagggtgatgggaaaccgccgcagggcgcgatcttggacgcgcccggcagccccagccatcgcggctgagcatggcagttacactccaacaaccgctgctcttggcactggccaagccggagcctcattggctgaggcctggaaatcctgtcagccaatcagctgaggggacggtacagcgctcgggcacgcgccccaggaactctgggggccaaagacaagcgcaagcctcccgcagagggctttgtttcctgctaaatgtctggcttcctggtgagactgggaactccatgagggcagggcaagatctttaatcttgatcctcagtgactaacacatagtggtcactcatttggtgaatcatgagccattagcatctccccccgtgggtcaaactttttaaaaattttgcatctgaacaaataggtgcagacgcacatcctctaatctagacccttggtattccaagtataatctctcagcagcatagatatcgcctgaagcctgttaaaaatgcaggctctcggccgggcacggtggctcacgcctgtaatcccagcactttgggaggccgaggcgggtggatcacgaggtcaggagatcgaggccattctggctaacactgtgaaaccccgtctctactaaaaatacaaaaaattagctgggcgtggtagcgggcgcctgtagtcccagctactcgcaaggctgaggcaggagaatggcgtgaacccgggaggcggagcttgcagtgtgcagagatcgcgccactgcactccagcctgggcgacagagtgagactccgtctcaaaaaaaaaaaaaaaaaaaaaaaaaaattcaggctctcaggccctaccccagacctattcaatttagcaatattttaagatcctaggtgattcctttagcgttttatggtctgaaaagtacattagacaaaaaaattataatatgctcaattgaaatattcctttagaggttcttaaaaattcagccttggccgggcgcggtggctcacgcctgtaatcccagcactttgggaggccgaggcgggtggatcatgaggtcaggagatcgagaccatcctggctaacaaggtgaaaccccgtctctactaaaaatacaaaaaattagccgggcacggtggcgggcgcctgtagtcccagctactcgggaggctgaggcaggagaatggcgtgaacccaggaagcggagcttgcagtgagccgagattgcgccactgcagtccgcagtccggcctgggcgacagagcgagactccgtctcaaaaaaaaaaaaaaaaaaaaaaaaattcagccatccccatttgacttagtaccaaataagccagcattgtaaacccattttatagatgctaaaagtagctaagatgccatgggagagttaagagtctagcgctacatccttccaaagctatgttagtttttttttttttccacttgtttccatttctttcttttttttttcaattgagacactgtctcattctgccacccaggctggagtgcagtggcacgatcatggcttactgcatcctttacttccctgtctcaagctatcctcccacctcagcctcctgaatagctgggactacagatgcatgccaccatgcccagctaatttttgtatttttttgtagaggttgagttttgtcatgttgctcaggctagtctcaaactcctgggctcaagccatccacccacctcagaatcccaaagtatggtgattaaaggtatacgccatcacgccggcctgtttctgtttgttgtttttattattttttaaatttaatttaatttaatttttttgagacagagtttccctcttgtctcccaggctggagtgcagtggcacaatcttgagtcactgcagcctctgcctcagccttctgagtagctgggattacaggtggccgccaccacacccagataattttagtatttttagtagagatggggtttcaccaggttgaccaggctgattttgaactcccaacctcaggtgatctgcccgcctcggcctcccaaagtgttgggattacaggcatgagccactgtgcctggcctgttgtttcactctgcggcccaggctg

SEQ ID NO: 1242820 - DNA, 4001 bp, Homo sapiens
gggtaaagcagttccagagaacattctacttgctatgattattttttcctgcactctcacagggttaactggagaagacgtttttgttttttgtttttgaccttacacatgaggatgtgctaaaaagaaaaaggcaaacaccaccttggtagccatgacctacatctcatcaattcagaagcaaccctggggatattttcccagataaattatattgtttcacagggctagaggttaatgaaatttgcaaaacattttaatgaggttaaaaattacatcgcccaagttgcaggaccgtatatagtaggttcacttgtacaaaacaaacaggaacccccaccccaaaagcccccaagctcccatatatgcttttatacactatggaaaatgcctaagaagaccggagcagtggcctgtgtctgcagtcccagctactcctgaagctgaggttggaggatcgcctgagctcagaagttcgaagccagcctggacaacatagtgaaaccatcgcctcttaaaaaaaaaaaaaatgtggccaggtgcggtggctcacgcctgtaatcccagcagtttgggaggccaaggtggtggatcacgaggtcaggagttcaagatcagcctggtcaagatggtgaaactctgtctctactaaaaatacaaaaatcagctgagcatggtggtgggtgcctgtaatcccagctacttgggaggctgaggcagagaattgcttgaacccaggaggcagaggttgcagtgagctgagatcatgccactgcactccagcctgggcaacagagcgagcctctgtctcaaaaaaaaaaaaaaaaatgcttaagatacacacaaaactgataaccatggctgcccctggtgagggcctctagaagggtgggggtggattgagtatgctttatcctctgaaattattttccatatgcatggttttttttaaattagagacagggtcttgctatgttgcccaggctggagtgcagtggctattcacaggcaccattacagcacatactatatccttgaactcctgagttcaagaggttcacctgcctctgcttcccaagtagctgggactacaggtgtgtgcagctgtgcttggctccatgtttcccttttaaaaatgtatttcagacaaacaagaaagggtataacaaatacttagattcccacctcaaaacttaataaataaaattactaaggtccaattgataatctccgtatactcatcccaggaagacagcagctatgccaaatttggtgtttatccttcccgtacacgattttagcatgtgttttttcttctactaaataaatatgcaagcctgggcaacatagggagaccccgtctctaccaaaaaaaaaaaaaaattttttttaagtagctgggcgtggtggcgtgagcctgtagtcccagctactcctgaggctgaggtgggaggatcacttgatcccaggagttcaaggctgcagtgagtcgtgatcatgccactgcactccagcctgtctcaaaacaaaacaaaaaacaaaaaaacttaaaaatagcatcggggtttcagactctcctaagttcacccccaatacacctgcgctttgtgagactccggctaagaaggaacctggtttccaaagcgggcgtggaaagaagagtgttcggggaataagagcatctggattggaattcagcctcctgcatttattcccacgtgagcctagccagtctcagtttcccctgaaatcacaggaagtacccacctcacagatggcggattctagatcacaaggctaagaccttgggccgaagcctcgagaaatattgttattcctctacccaggagtaggggcgaggaaggcacctaaacgtgggaggaaagggtctggcttctaccctcgcagatactcacgtcgcccacaggcagggtgatgggaaaccgccgcagggcgcgatcttggacgcgcccggcagccccagccatcgcggctgagcatggcagttacactccaacaaccgctgctcttggcactggccaagccggagcctcattggctgaggcctggaaatcctgtcagccaatcagctgaggggacggtacagcgctcgggcacgcgccccaggaactctgggggccaaagacaagcgcaagcctcccgcagagggctttgtttcctgctaaatgtctggcttcctggtgagactgggaactccatgagggcagggcaagatctttaatcttgatcctcagtgactaacacatagtggtcactcatttggtgaatcatgagccattagcatctccccccgtgggtcaaactttttaaaaattttgcatctgaacaaataggtgcagacgcacatcctctaatctagacccttggtattccaagtataatctctcagcagcatagatatcgcctgaagcctgttaaaaatgcaggctctcggccgggcacggtggctcacgcctgtaatcccagcactttgggaggccgaggcgggtggatcacgaggtcaggagatcgaggccattctggctaacactgtgaaaccccgtctctactaaaaatacaaaaaattagctgggcgtggtagcgggcgcctgtagtcccagctactcgcaaggctgaggcaggagaatggcgtgaacccgggaggcggagcttgcagtgtgcagagatcgcgccactgcactccagcctgggcgacagagtgagactccgtctcaaaaaaaaaaaaaaaaaaaaaaaaaaattcaggctctcaggccctaccccagacctattcaatttagcaatattttaagatcctaggtgattcctttagcgttttatggtctgaaaagtacattagacaaaaaaattataatatgctcaattgaaatattcctttagaggttcttaaaaattcagccttggccgggcgcggtggctcacgcctgtaatcccagcactttgggaggccgaggcgggtggatcatgaggtcaggagatcgagaccatcctggctaacaaggtgaaaccccgtctctactaaaaatacaaaaaattagccgggcacggtggcgggcgcctgtagtcccagctactcgggaggctgaggcaggagaatggcgtgaacccaggaagcggagcttgcagtgagccgagattgcgccactgcagtccgcagtccggcctgggcgacagagcgagactccgtctcaaaaaaaaaaaaaaaaaaaaaaaaattcagccatccccatttgacttagtaccaaataagccagcattgtaaacccattttatagatgctaaaagtagctaagatgccatgggagagttaagagtctagcgctacatccttccaaagctatgttagtttttttttttttccacttgtttccatttctttcttttttttttcaattgagacactgtctcattctgccacccaggctggagtgcagtggcacgatcatggcttactgcatcctttacttccctgtctcaagctatcctcccacctcagcctcctgaatagctgggactacagatgcatgccaccatgcccagctaatttttgtatttttttgtagaggttgagttttgtcatgttgctcaggctagtctcaaactcctgggctcaagccatccacccacctcagaatcccaaagtatggtgattaaaggtatacgccatcacgccggcctgtttctgtttgttgtttttattattttttaaatttaatttaatttaatttttttgagacagagtttccctcttgtctcccaggctggagtgcagtggcacaatcttgagtcactgcagcctctgcctcagccttctgagtagctgggattacaggtggccgccaccacacccagataattttagtatttttagtagagatggggtttcaccaggttgaccaggctgattttgaactcccaacctcaggtgatctgcccgcctcggcctcccaaagtgttgggattacaggcatgagccactg

SEQ ID NO: 1242821 - DNA, 4001 bp, Homo sapiens
ctgatctcggctcactgctagctccgcctcccgggttcacgccattctcctgcctcagcctccagagtagctgggactacaggcgcccgccaccacgcccggctactttttttgtattttttagtagagacggggtttcgtcgtgttagccaggatggtctcaatctcctgacctcatgatctgcctgcctaggcctcccaaaagtgctgggattacaggcatgagtcaccacgctaggccaaaaaattattttaatctgtttataattattttattaatgaaggtactatcctagtaacaactctggcagcagaactaaattattgagattacaacctgtattattttattctgaaagtacaattcatacataccttttggctttctattttaagtgtggtggcttagaagtctgactcatttcccagattgtttaagctaaatatatgttatttagggcactgtggatcagaataaacacttgtgtctcctggttttgccctcagctgtgttacttaacctctctctctgccttattttactctgttaaaagcagatagtagtagtaactcatgataaggttgtgaggattaaaagcttagattggtgcctgctgtatactaagtgctcaataaatggtaggtttgatgattactatttgtgagcagctatgaagtgggaaagtaaatcaaatgatttatgtttttactggcttttgggcttgaccttctttttgtgtaggatgctctttttgcataaaaagtagtatttttctgtattgtctgtaacttgagttatgaccagcagcacaatttattacccgtgtatttggatatatcagatgatggaggtaatagtgcagtggttaagagcatgggctttggagttaaatagacacaggtttggatcctgtctccacaacttactattgggtgtgaacttgtgcaaggtaatttcctcatttgtaaaaaggggactccagctgacctcatacacagtttaaaaatcaaatgaaataagcatgtgaaatgtttgatgcaatgcctcacgtataaatacatacatatttttcagacagggcctcgctctgtcgcccaaggaatgcagtgtcacgatcagggctcactgcagcctcaacttcctaggctcaagtgatcctcccacttcaacctcccaagtagctgggactacaagcatgcgccactatgcctggctaatttttattttttatttttttttttgagacggagtcttgctccgtagccaggctggagtgcagtggcgccatctcggctcaccgcaacttccgcctcccgaggtcaagggattcccttgcctcagcctcccgagtggctgggactacagatgcgcgcccggctaattttgtgtttttagtagagacggggtttcaccatgttggccaggatgctctcggtctcctgacctcgtcatccgttggcctcagcctcccaaagtgctaggattacaggtgtgggccaccgcgcccggccttttaaaaaatttttcgtagagacagggtctagttatgttgaccaggctggtctccaactcctgggttcaggtgatcttcccaccttggcctcccaaagtgttgcaattataggcgtgagccaccgcacctggcatgtatatatgtatatgtatatatatatattcaccctcctcccccaggcctataaatattaacttttttttttccaaaggcaaatcgaggaccagatgctgatccaatcgtacctgaactactgatgttatttcttccacaccaaattcaaggtctcccccggacaagtgtaaccatgggcacaatgtcagactctttgagggctgtgtatcactcagcaactaaaataaacaactatagcaagatatgtaacctctaccaaacacgttaccgtctcccctttttaactatgtcaattgtggtgttaggactttgcctatggaaaccaaaatgtcgacctccgggagccgggggcgggggggggcggggggggcgggggggggtctaactcgatcatgtgacgcaccccatcccaccttttctcgcagttgcatcagccaagttagagccgccttcccaggaatccactaatgaacggattcgtcctcagtttgactggcatgttggttgaccaataatatctcatgaggtaaggcgcggcggggcactttccgtcggcgcgctctgattggacggagcgtggcgggttgtggtaggtcgtggtctgaggccggtacagctgcgcgtctgcgggaataggtgcagcgggcccttggcgggggactctgagggaggagctggggacggcgaccctaggagaggtaggccgccctcggagagctctgcggtgctaggagagcggctgggcccgcagactggggggaaagctccgcagccgcagtgggccccaggatcaggccccgcgtggcctggagaagcccagtctgggctggagcgggagctggacagtgtggccttgcgttcgcccccgggagcgctgcgagtgtcgcggcctcgggtggatttgctgagcaccaatacctcacggttgccaacctggggttttagctcccttggttttaatcccctaggggcgggtgggggcacgggaggaaggatgggccagctgggtgcaatcctgctgtaagccagccattccttgatttcttaaaattaactaaacagctgatgccggtccaggcgcaccgagaccgtcatcttaagctgttctgtaaaacagtttgtatttctcggtgtgctttgaagcatgtgagttaattccgaacttggtgttaaaggattagtatacctgatcacgaaatacgtatttagcagccactgtactagatgctgaggatgtgctgtaatagcccagggccaggcgcggaggctcacgcctgtaatcccagcgctttgggaggtcgaggcgggcggatcacctgaggtcaggggttcgagactagcctggccaacatggtgaaaccccgtctttactaaaaatacaaaaattagccgagcgtggcggcgcgcgcctgtactctcagccactccggaggctgaggcatgagaatcgcttgaacccggcaggcggaggttgcagtgagctgagatcacaccattgcactccagcctgggtgacagagggagactccgtttcaaaaaaaaaaaaaaaaaaagagcccagaacagtcgttgctgctgggatggaactgacagcctgatgggggaggcgcacattaaacaatccatgaagcgcgtatggaaattatgaagggaaacacttgaggctgtgagacagtaaaagagggggagccttatcaagaaggggaaggcggccgggcgcggtggctcacgcctgtaatcccagcacttggggaggccgaggtgggcagatcacgaggtcaggagattgagaccatcctggctaacacggtgaaaccccatctctaccaaatatacaaaaatagccgggcgtggtgactggcgcccgtagtcccagtagtcccagctactcgggaggctgaggcaggagaatggcgtgaacccgggaggcggagcttgcagtgagctgagatcgcgccactgcactccagcctgcgcaacagagcgagactccgtctcaaaaaaaaaaaaaaaaaaaaaagaagaaggggaaggctgtcttaaataagtgtcttggccgggcgcggtagctcacccctgtaatcccagcactttgggaggccgaggcgggcagatcgcctgaggtcaggaggtcgagaccagcctgaccaacatggagaaaccccgtctctactaaaaatacaaaattagctaggtgtggtggcacatgcctgtattcccagctactcaggaggctgaggcaggagaatcgcttgaagccgggaggtggagattgcggtgagccgaggttgcgcaccattgcactccagcctgggctacaagagcgaaacaccgtctcaaaaaaaagaaaaa

SEQ ID NO: 1242822 - DNA, 4001 bp, Homo sapiens
cttctggaaggactggaagattcctaccctcatcaaggctggcatttgcccctgcaaccttaggtgttggattttgtggtcatccagaatatatcccagccagttcacagtgctggagctattacagaacaccagaacagttcctgagggaccagtcctttctgctctgtcacgatgcttgaggatgtgcaccagctcggccaccttatctgctcccttcagtctcagaaatgtctgtttcacatgaggcatgatacagtggagcttggagctggtgatggtggtgacagcatctgggctggcgactttattcagcaactggcctacaccttcgggaaatgtggctcctaccagcactaactgagctttgggattgaaggggtcttccaagtcagctgggccttctgctatgtggctcttctctaagatgtagtccaccagttccaggaagctttcatccagcagtgtgtctgcctcatccaacaccaagaaggagagttgctccagactgatcagtcgacttttcagggccttccacagagcccctggagtggccacaagcacatctgctgaaggctgtctggacagctgcagcctgatcctacgcatgccgtggcctccctccaggtcccgcaccagcaggcccaaggagcggcccaagggttgggccacagcccgcacctgttgggccaattctcgggaaggaacaaggaccaggcctcggggcgcggggataggaagggagtccaggcttggctggcccaagagccgttgaagcagcggcaggaggtagctgagagtcttgccactgccggtttctgcggcgcaaacgacatggcggccgcgaagtagtgaggggatggtgctagactgcacggttgtgggctgaacgacttcaggcgcagcctcctgtagtgcgtgcagcacacggggctccaggcccaggtcagcaaagctgcccttagacgagagctttcgcaccgctggcgcctcctgttgcgcgcgctcgatggagaagtggtcccgacgcgcgcgtcgactcttccagccttgagaggctagcggcgcgcgctcccaacggcccagtgtgaggcgcgccggctggttcaactccggccgccgcgccgaaaccagcagcggtccgggtcgaaccagcaccggcctcgggaggttccgccgcctgctctgccgctgttccaactgccgctgtagagccactgggatgcgcaccaccggcaggggttcgtcgggactgcggaccgtgaggccccgtcgcggcgccaggagcaaccgagtcacgagggaaaagagccgcaccggccgcgttagagccatgtttcccttagtgcgggagaagcgcacatcagtgacgtcacggacgcgccgcgacctcgcgtacggtggctggcgaggctcagtacggtgtgtggagctggagcaccgtgaggaagaagcgaggttctttttaagagttcagctgcgaggtctgtagctccgaataggggatggcgacatccagacccggccagccttggggaagggcgcgtcgtggaggcaggactggaggctggcgatacgaggcggcagtggggccttgacccaatggaccatgagggcggagggcttctggcgattggttacctggttcctgggattctctttagttgttcctcattgccctgagatagcttgtcccgtgctggtatccgaggttgcagctgttttcccagatgtgttccctgcgcagggtctggtaatccgtgtttattgagagtttgaatgaatgatcaggcctaggggccgagacaggggtctgaagtcatagatctgggctcaacccctcaccctctctgtctgtgagcccagagtgcaagctgatggctttcagcttcttctctctctcaagtgggagataaggtcttcaggttttatttcaagttgggtcatcttttcttcacagttattttccttccttttaagccaaggttcactctctactccctcgtcacgcgtcccaacttctcatccagaacccacccctcttgcagcccgctcagctccactggcttccccgtcagaaacctgaattacctaaaatagtagtaagaagggtgctgcgaccctacaaagtgatcaagtacgtggcttatcatgtagccctggtcaggcagaatattttacctgaattcagatattcgggttgtaaaaacaagaactatacgagtcactttttttttttttttttctgagacacagtctcgttctgtcacccaggctggagtgcagtggcgcaatctcggctcactgcaacctccacctcctgggttcaggtgattctcctgcctctgcctcccaagtagctgagactacagccgtacaccacccacgcccggctaattttttctgtttttagtagagacagggtttcactatgtaggcctggctggtctcgaactcctggcctcaagcgatcttcccacctcggcctcccaaagtgatgggattataagcgtgagccaccatgcccaacagatacttcttgaacagatctggaaaatgggtgtcagatcttttctgtaatttgcagtgcctggggtgggagataaggtaaatatttatggattaactctctgggaggttcgtaacatctggagaaaacgttttagtttcatcaaataccaatgaaaagataaaaactttgctttttttggaatagtatgaggaaaaactttcacaattttaagtacactctacccttgtgctacacaattagactttctggagagttaccagataaatcagaggaagagaggctttttttctccacaagaaaatatctggaagtaggaagagaaagttttgagtagtgatgggtgaatgaacagtcattggatagggtagtggttctaaaacaagggtgattttgccctttccctcccaccatatttgacaatggctggatactttttttttttttttttttatagacagtctcactgtgttgcccaggctggagtacagtggtgcgatgtcagctcactgcagtctctgccttctgggttcaagggattctcctgcatcagccatctgagtagctgggattagaggtgtgcgctaccactcccagctaatttttgtatttttaatagagacagggtttcactacgttgggcaggctggtctcaaactcctgacctcatgatttgcccaccttggtctcccaaagtgctgagattacaggtgtgagccgctgtgcccggcccaattctatgctacttttatgattctttccaaactcagggcttctccttatccaaatagttccttggggccaggctcatgcctgtaatcccagctactcgggaggctgaggcaggataatcgtttgaacccgggaggcggaggttgttgcagtgagccgagatcgcaccattgcactccagcctgggcgacagggcgagactctgtctcaaaaaaaaaaaaaaaaggtcccttggatgtttgtcccaacaggtttcatccatttccatgtgccactgtttttcagatatcaaacaaagaattactctgtacaaagccagaacacatatatcaaagtaatcctgaagtatcagaacaaaataataggtatgtatatgcatttgggtttttgggttttgttcaaatatccagggtagggtagctggttaatatatagttgttttctcattatgcttgagtccttacaatatgattacctcaaaatttcacaggagttagagcttgcctaagcctgtctgtgtccgtggccactaatttcttcttgtcacatcactagacactgcctaccttttttccccctcactcacagaggacattgattaacttctaaatgttttctgagatatttttataagtagtgctttagaaataggaaaggtatccttattgtgaaaaaaaatctaagctcctgagatcaggagcttggtgtgttccttggatctcagttaataatggtatat

SEQ ID NO: 1242823 - DNA, 4001 bp, Homo sapiens
tcatccaggttggagtgcagtggcaccatcacggctcactgccgccttgacctcttgggctagaaggatcctcctgcttcagcctccccagtagctgggactacaggtgcatgccagagtgcccagctaatttttcatctagtttttctagagaggggtatcgttttgttgctcaggctggtcctgaacttgtgctgacacaaacttgcaaagtgcagtgggggaaagggtatttctgtgtcttttgacagaaatggacagaagtagatacaagagagaaaaataccctggcttaaacaagatagaggttataatttcctctctcctaagccctgcatggcactaatatcaaatatgatacctgagattcagcaagctacgtcgggataatatggcttttttatttattagagattttcttgtacgcattaaatgtgtactgatcggtatgactggcacaaactgtaccagatggatggcaaacttttgctgatctccaagttgcctttcctattcttaattattaaagattaattttgggccaggtgcagcgtctcactcctgtcatcccagcactttgggaggccgaggcaggtggatcatctgaggtcaggagttccagaccagcctgaccaacatggtgacactcacctctactagaaatacaattagcccagcgtggtattgtgtgcctatagtcccacttgggcgcactgaggctgaagcaggagaattgggaggctgaggcaggagaattgcttcaacccagaatgagactccgtttcgaaaaaaaactttttttttttcctgcagaacactcagagagaattgtcaatacctgtccttggagaacataatttaaaacttgttttctttttttgagatggagtttcactcttgttgcccagtgcaatggtgcgatctcggctcactgcaacctccacctcccgagttcaagtgattctcctgcctcagcctcccaagtagttgggattacaggtgtgcgccaccacacccggctaattttttgtatttttagcagagacggggtttcaccatgttggccaggctggtctcgaactcctgacctctggtgatctacccgcttcggcctcccaaagagctgggattacaggcgtgagccactgctcctggcaaaagatcaaaattttaatagaaacttgaaaatgttgccaattgaaaaaaagaaaaggaaaaaaaaaaaaggatccgcccattagccgagtgagggcaggtgaccggggaggatcgacctttgcccgggctgccttctcttgtgaacaccaaggcgtttgcaggaaaatgaagagctgctgggcaaaacctggcattcctgggccttctgggtcttccggaaaaatgatttcaacctaaaattttctgttaagaaagaggccaggttgggccgggcgcggtggctcacgcctgtaaatcccagcactttgggaagccgaggcgggtggatcacctgaggtcaggagttcgaaaagagcctgaccaacacggtgacaccccctctctactaaaaataaaaattagccgggctgaggcaggagaatcgcttgaacccgggaggcagagtttgcagtgagcggagatcgtgccactgcactccagcctgggcgacacagcgagattccgtctcaaaaaaaaaaaaagaaagaaaaaagaaagaaaggagccaggcaagacaggtttcctaacacgcgagccctcggggaccacgtgggggcgccggcgcccgcggaccggaccccgcaccaaggctgcgctcgcttcccaggccccgctcaccgcagcaggtccgggcagaagaggtggcggtacgcggggagacagtcgtccccctccacgtcgggcggcggctgggccatggcgctcccgtcggggactgcggggacaacgggcgggagcggcctcggcctccaggacccggcgcgcagctgcgaactcgcctggaaccgggagccccgccccactccccggacgccccgcccctgccctgattgcttcccggaggccccgcccctcccccgaattctccccggaggccccgcccccgcccgcggcctgctgggactggaagtcggcgcgcgaggcgcaggcgcattgcggggccgggggcgcggttcccgcggcagaagctcggcggtctgcgggtctcctccccgagtctttttcacaggtattcggcgtcagcgccgcgttcagagcctccaggacttgtgggatacccctggctcctgggtccaggccaggctcgcagcctctgggctccccgttcgcctccccgtaaacaccatggggagggccggggcccagggaagcgcggccagccccgcgccgcttcccaaaatgacccgttttgaggccaataaagaagggtccggggccgggcgcggtggctcacgcctgtaatcccaacactttgggaggccgaggcgggcggatcacgaggtcaggagttcgagaccatcctggacaacatggcgaaaccccctctttactaaaaatacaaaaattagccgggcattgtggcgggtgcctgtagttccatctactcgggaggctgaggcaggagaatcgcttgaacccgggaggcggaggttgcagtgagccgagatcgcgccactgcactctatcctgggcgacagagcgacactccgtttcaaaaacaaaaacaaaaaaaaaagggtccgttacttctgttccgcgtgggggcccgggcggggctatgccgcgaacccaggacggggcgccccgcccgcaccactgttggaagacgggggtccgcgacggccacgggggaaaaacacgcagggccgctcctgagctgaacacacccgcgggccagcggcttcaggggcgtgacagagccgccagcgctacagtaatggctgccaggccctttctgcgctggttggcctcagcccgccggcccctctctgccccttccccgggaaggcagcttctcctttggcgggatcacagcaccggctcgcgcctagcttgggttctccggattgcaggctggtggtctctggacccctgcctggctcatacatccaacaacgttatggaactgggtgtgcaaaacttcctctttactgttcaactccttacaacttgcataaaggcgtcatttctacctcagagctgggggaagtcataattagtgtaccacccatgtgctgggcacagtgaattttaatgcctcccctttagaggagaggttatgataatgtgaagacccccccccaccacaaaggttgtccggcactttggtgcaaaaaggattggtccaatcttgtgctggcttggggtacagaaaggcactgaagttggtggctcaaactcctctgggctggggtggggcagaggtgaacagggaagtaagtggtttgggacaggcaggtttggatgtgggcttgggttcttgctgacggaggtagttggtcctgcgtgggggatggggtggtaagggcagcttgagcctcaggctgggtggatgctgctgtgctggcccccgtctgcccagctcaccagctcactgctctggaaccacagctggatctcccgctgggccccctccacggagtcgctggcgtggatgacattcctgtgccaggacaggagcaatgtgaggctcaggcttcatgtgcaccctgaggaatcccagggaccatctgctgctcccgttgccctctgtctaggggagcaagcctgtgactgcagacagggaaggagtaacagtggagctgggaaaccgggttccagcctggcctcggcctcttacagcctcgtggacccgcccaggccccagcttttgggagcctcatttccccccaagttgccccgtgccaaccccttggggtgtcaggtaacaggcaacgatggcacggtacacacaacacaaagggaacacctcattgccctgtgtgccctgggagaacacggctctcaccagtgtgagctgtcat

SEQ ID NO: 1242824 - DNA, 4001 bp, Homo sapiens
ctgggattataggtgtgagctaccatgcctggcctattactgttatttttaagaatcatggccggtgtgtggtggctcactttgggaggctgaggcgggtggatcatttgaggtcaagagttcaaaccagcctgaccaacatggtgaaaccccgtctgtactaaaaacacaaacaaattagctgggcatggtggtgcatgcctgtaatccagctacttgggaagctgaggcaggagaatcacttgaacacgggaggtggaggttgcagtgagccgagattgtgccactgcactccagcctaggcaacacagcaaaactccatctcaaaaaaaaaaaaaaaatcagccctgatttagactctggttctccattgtcttgcctataaatcagggggaacacctactttctggggtggatggaagggctaaggacttgtttatgatgtcagtgaagccaggagcccagagctgctcagaacagactggcactgtcatcacatatggtgaccagcccaggaaaaaggtgcaggagctacgcctggggaagccgctggaaacctcctggtgtttaaaacatggccagaggagcgtcaaggaaggcacgctggcagggacacctccgttctgcccagcagctgtactctaggctaccagctctcctccgggctgtgaaaaaaggcatcttttatttgcctatttactgacagtcagtgccagccccaggcctggcgcacgggcaggggatgaatgaggggaggccgctggcctcgcagccttagcttctgctcacacagacctggggatgccggccacagtggccgactctgagcagaacgccagcctgcccctctcaccaggctcaccccaccagttctgcacccagatgtgggacttggcctcagaaaggagcgggcaggaagtggaagagtgaaagcaagaggtctggccaccccctgcccctcctctagagcccactgctctcatcggggaggaccccacaacttagcaatgaaaggaagccgaagaaagccggcggggttccggggcacggagggaccctgggccgaagctcaggacacgcgggatgcacggacctggcctcccgcgtcctgcccgcggcgtgaccaccaggaagcggtgtcatcactgcagctgccaccccgagaacctgagaagtcaccccggtgtgcggagtcaacagcgtcctgtctgcccatacctgcatcgcctgccagggcccaggggctcgcagggacaggatggccattcctctagggctgctggccacggaagcctggccgtgggttcggcacctgctgcagggagaagccaccccagcactgtgcctccccacccaccacacccgcgggagctcgcccggtctcccgggctcctcgggggcaggtctctcccacccacccgttccaccgagggggaaactgaggctcggagcagcccagggcgggggcacggccacgcgggtcccctgagccgcccgggtgctccgcacgcagctggtgtggacgccggagcagcggcggcgtccccggggtggggcggccgaggtctcgaggcccctgcgccgggcgggccgccctcccagccccgtccccgccggccccgacctcgccggccccgtccccgccggccccgtccccgccggccccgtccctcccagccccgaccccgccgaccccgtccccgccggccccgtccctcccagccccgaccccgccggccccgtccccgccggccccgtccccgccggccccgtccctcccagccccgtccccgccgaccccgtccccgccggccccgtccctcccagccccgaccccgccgaccccgtccccgccggccccgtccccgccggccccgtccccgccggccccgaccccgccggccccgcgccgctcacctgaccgccgcctcgcatctgtctcccggctgcgctggatccgcccggccgccccgctacgctggatccagccccgcgctcgctgctgccgcctccggcgcggaggttcatggcacgcgggtcgcgagtctgcgagccccggagtccgcccggctgttccgcgggcctgacctggggctgcgcgtcctgggtttcctctcatcgcagaaggcctgtggctgaaacccaaaccccaacacgtttaaaaaaaatgggcgggcgcggcggctcacgcctgtcatcccagcgcttcgggaggccgaggcgggcggatcgcgaggtcaggagatcgagaccatcctggctaacacggtgaaaccccgtctccactaaaaatacgaaaaattagccgggcgcggtggcgggcgcctgtagtcccagctacgcgggaggctgaggcgggagaacggcgtgaacccgggaggcggagctcggagtgagccgagatcgcaccactgcactccagcctgggcgacagagcgagactccgtctcaaaaaaacaaaaagggtggcttttaacactttttttaacctcagtggttgaggaggaaaaaggaacagagaaccaccgtgtgcaggtgccgccagccacctgcagggccccgcgggggcttcacggctgcagagggagggacccggcgcggctctaccctctttacacaggaggacgcgccacactgcgctcaggaggctgctccatgcaggcgccgggcagcgggacttcggaggcagctggtgtccgcgggccctggcgttattcctgctttcccgttgtttacacacagagcaggcctgctgctccccgcccccgtatccctactcttaggcttctcgcgtggaagattcagctgcccccgcttgtgcccgcagggaggagctgaggacagatgaaggccagcatatgcgcctggtgcgcttgccctgagctcgcgggctcagtttaccctccctgcagaaaggtgtggttttggctgcctctggggcttggtccactttgttcagtgggcatggtgatgacagtgccagtaactggaggcctcccaagtgggagccacacaccaccttgcagagaccagctcggtcggggagaccctaacccggcagcgctagaggaactaaagacacacacacacagagatagagaggtgtggagtgggaaatcaggggtctcacagccttcagagctgacagcctcgaacagagacttacccacgtatttattaacggcaaaccagtgataagcattgtttctgtagatattagactaactaaaagtatcccttatgggaaacgaagggatgggccaagataaagggatgggtctggctagttacctgcagcaggagcatgtccttaaggcacagatcgctcacgctattgtttgtggcttaagaatgcctttaagcagttttccgccctgggtgggccaggtgttccttgccctcattctggtaaacccacgaccttccagcgtgggcgtcatggccgtcatgaacatgtcacagtgctgcagagattttgtttatggccagttttgggaccagtttatggccaggttttggggggcgtgttgccaacaccatctcatttaaccctacggaagcctgggggccagcagtcacctacaggacaggcaactccatcggcccccccaaggccacatcgctcagaaagggtgcagtgagattccaccccagcttagggtggcttcggacgccgtgtccctccatgcactcagacctggagggagactgccctgagccgccgctctatctgctgcttcaaggtccccagtcctagagattccacgtccacctggcctctctcccagctcctccttctggaaaggccttccccatctcagctcccacctgggccccacagtacatcctcagcctggcagtgagagggaccctgggaagaagtcggcccccaccttcacctcctggctcctctccccaacaggccaggcccacccccacccccaccttcacctcctggctcgtctccccaacaagccaggcccacccccaccggggcccct

SEQ ID NO: 1242825 - DNA, 4001 bp, Homo sapiens
atacaaaaattagccgggcgtggtggtgggcatctgtaatcccagctacttgggaggctgaggcaggagaatcgcttgaacccaggaggtgagccgagattgagccactgcactccagcttgggtgacagagtgagactccatctcagaaaaaaaaaaaagaaaagattctgactgatgatcccaatagtttcatggtaacaagacagacacgtccagcttgaatcccaactctgctagctcctagctgtgtgaccttgggtaagtggataaacgtttctctgcctccattctcccatgtctcaaatggggattacaatagtaccatacagggttattgtcaagattaaagtagttaatactaagttcagagaacactggccggcacatagtaagcacccaataaatattgattataatttatcattattacttttttttgagacagggtgttgctctgtcacccgagctggagtgcagtggtgcgatcacagctcactgcagcctcaaactcctgggctgaaggggtcctcccatattagcctcccaagtagctggaactccagtgtgtgccaccacactcagctaattttttttaactttttgtagagacggagtctcactctgatgcccaggctggtctcaaactcctggcttcaagcaaccctcctgcctctgcctcccaaattgctgggattataggtgtgagctaccatgcctggcctattactgttatttttaagaatcatggccggtgtgtggtggctcactttgggaggctgaggcgggtggatcatttgaggtcaagagttcaaaccagcctgaccaacatggtgaaaccccgtctgtactaaaaacacaaacaaattagctgggcatggtggtgcatgcctgtaatccagctacttgggaagctgaggcaggagaatcacttgaacacgggaggtggaggttgcagtgagccgagattgtgccactgcactccagcctaggcaacacagcaaaactccatctcaaaaaaaaaaaaaaaatcagccctgatttagactctggttctccattgtcttgcctataaatcagggggaacacctactttctggggtggatggaagggctaaggacttgtttatgatgtcagtgaagccaggagcccagagctgctcagaacagactggcactgtcatcacatatggtgaccagcccaggaaaaaggtgcaggagctacgcctggggaagccgctggaaacctcctggtgtttaaaacatggccagaggagcgtcaaggaaggcacgctggcagggacacctccgttctgcccagcagctgtactctaggctaccagctctcctccgggctgtgaaaaaaggcatcttttatttgcctatttactgacagtcagtgccagccccaggcctggcgcacgggcaggggatgaatgaggggaggccgctggcctcgcagccttagcttctgctcacacagacctggggatgccggccacagtggccgactctgagcagaacgccagcctgcccctctcaccaggctcaccccaccagttctgcacccagatgtgggacttggcctcagaaaggagcgggcaggaagtggaagagtgaaagcaagaggtctggccaccccctgcccctcctctagagcccactgctctcatcggggaggaccccacaacttagcaatgaaaggaagccgaagaaagccggcggggttccggggcacggagggaccctgggccgaagctcaggacacgcgggatgcacggacctggcctcccgcgtcctgcccgcggcgtgaccaccaggaagcggtgtcatcactgcagctgccaccccgagaacctgagaagtcaccccggtgtgcggagtcaacagcgtcctgtctgcccatacctgcatcgcctgccagggcccaggggctcgcagggacaggatggccattcctctagggctgctggccacggaagcctggccgtgggttcggcacctgctgcagggagaagccaccccagcactgtgcctccccacccaccacacccgcgggagctcgcccggtctcccgggctcctcgggggcaggtctctcccacccacccgttccaccgagggggaaactgaggctcggagcagcccagggcgggggcacggccacgcgggtcccctgagccgcccgggtgctccgcacgcagctggtgtggacgccggagcagcggcggcgtccccggggtggggcggccgaggtctcgaggcccctgcgccgggcgggccgccctcccagccccgtccccgccggccccgacctcgccggccccgtccccgccggccccgtccccgccggccccgtccctcccagccccgaccccgccgaccccgtccccgccggccccgtccctcccagccccgaccccgccggccccgtccccgccggccccgtccccgccggccccgtccctcccagccccgtccccgccgaccccgtccccgccggccccgtccctcccagccccgaccccgccgaccccgtccccgccggccccgtccccgccggccccgtccccgccggccccgaccccgccggccccgcgccgctcacctgaccgccgcctcgcatctgtctcccggctgcgctggatccgcccggccgccccgctacgctggatccagccccgcgctcgctgctgccgcctccggcgcggaggttcatggcacgcgggtcgcgagtctgcgagccccggagtccgcccggctgttccgcgggcctgacctggggctgcgcgtcctgggtttcctctcatcgcagaaggcctgtggctgaaacccaaaccccaacacgtttaaaaaaaatgggcgggcgcggcggctcacgcctgtcatcccagcgcttcgggaggccgaggcgggcggatcgcgaggtcaggagatcgagaccatcctggctaacacggtgaaaccccgtctccactaaaaatacgaaaaattagccgggcgcggtggcgggcgcctgtagtcccagctacgcgggaggctgaggcgggagaacggcgtgaacccgggaggcggagctcggagtgagccgagatcgcaccactgcactccagcctgggcgacagagcgagactccgtctcaaaaaaacaaaaagggtggcttttaacactttttttaacctcagtggttgaggaggaaaaaggaacagagaaccaccgtgtgcaggtgccgccagccacctgcagggccccgcgggggcttcacggctgcagagggagggacccggcgcggctctaccctctttacacaggaggacgcgccacactgcgctcaggaggctgctccatgcaggcgccgggcagcgggacttcggaggcagctggtgtccgcgggccctggcgttattcctgctttcccgttgtttacacacagagcaggcctgctgctccccgcccccgtatccctactcttaggcttctcgcgtggaagattcagctgcccccgcttgtgcccgcagggaggagctgaggacagatgaaggccagcatatgcgcctggtgcgcttgccctgagctcgcgggctcagtttaccctccctgcagaaaggtgtggttttggctgcctctggggcttggtccactttgttcagtgggcatggtgatgacagtgccagtaactggaggcctcccaagtgggagccacacaccaccttgcagagaccagctcggtcggggagaccctaacccggcagcgctagaggaactaaagacacacacacacagagatagagaggtgtggagtgggaaatcaggggtctcacagccttcagagctgacagcctcgaacagagacttacccacgtatttattaacggcaaaccagtgataagcattgtttctgtagatattagactaactaaaagtatcccttatgggaaacgaagggatgggccaagataaagggatgggtctggctagttacctgcagcaggagcatgtcctt

SEQ ID NO: 1242826 - DNA, 4001 bp, Homo sapiens
caaagccaggtaatgcaggagaggggtggactcagcctgcttgcggtgaatggcattagtgtccattttcctaaaggagcccttgcccaccatatctcagcatcccctcttcattgccacttagaccctgtgcccagtgacactccagtactgtccagtctcaggggctgagccaaggcgttcctgcctgccctgtgaccctcaccagacctggcagctgcctgacagcttgtctggctcacgtgttctctctaattgagtctagctgcctctcttccttgtgactatgaccaagtcttactccttcctggaccttcatttccctacctctcacatacacagtgggctggatgctggatgcaaagctccctcgtcacagccccaaagacaggacttgaccatctcagtgcaatgaccctgtggtgccttctcccgaggacctaagagccccctgagcgcttgcaaacactgcagacaaagcgagccctggcaccagctccctgcctgcctgttctgtgaagggagcctacaaaactggcagcccctgcagttctgagctgcagaactgatgagctggggcaccctgaaacctgactccaaaatagcagcaaacccaaggccaaaaggaagtacgggcttctttgcttgcgatttctcctctcacagctttggcctagagcccctgcacttaatccccacccagctaccccaagggccacagtacaaaggtgattcgtgcctggctccctgtgtcttctgacacccctaaatctttatccttctaggacaagcgagaatcccccaaaagccaaggtcatcatcaagccaggatgaggactggaggaggagctgacagctctgcctcaaatggatttgggagcgaaggctttttccataagctttgggggtaagtcacagagctaccccaaatgtaacttagtctcggggtctccttccttttcaccagctgtcccctttgctggaggaagctttccagcccaaacgaagggcttaagaggagtctggccattcctggcatccagttagacctggaggaggtgaacggaggagaagcctgagggaggggtgtgtatccggcctgggaattcctccctctcccttgctagcgccccaacccgccctcatcctgttcagagagggcacttacaggcctcggaggcaggggagggtctcctcctggggaaccatccccgtccagatggtgcccccaaccagctgcggcggcatgatctgggcggctggtccagggcatgggttgcggatcgtgtagggaagaggggaacagcagtcgagaccctactccaagtacgcatcaaagacgtcgagctccgagtcagcatcgtaaaggcccgagccggggtcggagagcacgccgaggtccacgagcgcctggtccatgtcctcgggcaggaagacgaggcccacgttgaggacgatgtactccatgaggaaggcgtagtacaggatcagcacattgacgaagaacaggcccacgtagaacatagagggcagcagcggcggcggcacgtaggggaccagggggcccagtgcgtccaggtgggccgcgacccgggcgccgagcatgcagcgggtggcaagggcggcggcccggcgatcccggcgaactcagccgctgcggcgcccgggcggccggcgagggcacagcgcagccatccaggggtaccctggagcccgacagaagcagggccgggctccagatgtcccctggcaattgcgccccgacccccgaaatgcgccgggcgggtcaccgcaccccgagatgtgcccccaaggatctctcgaccgcccgggcggcgaggcgggcccccctgaagtggcccgcggctgcccggctccctcgtggcgcctccctggcgctcgcagggcctcgcagagccggtggggatcccaccgcggctcagtgtctagggccggtcccggcagccttctctcccgccccgccccgcaggtcctcgcgcaccccccgcgcccccgcaggcccagcacccatggctgcggccgccgcgtagccctcccggtggcgctcggagctccgcctcccgaggggccccgagctcattggcaggccgccccctgcacgcgctaattggccggctcaacgcccgcgctgattggctccggccgccagggggcgggtaccgcttcgctccgcccctcggggccctagcgtctgagttgctttcctggttcgggtctgccctcagatctcaaatcgaattcgctctgcgtatcgaatagggggaggtaaaagagactgaacacagttcaaacctagacataatgctaaggccgcaaaagccgaaggaaacccgggctaccgctgcaccttgctgcatgcctctttgggactccgtttctcctttaaaaggaggcggggtcggggaggggcgacggacggttgccctggaaattttggacattcccaaagcgccaattttcatggtggagatccaccagtgtccccttcgcttctccaaactctggttgctggaaggtccgcccactacggaacctgcatcctagagttaaggaacacctgaataaagagattccgaggtagttcagatcttcaaccataaggatgctttttgtttctttttactttgtgaatcatgtttaaaagcaataatacacatggctaaacattcaaacaaccgtgaagtacacagaaaagtgagtctctcccacccactggttcccctgctcttgggtaaccgttgcatgtctttcaggaaaacatgatctcgcccaaagagccttccaaagcagttcaagaaacctttaaatctcaggccacactgagctgagtattttacatgcatcgcttaatcggaggtatacaaggcagtgtagtatgtatgtgcgtactttttacagatgaaaaatacgagcccagggatcctacatttctgagcctgggtgtgtttctttggaggccagatcctgttcttttttgctccatgactttgtcttgccccactctatatgaattacaggacaaaccattaactctccactcttatccatttctccaactgctgaaggtgaaacaaacctttactcattcatgcactctaccaatatttgttaaacacctgctatgtgccaaaccttgtgctaggcactggggagaacattggcctctggcccagttctttcttgagcagagttaatgggacacagtggacctttaataaggttgatatgtagaagtgactgaatgaatgaatggatggtaaacttgagaagtcttgcccacactgaacttaccacttctaatccagggtagaagttagatatattctggctcatgcagaaagttgggtgtttcctttttcattttaacgtggtactttgggaaatagcatggattctggctgaagaccagaggaatcctctggaagtacaaaatgttcagtttggtgcattgttgcatccagccttttccaacacacacacacacacacacacacacacacacacacacacacacacacacacacacttaattgaagtggaaaaagaaaaaggctgtcaggacaaataaggttgttatctagtgccgttttggtttataaagggaatgaaaaataagggtgcgtgcgtggttatgaaccctggttttgccacttgttaactgcatgatcttgggtaagtcaacctctcagtgactccgtttccctgatgataaaataggttcgataatagtacccaattcataggatggttgtgaaaattaaataccttaatatgtaaagcccttaggatagtggctttgcatagtatacaccatccaatactattcttattcttattataaatctagtaattgttactacagtggtgactttccttgacccatctacgccgattccctctccgggactgcgcccaaagcttccaattcccgcccacccggaggattctgcggtcgctcctcctctcgccccgccttttgt

SEQ ID NO: 1242827 - DNA, 4001 bp, Homo sapiens
tgtatacatacaaagacattatacatatattccatttcaaggtaacgggggtgtaaaatataaaacagaagcttcagatcttattggatcaaaagtggttcacaatgcttttctctatcactgccacatgctgagttattcattcattagttcagtcattcatcaaatactgattgagcaaagatgacaaaacagatcttgcccctaccctcatggagagtgtgatcttatgaagcgacagacagaaattaatgatcatgcaaatatgtagtcatagcaactgtgatgaaggataaaaagtataaggtaatggaagtattcaacctaatcttagaggtaaggaaaggcttccttaaggaaatgacttaaagctgatactcaagggataaacgagttgatgggggtctctctgaacctattctggttcaattatttaaaaaaatagttaaccagaaggcagtacggagaggaaaaagtgtaaaggctctctcagtagcagaagagaatgaaaaagggagaaagtttggaacagaggagtgagggaaagtaaggcttaagacgaggcaggagaaaggagcaggagtcttggccaaaataaagatttgggttttgttccctaagccaggaaatgacatgattagatttgcttttaaggatccttccaaactgctaaagacatgtagatcaagtattcattggctgggcgcggtagcccacgcctgtaatcccaccactttgggaggctgaggcgggaagatcccttgaggccaatagttctagaccagcctgggcaacacagtgagatcccatctctctccatttatttattttaaaaagagactcaggccgagcgcggtggctcacgccagtaatcccagcactttgggaggctcacgaggtgaggagttcgagaccagcctgaccaacatggtgaaactgcagtctctactaaaaataccaaaattagccagtcgtggtggcgcgcgcctgtaatctcagctacgcaggaggccgaggcaggaaaatcggttgaacccgggaggcggaggttgcagtgagccaagatcgcgccactgcactccagcctgggcgacagcccaagactccgtctcaaataaacatataaaaagaaagtcaaggttattcattgcctcccttggagactgtactcccccccaccatgtcaatcaacaaatatctgaacacctattttttttttttttttttttttttttgagacggagtctcgctctgtcgcccaggccggactgcggactgcagtggcgcaatctcggctcactgcaagctccgcttcccgggttcacgccattctcctgcctcagcctcccgagtagctgggactacaggcgcccgccaccgcgcccggctaattttttgtatttttagtagagacggggtttcaccttgttagccaggatggtctcgatctcctgacctcatgatccacccgcctcggcctcccaaagtgctgggattacaggcgtgagccaccgcgcccggcctctgaacacctattacatacggggatacagctaagaacttttcacagagacccccgcccctaacaaaactttacctaaaagggttgggagcatgtcctactctagtttcattccccgttggatccggcacacaacgctaggcggtcatgtgttcactaagcacccctgtgccaggctcaaaaacatggcccaggcgcagacactcagatcagcacccacccagacctgcaggcgctgtctgcacacgcctgaccgagtccacgtgcaaatgcacacgcacgagcatttgcaggagaccccggaaacacgcacacgtcccaggggggcccacactcccggagccgccttcggtccatgcctcgcccggcctgactctccgttctcgccctccccggtccctggtcccccatccacactgctcactcgcgggactcactttcaggtgtctccacgccatgctccttccgtcattaagcccgcccctgtctcccttccattggaggagatggtggcggcccctcttgtctccgccccttagccgccaacccaccagtcgccgggcagaagggttgagaggacgcctccgcgcagcggggaaggcccggcaccacccccaggttctggttgggtgcacgtgcgcagtagcggcggccacgcctcttccgcccgccctctcccagcctgcccgcttgatcgccggctgttggcggagatgagatgccgctgcacggtgtttgtccgtactaccgcagcctcgaatccaagagtccgcgagcatcaaaacactgtgtttcacaccagaaatatttgtacagtttttatcactttaaaaaataaattttactgctgtgttgatataaagatgaatatgttaatatataaactttttcaacttaaaagttgatttttcttaaggttttttaaggaaattaaaacattttcttgaggccgggcatggtggctcacgcctgtagtcccagcactttgggaggctgaggcaggcagatcacttgaggtcaggagttcgagacctggtcaacacccaaaaccccgtgtctactaaaaaataaaataaaatacaaaaattagccgggcgtagtggcaggcgcctgtaatcccaggtactcgggaggctgaggcaggagaatcgcttgaacccagaaggtggaggttgcagtgagccgagatagcaccactgcactccagcctgggcgacaaagcaagactctgtctcaaaaacaaacaaagaaaaataaccaaaaaaaaaaaatttcttgagatcctaaaagtgtcagaggcccttccctggccctgcgcctgttgtgcctcctggagaaagtggccctggttataccttggcattgtggtgcaacagatgtggaggtatttttttaaatactgtttctaatcaagaccctgagtgtgcaggcccgttggagtgtggtttactgcggtgatttttttttttttttttttttttttttgacagagtcttgctctgttgcccaggctgcagtgcagtggcgcgatctcggctcactacaagctccgcctcccgggttcacgccattctcctgcgtcagcctcccgagtagctgggactacaggcgcccgcaaccatgcccggctcattgttttgtattttagagacggggtttcaccgtgttagccaggatggtactgcggtgatttatgacgacctaatgtgtcactttgtagtcctctgaagcaatcgtgccctcacgaagaattttgaaatgtcttacctaatgatgtcctggccgttggagaatagcctctgtagacttaggtgtcaacagcattaatcagatacttattgtttggaggctctacacccatccgtgtcatttttgtccagttgcagtgttcccgccatcagctgaaatagctgggttattgtcgtagcagaaattagagcaaaagaaaggtgtatgaaatatcttgagtcaagccatttttgagcttcatcagttgtatgaagctatcaaattagaacaaattcacagacccagctgagacttagagacagattctactgcaataatttacatgctaggtgtttcagtctacatgcaatagaaatcattgaaaacatttatcaaggtaaaagttatgcttatcaacctgtcttccctttacactttaatggaataagttaattcagcacaccttagtcaacataaatcattgctcatctgggacaaaaaactacttacatgtttatcctcagttctgagcactctctcaccaattttttggtcgtttaaattaaaacttttattgatagagtgcttgtgtcttagataaagcatgtattgaaagaatatatacaaggactttaccctttatgaaaaggattgaaatgaaattacagcattgtgtaagatacctgacttgactttcagagatttcatcaacatcaggtttcatttaaaaatgcttgaaacggtcccagtc

SEQ ID NO: 1242828 - DNA, 4001 bp, Homo sapiens
tggtaagcaaataacttaatctttgtttagccataatttcatatctattaaatggaaaaaatttttaccttatctaatccatgaagctattgtgagaatcaaacaaaaagtgtatgtgaaaccataaagagtagctctttatgtaaccataacagttaacataaatgtaactgctacattgtattatttgctatcctcctatatactgttggtccctcacccatttttttacatgagttctacctcttcctctctttaaacaacaggtacagcagcacagagatggggcagaaggctaccgtccatgttctccatactttagtggcttttcttggcctagctgcgttttacagaaaacaatttactcacagcagccaaaatcagtttaataacaatccatgttcaccaaaaatatttatgagaaacaccaggttaggaaaaggtgttactgagaagtatttaagtggctacaagacttctggcactcaagttggaacaagctcctctttacctctcactacacatctgccactcatcaacatatatcagttctggatgcttggataattcctctcattccaacaagttagcaaagcaaaggagatgccaccagaatccagaattgtttaccaaactctaattaaatgcacagctctacagagtattgccaaacagactggacacataatattaatgcagaaacaagagttacattttgaaaatgccatcaggcagaacagaaaaaaagaaagctgcatattggtgacatctgtgcgcatgtgaggaaatccacacaagaaggtaaagatatacaggctctactcaatagttgtctaaactaggaaaggtaccctggactgccattctacgcagttgagagaacactggatgtgttgttgactgctgtagctcaatgtctagcaaaataagcgtttgataaattaaaaaatgaattaatttaaacttattaaaggaggacaggaacccaaacatttctggagacagcaagggaagattccagcaacacaggacaaggagacagccagagagaacttcattagctgctgagacgaacaaataaggagctaaagagcaagattcttgagaaggattaatggcaaagaaactacaaggcgtacgagaaagccagggaagaaagaacctggattcattcattcaacaattattcactgagggtgtccctgagccaattgctgttctcggcgatagcaacagagaacaagacaaaaatccccgcccacctggagctgacattctagtagaagagatcgcccaccagattgcctggtataaatgacactgtgagagagcagaggaagacacaaggagtcctactcgggctcggtgacagtctggggtgggttaaagcggaggcctgggagagggaccaaggccactccaggcagcatccctggatctcagcgaggccgctccaggcagcaggatttgaccagagcaaggaggaaggccaaggcggccaggacggatgcagcatccctgaggtgagtaaggcaaggtgggtgacagggacgacagaggaactccccaaactggggcccggacctgagcaggggaccaatatccgccgcctagagccgccatgattacagaagggcaggccaggaaggaagaagggactctcacctcaccaagcgcgactcttgggacccttctgtcccggattctggggcgccggcgctgccacccctcgctcagacaggctcaaggagccaaaatccacaccttgaaagcggccattattgtcccttaatactttgcgcgccccctctatccgcccaaagctaccatagagagcagcctggaacacgcccgattcctggatccaagtgtggaacggtacgccaacaggctctcaaggcctcctctggggctctgatcagacacttccgagtctccttgtgaccaatcactcttagcctaagagactacatcccgcctctagtctgggggcaggaaaaggaggggaaaaaggtcgaccatctttaatacgggcggaggtgacgcctagcttccggtcagagccgagcaaggtgggcggtgactagaagctcttccgtttattgggctgttgagcgggggccgaccgacggccaggagtttcttttctgcgcttgtgcgttttctgttcggtttccttcccgctagcggggccacgagggttgctaggcaacagcccctgggtgacttggtcttagggtcctgtccggcttggggctgatgaaaggagctgtccgcgcccgggctcttccgagaagtggttgctgacagccacaaagtgaaagggagtgaggcggcgtggacgagtaaggtaagtgctggggtcccttagcgcttgtgggccaggagcagcgcaacacaggtgactttaaatatgtatatcggatattttggaaaatggagatgcgcgcccggctgtaaataaaaatcacccatgcgttcacacgcagagatgaccactgatttccagttgtttttctggaatacattgtagtaagattctgtacaaaagtgagttcaagctttttttctttttttggtgtttctgcagttgtggcgcgcgcctgaggttccagctactcgggaggctgaggcgggaggattgcttgagcctggggagttgagaccagcctgggcaacatagcgaaaccccgcctcagaaaaagagagggagagaggaaagcagtggagttattggtcaaagagtatgtcagttttctttccagaaaggttttgtgtctgcattccagcaggaactccctgtgcctgcccctaccactatcttgtttaatttttgccaattcagtgactttgtaaacatatgttttaatttgcttttctttgcttactggtaaagcttaactttttagtttatttactgtccatttgtacgtcttcttttgggaattctctgtgggtatcatttactatggacattttcttagatgtggtctcagttttcctctcctgcttccaacgtttgtccagttgcacccctagcctcaccactaacaactttgttctccccttactttctcctttcgatcagtaacacggaggaactgctgtttgtttgaattctagtgggacagatccgtcttctctttgaccttccctttcattggtaatttgttctgctgctcacatctgatgacgtccctttgggccatcaatgtccctgtttaaagtatgacctatagctggaacaatcttatttcctatgtgaattttagttaaataattcctttttttttttttggagacggagcttcgctcttgttgccttgcccaggctggagtgcagtggagcgatcctagctcactgcaacctccgcctccagggttcaagcaattctcctgcctcagcctcctgagtagcttggattacaggtggcatctgccaccacgcccggctaattttttgtatttttagtagagacggggtttcaccatgttggccaggctggtctcgaattcctggccataggtgatccaccctccttggcctcccaaagtgctgggattacaggggtgagcctggcctaattcgtatcttaaaatgtgacttgtgacaaaaaaaataggaaaagaaatcctcccttttcatatttggaactgaattcaaaataccgaccatctcaatggagtctcttatagatgaccacaaaactaagcttctttgtcaaagagtttctcaaaaatgaaatttctaccaatcatgaaaatagattattgtagtagaaggacccctggactagaaatttggtggcctgtattctagtccttgtcattgtagtagaaagtgcaactgtaagcaagctagtttgtaaaatgacggggttgtattaggtcccttgtacctcagtattttattatttgtttatggtattgtagttttcacacacactcttaattgatctgtttgccgtgtaatgaggtgcacctagtaaggtgcacacgaa

SEQ ID NO: 1242829 - DNA, 4001 bp, Homo sapiens
acagataaatgtttgtggaaaaaataaagaataagcgctcaatatataaatattaatatgtaattaataacaagagctaccatttaataatggcccactatatgctgggacatttaattataattctctccttatactcctgtataattattccagcttacagatgaggagactaaggctccgagaggttaagctctgggccaacagccataaagctggccagctgctgagcctcaacttgaacccagtgtcaatggctccaagaccagtgtctttccactgagtaatgccagttccctatggctcctcatacaaggttcatctggacagttgatgcttaagatatatttgttgcctggaacacaaatcagctggtttatttgttgcctgcgttcagaaactggaacacaaatcaagtggttttttaatgtaatcactaaaaggtttcctttagggcaccaagtctagtgggagcagaagctgaagccaggcttccttctttccttttttttttttgagacggagtcttgctccattgcccaggctggggtgcagtggtgtgatcttggctcactgcagcctcagcctcccccttggctcactgcaacctctgcctccggggttcagggaattctcctgccttagcctcccaagtaagtggaattacaggagcacgtcaccacgccctgctaatttttgtgtttttagcaaagacagggtttcaatatgttggccagactggtctcgaactcctgacttcaggtgacccacctgcctctgcctcccaaattgctgggattacaggcgtgagccaccgtgcctggccatgaaggttatctttcaagtccattctggcaaactttggtgaggggatcacacactgaccccagaaccaagtcttcattcggactctctaccctaggtcaggcactggactagactccaaattcaatcaagatgtcttgccctgacacaacatgcagtctggagggagagaaagcctttgatcttacatagtgatagcaataaagggacacatttaaagcatcaaagttgggaccagggagaatagcgtggtgggttagggctggggctctggagacccagactgtctgggcctgagtctggtgggttttgtttgcttgtttgtttgtttgtttgtttgagacggagtctcccactgtcgtccgggctggaatgcaatggcgagatcttggctcactgcaacctccgcctcccgggttcaagcgattctcctgcctcagcctcccaagtagctgagactacaggcgcccgccaccacgcccagctcattttttgtatttttagtagagacagggtttcactatgttggccaggctggtctcgaactcctgactgacctgatgatccgcccgcctcggcctcccaaagtgctggaattacaggcgttgagccaccgcacccggccaagtctcttctgtcactgactagccgagggttatctgtttggtgcaagttttgtaacctcttaagtatgtttcctcctcagtacgaaatggcgagagaagcccctactgcagagcgttgcttgctaccattattattattgttattatttggctgtgaagatcgggtatgtggtgtgggaagggggctggagcgcctagccgtgtctgcccctcgcccaccgccctccctggggggcagtcggcaccttccttgcagccccctcggcctgcgctcccgtggtcacccgcagactcctccacgccgggctcctgcgcgcaatccagctctgctgcaccacctgtcgcaggctccgagggctcagggtgcatgtttacttcggcgacaccgaacgccccgcagctttggggggcccaggttcgcggcggacgtcgctacggccccagcccagccagagagtaccctctttccttcttcgccagccgctggcgccctagtctttacagcccaacgcttccccggtcgcccaggcaaccgctgcgcacgcgcactcgggacggaccggcgcgctggggacgccggggggtgggggcgggtctgagacggctccgcccccggcgcgtacgcgggtcacgtgagggcgcggcgcggcagcagctccggcggccgagacgggggcggcggccgcgcgggtctggcgggaccggtttggaagactttgccggcctgcaggtaccgcgccccccgcgccctgggcgccctctcgcggtcctttcgccccagacccctcctcggtcccctcagcgccagccggctgcttggcgagacccctctgagctctcaccacgccccccaggccccgggccccctccgctgcatccggccccgaagccccttggcgcccctgaccccaggaaatcttcgtccctccgtcccgtgagactccttccttcagaccaaaaagccccagccccgccccttcacatctcagagccccccttcccccggctccatcctcacgccccccgccgcggcgctgcacccctgttctctctcttcccccgggccttgccccccaaaccgcgaaccccgttgtcgccggcgcatgccctgccctccctgcagcctctcacccggctcctcccccgagcggccccagcaatcgcctcctttgtcggtgcttctttattctcatttctgaacgatttggtttgagttgttgttgccgtgtttttctaaaatggaaatatgcagcggtcgtgggttcagccaggatttccgagtttgctcgtgttgactgggccttgccgggtgctggaggggaagggctgggaagaagaaccaggcaggtccccgttctgaacgtgccacccagacgcagccccagaaaccggatcgctgcagcgcccctcggcgatcccaacatgatgtgtacaggtgactgcgaggcagtcggggggtctcacagtgggctccctggacaggactctgcgccttgctatacctccatctgaattgcaggtagcccctttctgagttgtggggtcttgggtgtgcgactttacatctataagactcaatttccccatctataaacgggagagtctgactgcgctttataagattaatgagagaataaagtgagacaataggaataaagcacttagcagagtcttttgcataaagtgagctctcaattttactctgaccgccacaggagagagagagagagagagagggagggagggagagggagagggagggggagggggagggtgttgattgattgattgattcagacaatctcgctctgtcgcccgggctgtagtgcaatggtgcctgcgatctcagctcctgctacctctgcccgccatcccgcaccccgggcccaagtgattctcctgcctcagccttccgagtagctgggattacaggcacgttctaccacacccagctaatttttttttttttttttttagtagagacggggtttcgctgtgttggtcagggtagccttgaactcctggcctcaagtgatctgcccgccttggcctcccaaagttctggggttacagacatgagccactgtacccggccaagtttgtggttttaatcactgctggaatattctagggcaacagagttgaacatattggtgctacttttttttaaagtaggttttcaaaaatcgaaatgacttacgcatgacataaaatttatcattttagccattttacagtgtataactcagtagttcttgctatagtcacaatgctatgcaaccatcaccagtaactaattccagaacatttaatcacctacaaaagaaaccccaaccccattaacagtcatacctcttttctccccctgtccctcagcagccctaagttatcttctgtctctatggatttgcttatgctggacatttcatacaagtggaaacatacaacatacggccttttgtatttggtttctgtcctttagcataatgttttcaaagtttatccatgttgtagtatgtatcagtacttcatgcttttttatggctgaat

SEQ ID NO: 1242830 - DNA, 4001 bp, Homo sapiens
gcctcagcctcccgagtagctgggattacaggtgcgcaccaccatgcctggctagtttttatatttttagtagagatggggtttcaccatgttggccaggctggtctggaactcctggcctcaagtgatctgcccacctcagcctcccaaagtgctgggattataggtgtgagccaccgcaccctgccagctttttgttatctaaagacttattttccaggttgctatggccacaggcaaagaggagaggtcggtcaacacaggtccctgtctggaaagtggctgagaactgtgcaacagcagaccaatggttgggcttatccctctctctaatttatggttgaagccatggttcagagaggttacttagtcacacagtaagttgccatcatgctctatagcagtggttctcacctcgggacgatggggccttccaggggacatttggcaatattttgagacacaactggaggtgggggggggcggttcttgtaactggcatctaatgggtagaggctaggatattgctaaacattctacaatccacagctcagaaacagaattattccgccccaaatgtcaatagcatactattcagaaaccttactctatagggcagatttggggccaggggaaacaggggctcctgctccgacttggatccatgcaaaccgaggaatttggattgatttatcttgtctctctcagcctggactttttcatgtgtaaaatggacatccaatccatctgaaaggatctcactggcttatgacattcgcatttgagcagtcatggttaaaaacttccagccagggtgatacttcatcacgtgtgtgtcttgagcgccagagacgttccagagcagctggttttaggcatacaggaggggaaaccctgacacccttggaaaactcattctcggctgccagtctgcctgtcttgaaggtggtctgagctttctcactccaagccagtcgtgtgggaagggacactctctgagcctcagtttcctcagctgtcaacctctcagggcttgttctagtggctccgaaagccagtgggagcgagcgcgctttgcaaagccttgggcgccgggccttggcgcgcctttgccggatccttccggccacgggcggggcgagcccagaggagaagagccgaggggcggtgcccgggccagggggcggaggcaggcggctctggctccctctcgggacgctctttccttcttcctcttgttcctcctcctgcctctcttcgcttcgcctgcaaacgcggtgggggctgctcggcggtcaggagcaggtgagagctcggagcttgggggtgggggtccgggtgccccgggtggctagacccctctcgccgggcggggacagaggaggagcgcgggggcgacggcgtgagcgcgctatcggggtcccacgcccgtagctttctgccccggggttagtgtaaggggcgtctcctgcttatgagtcgccgggacggggctgggagcgcacgaggagacacgattcctccccacccctaaatgcacactcaccccgccaccccccaacacacacacacatacacacacacactaccactagattaggtaaaatggtagctagcaccaccacaccccgagactgtgcccctttctggggaacctggggaagacgtcgaggcaaacctccctaggattattgaaaacgggcgccttcctcaccacccagcccctcttctccaccgaggtccccttccccatcgctgcagagagatctgcaagtatcaaagggggcttctttacccccaaattaataactaagtactcgactcccctctgagttcccattattcagtctctgtgccttctgggacgcggaccccctctccacctgcatttcactcccttcctcctctccttgggtctccctggcttttgaacgctgaaaggctgggcccggatggggaggggcggccagtgtgagctcgaggcgccctgtagctcccatcccccaaccagagatgtgacccctcctcccagcttgaactttcgaggtagccgttttcccctggaggttcgggggtgggagggccaggagatttatttggagccttggaaggggaaagggttagctggtgttggcctggcccagtcccccaggcgtgaagaaggcggggcactccttggccgcgccgggttctcgctttcccttctcgggagacagctccgtgcctggggaggcccctccgaggagtgagtgaccagggggtctgggaattggtggccaggtagacgcatttgaaggctgtggccgatggcattcgccccacgcactctctcatcggactccccaaaccggtctgggtggcacttgaggctcccaggccaaaggagacctgtaaggggaactccgcttgtttctgcttgctgcagagatgagattatgggaactgagtgctgggaacatcccaagttcaagacctacgccagaggcagcttcaaagagagaatgtggggtggtgggattagtcccctcctcaactttcccctccaaagggtttcttgttttacaaaagggaagtagcagaggatgtctagctgggatgattaaaatgtgctttaatttgcatactagaccctgtacagcttagtagtagataaaattaccccctatatgataaataaatgtgaggatctctcaattaattttggccacgtggacacaatcttttaagcatttgtactgtaggtcaggtcagtttaaagggagaaatggaaaagatatctctgtgtccagccagttctgggaaatataaaataagaatgattttttttttatatttgaaaactcaacaagggttaaaaaatatatctaatttaaccaattgcctttattaaaaataagtaaaaattgtatgagattgggacacccctcaaaattccaggcagtttagttagagtataattactgtggtgaggtctgcccccgaggtgcagttctccttagcagggatagacttacccacaagtaagtagatgatgatgtatggaatgatggaattgggagccaacctgtacagtaataaagaagagaaacaggtcaaggctactgttgtacaaggaaagctttctagggagaataaaaggcaatgagatttgaaatagtgtgttcagctttcttgctttctgtatattttcagcattttgtcaagctaaaaaataaacataagctgtcagagataatactattaacattttatcatctttttttaaaagtatcatacacatcttttcacatcactaaacagtcacactatcattttaatgactgaatttatcattatttaaccaattttctcctaatggaaatacagttagctactttccaatgttttgctagtcattatatgttataaacagggatgcaatgcacagccttttagtacattttgagatacctgttggattatttccatcatgttcctggaatataaattcctggattgaagtgtgtgcaatctgaaattgttgtgaatattgccaggttaccctccgtctgcatgcccaccatcaaggtatgaggatggtagaagctctcgtcgaaccagatggatgaagaccactaacggcttttgtttcctctggtaacagcaagagacagagcgacatgagagattggaccgcgggctgcactggagaatttactggtaggataattcatccctaaagagattgaagtgagcttcagaatggcaaaagaggagccccagagtatctcaagggacttgcaggaactgcagaagaagctgtctctgctgatagactccttccagaataactcaaaggtcagtttccaatcactatgtataatggaaaatcccaatataacactagcataaacaagatagaaagttatttctttctccagtagaaggaatttggaggtaagtcaagaatctttctggcttaccgccctgccatgtctatgctgtgaccttcaaactccttg

SEQ ID NO: 1242831 - DNA, 4001 bp, Homo sapiens
ccacccaccgctcctcagaatggtagtactcttattctaaaactaaaatactcttgacattatgaaaatgtggctgtgtgggcatagttggatttttttcctgcaacattcctctttttcaaggagggcaatttaagttaaagctaaaacccccggaataaaaaaggtgcaaataacttactttgtctcctgcatttggattcttatcaggatgatattccttggctaactttctgtatgcctttgaaaatggataaaaacaaaaaaggttataactaaacaccagttaaaagttttgtaataacttaatatccacttttctgagaagtaatgttctagagttataacctttcaaaaatattttctattcgtagggattcttcggcactttctcgcgatactgtttactaatgtaatataaccaagtagacagcagctatacttgaaaacaggttacagtgacgtgaaaaccagataaaacaatgaagcaatgccacagggaaaaacaaaacgttcaaacattatccatattttccctattgtcaagtgtctttgatggccaagtaaccagaccaagacgaccctaataaattcgagataaatgactgttaagctttgcggactgcaaaacattactataaatcaagctaaagtcacaattcctgctcccgatggctcacgccttccttctaactgtaacatcatgaaaaagtaaaggtggtcctagttagcgtcttttggtgttttatttgcacgtggtggttaactggggtcgtggtggcaacttcggtggtagagaagttgcacacactctcaacgaggtgtttgggtcctaaagcacttaaatcttcattcacggaggctcgtgaattatataatacagactagcatttccggtaaggtaacaggaagtccactgtactcttctcactgcctaaggagcattctcatttttctcggcttacaaatctggatgctcttagcctggtgaggatgctgtggggcttaaatgcctcgtgtgctttgaaatcctgagatgaaagatatcgcagcattgcaaatagcaataataaggccttctatttatgtttactgtacactcaggcgtttggctgggaccacggcttattcctaagcaggtacaggacattagcattacctgcccaaagaacaatgcatccaaacacagacccagctacctccgggtcaatgggcgagggacgcagagagggaggagctcccgcagccggcggccgcggaacccaggaaacaaccccatccgcccgaggcgctctgtgggggcggcctcgacctccccgccgttcctccccgcggagcaccagacccggggccgacggccgcggggcggacagcttctctctcggggccgggatgcgctgagcacctcggtccaacctgtttttccggggtggtgacctcgacgcgaaggaccgggcgagctgctgcctcccgggggataccagcccccggcgctcgttcaaggagggaggaaggaagggctcccatcgtgtttgcgcaggagtgagttttatttgctgcatctgcgggcgggcggggccggcggccccaaggtcagccgaggccggagtgcgcggctcgcggcgaggccggtcccgccgccgccgccgactcccagcccgggccagtcacggccggcgccggctcgcgggcagcccagtagcgcggcctggctgaagaagacatccctggccgcgcaggccccgcgcccctcacacccgcccggcccgctcccagataccttcttcagctcgttctcgctggcgccgggcgggacgcccaggatgtcgtacagcttcgtgtcagccacgttagccatggcggccggccgggcagtgctcggggagaaggtggcgaagcagacagagcggagtcgggcccacaagcggcgtcggcggcggcacaggccgagggagacagcgagggggaagcgggggcggggctgaactttgacccagcgcacggtgcgccgtgacgtcgctgtgcagagcccgcccccgagcgcccgaggcgcggccactggggtcgaagtattgaagagtgggccaggttctctgttttcctccaggtccaggcggctgggcagggccaacgtaggaaatgaagaactgtgcacggcgcaccccaggaattcagcttcctctcaaaagccatggttgcgaggtcgcgtgtttaacctcgcactggctgctgagggaattaacaggcctgcgcagcagcttcgttagcttcgaaagaaaatgggccccggctcccgcaggaggcccgcctggcgcgcagatgtcgttattagaatccgggacgtcggtggaccctctgggtctggctccctcggggcttacgatgaaaaaaactggggggcgcgtgtgtgtgtatgttgtgttttatattatgagaattctgaaacatttagcagaagcagtatattactccccatagtgcagttagctaccttttacctgtttcattggctccaccatacatttctagtgttttaagggaaaccgtttcattcataaataccctaagtgtatatatttaatatctaagagacaacttttaaaggcataacgatgtaatctcatctaatgaaattaacaattccttaatctaattcccagtccatatttaggtttttcagatgatctcatgtccttttacaattggtttgtggcatccgggtccaaaccaaggtccacatgttgcatctggaccacgtgtttaagcctcttacttgatagctttaaaattagctaacaccagaggtttagatggtgtaaggcaagtctggccaccaggtgacttgatttacattcgttttagtttcgctcagaaagtatgctgtgcatctaccaagtgctatgatgtacagaggcctggtccggggagaggagtgttacaaaagtgcctgccttcaacccatttacggtttatggagacagaaaagtaaggttttctgatcccttggaacctgaactgatagcaaagacttcagcataagcatctcactcaggataatgtttcttccttggcgttccctttgacctagttgtggagggcctgaattccatgacaaggactctgaaatttagcttgaaaaccctaagagtaatcagtgataagtcattaatagtccttaaacccttttcctcaaatcccatctgaaatcctgctccctctgtgaagtcttcctttactgggcactggtgaacactgctatctcattcgagttcccaccacccttcgtttgtaccttttgtggtaggatctcgaactcttttgtttttttttttttttttttttttttacttgaaacagcgtctcgttatgtcgctcaggctggagtgcagtggcgccatctcagctcgctgcaacctccacctcccggcttcaagtgattctcccacctcagcctctcgagtagctgggattacaggcgcccaccaccatgcccggctaatttttgtatttttagtagaggtggagcttcaccatgttgaccaggctggtctcgaactcctgatctcaaatcatccacccaccttggcctcccaaagtgctgggattgcaggcctgagccactgcctctgccaaccgccattgccgtgtaaatgctgacgtcatcctcatgcacggctgtaaaatccaattctctacttttcacattttgagatgttcgtaagagacggtgtaaagttatggcgaggttagactgtgtaggttggtagtctgactctgccatttaggaacaatgtgaccttcagcaagttacttaacttttctgaggtttcctcaggtgtaagatggggcttgttattttttatatcattggtttaaaagagttatacatttctattacttagggctgggcgcagtggcctgtaatcccagaactttgggaggctgaggcgggatcactcctgcctcaagtcctgatcacttgaggtcaggagttcgagacc

SEQ ID NO: 1242832 - DNA, 4001 bp, Homo sapiens
tcccagctactcaggaggctgaggatggaggatcgattgaacctgggaggtcaaggttgcactgagttgtaattgtgcctctgcaccagtctgggcaacaggaggccctgtcttaaaaaataattaaatacataaataatcattctcttaaccaaacacacatccaatctctttgttctctgccatctcctcagtgcccagaacagtggctggcatacaattggcctcaattaacacctgtgaatgaatgaattttcagacaggtgctcgaaggggttaaataatacaccccgctcacagacgctggggaagttcacccctgaagcccaggctcttttctttacattgcatgaagtaaccacaattactgatactttaatgattgtctactatgtaactattacaaactggattgcaacaggaagttagttggtataaattatcttgtcagggccctttaattaatctttataaatttatagatagcttaaataccatttgcacaaattctagaggacacaaaactagcacaattcaggtacgtacaacacacagcacaaaacacacggcataagaaaagaaggctaagcagggcacggtggttcacgcctgtaatcccagcactttgggaagccaaggggaggcggatcacctgaggtctggagtttgagaccagcctggccaacatggcgaaatcccgtctctattaaagatacaaaaattggccaggcgtggtggcgcatgcctctagttccagctactggggaggctgaggcaggataatctcttgaacccaggagtcggaggttgcagtgagtcgagattgagccactgcactccggcctgggcaacagagcaagattcagtttcaaaaaaaaaaagaaaagaaaagaaaagaaaacatgactaagcacttcaaggcttaatgtataattcagtgtcatctcaggcaatgatatcaagcctccacctccttgtgacatttataagtggtttaacatctaagcctcagtatctttataaaatggaataacagtgcctatcatgtggaaatgtgatgtaaggggaaaaccatgcctggccaacagtaagtgctcaataaatgtctgactgtgttattattacaatcaccaactaaagacttctaaaaagattgttaactgtgcccttcaattagcaccacgtggtagaaagagcgtaaactatgacatgactgctttgggtttgagacaactcttctagtctaactccatgaccttgggctggtcgattcctccgttgaatctcagtttctcattctttaaaatggtgatgacggcaggcatcttgcagggttgttgtaacaaagtacctaggcctctccgaatggcagttagctcttcccttccgctacgggctagaaggtggagagatgggaaaggaagaggacgagggagcagcggcctccagaaatgttgacagagaggtgaaggttcacgatctacggggcgtttcatcaccgccgccgggggctccacgcttctctcccttccttgacggctgagcagccactggggcctccccgcctcctgcctgtctgtgtctccggcaattgtgcatccgcgtcggaagacaccctccaccccactacccctgcagccgtagtcacagcgaggagactcactcttttctaggccctgaaaccgccactcggaagttggaacctgccctcacctgtaaggctgacaccaggtctcaatgtcagcagcgctcgggggccgcaagaggtcagggaagacgcaaaggcggggacgctcagcttgcggctcagccatgcccccaccacgccctccctgggcggccgggcccctctacccgatatagccggcagccgcggggtccccacaaccaccagcaaccagcgtgtggagcaccgcgcagccatcttggcccggggactctgcgcctgcgccgcccggctctaggtgggcctcgcgggaacggcgggcgcgcgtagaggcgcatgcgtcgcgcacgcgcaggcgcaccgtacgcgtagccgcagccaacgcgccttccgggtagccatcgccgaaacggggtttgctctgaagagtgttgttaggtagactcgccgtgcagaacctcgctattctgtgctagacaaccaatgggtgtacgttatcggtgtaaggacgtggttgaatgtagccgaacttaagtggtccgaggggtctggctaagggcgagactacaagtcccagcatacaacgcggtcctccgtcgcgccgctcccagcatgtagtgcgtggtttcctcctgctgaccctgagacttacgacgaattgcgtgagttttactcatgccgtctccgcgcgcttctagtaaatcttcgtcgccaccctcagaatcctggccgcagtctcactgtctcttaggctgattccccacccgcctcctctaacaagactcagttctcctttttttcttttttttttttttgacagagagtctcgctctgtcgccaggctggagtgcagtggcgcgatctcaactcactgcaacctcctcctcccgggttcaagcaattctctgcctcagtctcccgagtagcagggattacaggcgcgcgccaccgcgcccggctaatttttttgtatttttagtagagacggggtttcaccatcttggccaggctgggtcttgaactcctgacctcgtgatccacccgtctcggcctcccagagtgctgggattacaggcgagagccaccgcgccgacctcagctctctccttaagcgtgttagccttctccaaacctgcagtgaacttgctggttccgaatgggagccgtgctgcccaaaaactaaattagtaaaacttgtgagcgcctactgtgtgtcatgcatgttctagaatatcggggatacagtgatgcctgatacaccatccctgttcgggaggagcaaacaatgactcgagagaggctccttagcaactaacaatgttaaatgctatcacaggaataagcactgttacagtcatacaaggtgaaggagtcattccatttctaaaatgggagagaggaagtttgggatgtcagggcttctaagaggtaagattcaaactgaacatcgatgaaaagtgtgtcaggtagggatggagtattccaagtagcctgaacttaagaaacaaatgtctaagatatgaaagtgtttgccttctttgcttaaaccctaaatttaagagtatgtgatgaggccggtcgcggtgactcacgcctgtaattccagcattttgggaggccgaggtgccggcggatcacgaggtcaggagtgccagaccagcctggccaacatggtgaaaccccgtctctacgaaaaatacaaaaattagccagtcatggtagcacgcacctgtaatcccagctcctcgggaggctgaggcaggagactcgcttgaacccaggaggcggaggttgcagtgagccaagatcgcgccactgcactccagcctgggcaagagaaactccatctcaaaaaaaaaaaaaaaaagaaaagaagtggtggccgggcgcagtggctcacgcctgtaatcccagcactttgggaggccgaggcgggcggatcacctgaggtccggagttcgagaccagcctgaccaacatggagaaaccccgtctctactaaaaatacaaaattagccgggcgtggtggcgcatgcctgtaatcccagctactccggaggctgaggcaggagaatggcttgaacccggaaggtggaggttgcagtgagccgagatcacgccattgcactccagcctgggcaaaaagagcgaaactctgtctcaaaaaaaaaaagtatgtgatgagatgaggctaggaagggagacctgacctggttagtcttgcaaaggactttcaattttcacactcccaccatcataaccacctcaagcaatggggaaaaaacctgaggattcttgtttggatttaaaacaaactgtgctcataaatcttcac

SEQ ID NO: 1242833 - DNA, 4001 bp, Homo sapiens
gtctatgaagaaaggtctctgaagaagcacttcaaggccctggcagtgctgctgggctccggatcctgcacaggcagtgcgtgtctgggagttttaaaagttcaggcagctgtgaccttccctggggcaaatgtgagccgtcacctgagagtgcagaaaacaatggctctgtgtggctttccgcataggtgggttgctagcacgtgtttctttctgtaagcacaggtttcttgctgctgtaaaaactgcacctgataatcacgtttgcacttagttttaaaatgtctgataacaaggccaaaggttcctatcccgtgtcccttgcacgtgtggtggcccccatcttccaggatagggcagggatgggccaggtatgtgcgggagggtggggctgggctccagtctccctgtctcttgtctgggggccccaaggtcactttggacaaagaggccaaagccacatccaaagttgcaaatggagccccctggtggctgacagccatgactgctctgtggcccaggacacgcctgccttcctgattcatcgccatcaggtgcaggcaactctgcaggaggctggggagctcggaacaagcagtggtgggggcctgcagcaccagcgccgtggggccaggacaggtggggcctgcaaagcccaccccaattgccagccaagcagtggggagccttcttgaggtagacaataggctgtgtgtttaggcccaggggatcccgagtgaccaggtcacaagggcagggcagcagctaaaggccaggcctcaggtccagtaatttcttggttcttttgttttgggtttttattgtttttgagacagggtctcacactgtgttgccaaggctggagtgcagtggcacaatcatggctcattatagcctcaaccgccagggctcagataatcctccctcctcagcctcctgagtagctaagactatgggtacggcaccatgcctggctaatttttaaatttttttggtagagatggggtcttgctcttttgtccagactggtcttgaactcctggcttcaggcaatcctccggcgtagccaggaccacaggtgcatgctaccatgctcagtttttttttttttttttttttttttttttttttttgaggcggaatcttgctctgctgcccagcctggagtgcagtaatactatctcggctcactgcaacctctgcttcctgggttcaagcaattcttctgcctcagcctcccgagtagctgggattacaggcacgcaccaccacacccggctaatttttgtatttttagtagagacagggtttcaccatgttggtcacactggtctcaaactcgtgaccttgtgatccgcctgcctcggcctcccaaagtgctgggattacaggcgtgagccatcgcacccagcctattttttaagtttctcacagacacaaggtctccaagtcctgagcccaagcaatcttcccgcaaatgctgggattacaagtgtgagccaccgcaccccgccactcatttcttggaatctttgactttccattcgtattcatttcctgagactggtgaaactaccacaagtttggttgcttaaaataacagaaatggatcctctcaaaattccggagactggacgtctgaagtcagggagtcagtaggaccttgcgcctcctggaggctccgggcggttgggggatgctccttgccctccagtttctgcaggctgccagcaatccttggctttccttagttgtggctgcatcaccccagtctctgcctcttcttcttaagatctgtgcacctgcatttggggtcctcccagagagcagggaggatgtccttatctcaacagcctttactcacatctgcaagtccttttttgctacaaaaatcaacattcagaggttccagggctagggcacagctatcttttgagccacccctgggtcttgcccacttggaaggggctgtgctggccctccaaggacagccctgcacgtagcatctgtggtccccctgggggaggagggcctggaaggcttggcagaagtccaggcgggattcaggtatgagaactgcaggaaatgaatacaaatggggtctgcaggaggcctcaacggcaagagtcagcaggggccaaggtcgaaagtcaggaaagtgctcggtctggccagctggccatgaagcagaaggcaggcccagtggggactagaaacaggaaggtaaaccaccctccacaagactggcaccccattccataaagacacgccaacagacgcctctggctggcagcactggtgcactcatctgtccctcctattgagacggcgtctaccagatggaaacaccaccactcctcaggctgccagaggccccattgcaggcttttccaaaggtttcagcaatggttcttccctgtttttaatctctaagtctaggacagcctccagcacgtcaaaacccagcccccaagcaaggccaccggagtattcggtgtagggactagtcctctgcctttggtgtttgcctttcctggacacacatctgacagcgacccatcacggggaagggagtaaagctagagggcggccactgtcctccaccaagaaactgcctggtgcagcttccggcggggcacagggacaccaattatagctcacagagcaagtgcccaaccccctacgtgtgctcagcacgtgggacgagggttcccctctggtctgtcatcccctcctggctcttgaccaaatgctgccccatctgctttcaggaactcccaggcatagtgcccctgcttcctctacctgccagaaggaaggctggaacttgggcctcgcttgtacaaatggcgagtgctgcctgctgtgtggctgccctcaggacgggctttggtgagggcagcacagccctggaggagcctggtctgacatggggcccgtctgggatcactgttgggccttcaaccgtctggagcctctatgtcttcctctgatagattcccagaacaatcatttcaccttctaagaagccatcctgcccctgcagcctgtggcttgtggagtctccagcactctcacttctccctcgtggatctcttttctgtctgtgtcagtcaatgctgccatgtaacagccacctgcaaactcagtgtatacacatgcatttctctcacactgccaggtctgctggggtggctctgctgcctgggcctcgtcctggggctgggctggagagactgcagctccctgggcaccctcttcccacagtgtggaaggtggaggctcccagggcacaagcagaacacgtgccgccctaaggccaaggcggagctggctgctgtcgcttctgcccacattccatgggtgctgtcgagctgtaggtccaagccccacatcaggggagtgagtggggtacaatcctcccatgctgggccccactctggagataggcctggggaatgcccaagaaggaagcccagcccttctgggattttcacatccacagagaatgggtgctggcagccaacggcaacgaggagaaaagctgaccgccttctcagatcaggatgaggtgtttttacaccaaccccgaggatctgcagccttctcaggttaaattaaacctgtcacagacacaggaagggaaaagagcacataacaacaattatattgacatctaagccaggtcacatgctctgatttggctgaaattacaggataaaggaaaaatcctataggcaccatggctggaaacaaatggcctcaaaggaacgctggtggccgtggctttgtgcaacgacagccagtgttgtgtgacccagcgacgtgcaggccagggagggtacccttctactgatcaagagggaaagcgggaaggacgcacagctgtggtttccaacctgcacggaggcacccccatgaactcacagagcaccatcagatccttctgaattttgaaggaagcaatgatactctgctctgctcaaggccattcatggtct

SEQ ID NO: 1242834 - DNA, 4001 bp, Homo sapiens
ttcctcagagccagggtctgcaggtggcatgccccagccaggcctcgagtcatcggtggaacttgagggtcacctccactggaaagtggtcgctgatggcaagagcctgtggggacagagtgagcctcaggggaaaagtgcaccccacccacagggatgggaggggccggtgaggcctgggtgcccacccctgctgctgcctgcggtggggcaggggcaggggccggggcagagggtgtcaccactggccctttgagggaaaggcaaggtaccctgcctgcccagagctccacatggggtgggccgggctctccagggtccttggaaacgagccctggtgcagggaggaagctgaggtggccctgccttgggcgctggaccctccctgctgcctgcgtgcgcccgggcggtggggacccaagaccagcaccgccccacggcccactcgcctgagtctggtccaggccgaattcctcctggaagtcgtgcacggtggccgactggggcttcaggctccggcgcaggcgggcgccacaggccacaatgcggtcgtaggcgcagtctgagttgcccaccgtggtgtcggcgctgtcagggatgagccacttgaagacctcactgctcctcagacggatggcggcccagtcctgcgcccgcacatagctgcagtcggcgttgaagtcgcccaggaacagcatgtcctgcgggcgccgcggagccgtgtctgagccgccgcaggagccgtcgaggtcccgccctcatgaaccagacccccggggcgcgcctgcagggaccccgggaccgaggggtgggcttacgtcggtgccccacttgtcgatcacgtccaggtacacgtcgtagagcgcgtcgatctccgccacggcttgatgcggcgccgcgtgcagcgggatcagcaccaggttctgtgctgctgcgggaaggggtgggggcgtcagagctcggcgggaggggaggggcggggcccgctcaccggtgccgggggccgagaacttgaccacgaagggctcgcggctgaagacgtcctcggggtctgggtacaggtaggtgtccacgaccgacaccgcgtctttcctaggagatggggaggacccgctgagcccccgacctgcggccccgcgcgcccctccctgcggcccgcccctcacctgtacacgaacaggtacatctccttgtactggtcccggcccaggggctggctgctcacaaagctgtactcgtgctcggacacgctgcggagacaggggcccgctcagggtcggggcgccgcgccggggcgagatcccggcggggggtcgcgacgaggggccctgcccaccacacctgttgatctgctccatgagcgcggacacggcgctgaggtctgggtctcgcacctcctgcaccagcgcgaggtcatagccagccaggatctggggaggagcggcgggtgcgggggtcagcgcggtcagcacccctaaacgccgccccgccccggcccgggccccaccttcgcgatgatgctgccgcaagcggggtccgacactttgctgtcaccgaagctctgaatgttgaaggctccgatgcgaagcgcggcggtcccggcggcttccagcgcccagagtgcggccagcagagcccggggcccgcccatggcgcggagcgagaggctgggagggacagacgctgccgcctacgcagacccgctgtcagacccaccgacccaccccttccctccgcggccgccccttgacggccagtgcgacgcggaatccgcccctgcgttctgcaggctcccagggcactgctgggctctcagggaccgctgccttctcactgcgcgggaagctgcagccggaatggagggtccggcccatccagccccagctcagggcagccgagagactcaccttggatgtgggtgcagaggcccgaggctcagagatcctagggggatggggatcccgggtccaggctgcgggcgtgtccgacacaggactgcactgactccctctggcagtagctctggcaccaaggcaggggccggtatttgaggtcctgggccagggaggggccgggctgcactgggtcccgccccctcgactcagctgggtgcctgatgaactcctggctttcattcccatggagacccccagggtaaggggtgggagacctgcctgagccggttctggtgccccagacctgtcccaaaaccgtcccagaagcccctgccagccccctaggagggaggtagacggtcagccacatcccggtgcggctgtgttcttgtcctcgcccctagaaattaggtcgcctagactctgcctccctgagcagaatcccttcagggaaagcaaggcagcgcaggtaggaccagccacactccctacccagcatctcctgctgctgctccacctgctcaccctgcggtggaggccgaggctcccagatctccctgtccccgtccctggtcctcccacccacccacaggcctcaggcagcgcagctgggggcacagctccagctgggcagggcaggaggctgttggtcaacatgccaatgacacccacacagcaccaaggcgccgccagggctggcagaagcccctgggtggggcggccaggcacgtgagtctaggagtggcctgggaggcaggtgctgctgcgggggcctgggcaaaggtggtggcaccagccgcggaggctgccactgccacaacatcacaagctgcaggttctcatgttttattgtaaagcaacaagaaactcttatgtacactgtccgtcttggggcgcctccatcctgtgccatcttctctaccaggccaggcaggcatgggtggggcgctcagagtcctctgccctgtccctgcccggccaggaccccgcagacctcatgctagacgatgaccgtctgcacctccagctggccctccggcgaggcgatgaccagctcgcctgcatgctccaggatctcgatgtcctctgatgacaccatggtcacagtggcctgttcagtgccacttgtccctgcccgggcggcaagcacagtgccctcgctgatggccgaggccagcgtcatggccacctgctctgtcaggctctcgggggtggcgatggtgatggtgtcggcggcagccgcctctgggcccagcgccgtctcctcgtccatggtgacgttctgcacgatgatctggtggccggcgctagcctggtgcacgatctgctgcaccaccttcatgatgtggctgtccacctgcagggccacggctcagcaagagcggctgtgccagggagcctccccgcccccgcctgccctacccctcacctctgtctgggtgccctcgatgatctccgtggcctcactggtctccgcatcgtccgcagtggcctgggcagatgggcagaaggacagaggtcagccttggctgcccctgggtcccagcacggccccagggccccacacccacctcgatgatatactcctgggtgtcagctaccacggacgagaactccaccaacactgtgtgcgggtcttccgtgaggacggtggtggctgccgcggggctgtcctcagacaccagcaactcctccacctccagcaggcagccccctgtgggtggggactcggtcagggctaggcaagccccggccccctcccctccccctcccacctccaccggcccagacctttggtgcgcaggtgccggttcagcgtgccgtgctcggcgaagccacggccgcacttgtagcacttgaacggcttctcgcctgtgtggtgtcgcacgtgccgcaccagtgagcccttctctcggaagccacggctgcagaactggcacacgtgcggcttctcctccaggtgtgtcctgaagtgcacctgctgtgcgttctgtggagacacctgtcagtgccagcctggccttggccacaacagactacagctctcccctcccgcctgtggcccaagggaggggctgggtcaagactgagcatggtggaggcagg

SEQ ID NO: 1242835 - DNA, 4001 bp, Homo sapiens
tcctcccttccccacgtccgtagggacccacaggttgacaggagcagggggtcgcctgctgtcaccggccggggatctcggggtctcccgagccaggctggggagcctcacgatctgagggaggaggcagaggtctgatgctgcggcttcccccacgccccctccctttggccgttcaggcctctctccttgtggcccaacccaactcccaggggcccatgtccccttaccagggatggtatctcctttgggaaccaccctcccccctgccatccccagttctgccccgcaggtgggaaggggcgtcggggcttggctctgaaggtctcagagccctgcggtagttccccatgggctgccatttctcacccaaaccttgccacccccaagccgcccccctgcccggccctgcgcctgccacggagtgtcagtccacccctggccttcggtcttcactcacctgtgccccaaacttaccatcccgaagacacgaaggggcttatcaccctcgctgcccaccactgactcacccaaccgtttcctgcagttcctgggacacacctagacggctcaggcctagggatcttggctcacatgcgctcctctacctgggaaccgcgcttccttaggaagtcaccgtgggtcccctcttcctaggagccttcctggggcatcccgcactgcccctcagctccagcgccgtcaggactcggctcagcaccgcttcgccagtgcctcccccaccagcagggagttccactggagcggctgattcatctgggagtccctaatgtcccaaactgggcctggcacgaagtcggcatctctaagtgctgttatttaaaacagcaatctggttgcacgacaactgaacatacctaacaccacctaatcttacccttaaaaatggtgaagatggtacatttcgatatgcgtatttcacggcaatttttttttttttaaataagagaaatggggccgagagtggtggcgggtgcctgtaatcctagctactccagggactgcggcgagaggatcgcttgagtgaagccagcctgggcaacacagtgagacacagtctcttaaaaaaaaaaaaaaaaaaaagtaagagaaatgtaaagtcaacaacactgagggggcggggcgcagtggctcacgcctgtaatcccagcgctttgggaggccgaggtgggtggatcacctgaggtcaggagtttgagactagcctggccaacatggtgaaaccccatctctgctaaaaatgccgggcgtggtggtatgtgtcttgggaggctgaggcaggaggatcgcttgaacccgggaggcggaggttgcagtgagctgagatcgtgccactgcactccagcctgggctgtaagagcaaaactcagtctcaaaacaaacaaacaaacaaacaaacaaaaaaccctgagatatcacttattacccataaaatgggcaaagccaaagtgtctgggctggggggaagctgagacggactgatcccttgagctcagaagttcaagaccagcctgggcaacatggtgaggccctgtctctacaaaaaaaaaaaaaaaaaaaaaaaaaaaatccaggcatagtggtgtgtgcctgtggtcccagctactcaagaggctgaggtgggaggatctctcttctttttttttcttttcttttttttttttttgagatggagtctcgctctgtcgcccaggctggagtgcagtggcgtgatctcggctcactgcaagctccacctcccaggttcatgccattctcctgcctcagcctcccgggtagctgggactacaggtgcccgcctccacgcctgactaatttttttgtatttttaatagagatggggtttcaccttcttagccaagatggtctcgatctcctgacctcgtgatggtgggaggatctcttgagcccagaaggtcaaggctgcagtaagctataatcactccactgcactccagcctgggtaacagagtgagaccctgtctcaaaaaaaaaaaaaaaaaaaaaaaatccttagacccagaaattccacttttaggattttatcttacagatatgccaacccataagccaaataatagaagttcaaattctttttttctttttttttttttgagacagactttcactcttgttgcccaggctggagtgcaatggtgcgatcttggctcaccgcaacctctgcctcctgggttcaagcaattctcctgcctcagcctcccaagtagctgggattacaggggcgcacgccccacacttggctaagtttttgtatttttagtagagacggtgtttcaccatcttagccccgctggtcttgaactcctgacctcatgatccgcctgcttcggtctcccaaagtgctgggattacagctgtgagccaccgcgcctggccatgaagttcaaaattcttaaatgtagcacgttccaaaagactggaaacaactgagatacccagaagcaggggaccagttaaatcagtcatgatgtaattccatgcagtgaaatagggtgcagccacaagaggctgttttgctcttgtttagaatcatctttttttttttttttaaatatacaaggtctcactactttgcccaagctggtctcaaattcctggactcaagcaatcctcccgcttcggcctcccaaagtcctgggattacaggcgtgcgccactgtgcctggccctagaatcatttcacagtttcattttaacttagaaaagccaagtgcaggccaggcgccatggctcacgcctgtaatcccagcattttgggaggccaaggcgggtggatcacgaggtcaggagatcgagaccatcttgtctaacacggtgaaaccccatctctactaaaaatacaaaaaattagctgggcgtggaggcgggcaactgtagtcccagctgcttgggaggctgaggcaggagaatggcatgaacccaggaggtagagcttgcagtgagccgagattgcgccactgcactccagcctgggcgacagaacgagactccatctcaaagaaaaaaaaagcaaagtgcaggctgggcatggtggcttacacctgtaatccccgcaatttgggaggccgaggcgggaggatcacgaggtcaggagttcaagatcagcctagccaacatgctgaaacgctgtctctattaaaattacaaaaattagctgggcatgttggcgggcacctgtaatcttgggaggctgaggcaggagaattgcttgaacctgggaggcggaggttgcagtgagccgagatcatgccactgcactccagcctgggcaacagaacaagactccatctcagaagaaaaagaaaaaagaaaaaaaaatcaaaaaagaaaagcaagtgcagagaagcatgcttggaatactgccatttgagagggaaagagcttagccgtgtttgcttagttgttcatatgttgtttctggaggcctgcacaagaatggtaactgtgtctcttgacaagctgagagagtgaaaaaataaaaataataataaaaaaataataaatacacagaagaaaatataactatggtgacctctggggagacagggcaggaagaggaaagacttacttttcaacgtacatccttttgtattttttgaattttgtgccacatgcataggttacctgttccaaagaatacattaaaataataaattttggtatttctttgtttgtttgtttgtttgtttgtttttgagatggagtctcgctctgtcacccaggctagagtgcaattgctcgatcgcggctcaccgcaacctccgcctctcgggttcaagtgattctcccgcgtcacactcctgagtagctgggattacaggcacccgccatcatgctcggctaatttttttgtatttttgtagagatgggttttcaccatgttggccaggctgatcttgaactcctgacctcaggtgatccgcctgcctcggcctcccaaagtgctgagattacaggca

SEQ ID NO: 1242836 - DNA, 4001 bp, Homo sapiens
ccctctgggggctgcacgcaaaccgggcccgggcttgggtggcagggagtgcccaccttggccctgaggatgctacagtgcagagtgcaggaggcccggtcgtagagaaggtcaaactccagcgtgcctagggcggctggagagagaggaaaggcagcatgggtcggtatggagacaggtgtgtgcgagaggccagcaggtgggcactggctctgtgtgtctctctctcttgccagcccgcgagtgtgagtgcaagaggctgagtgggcccatgcgtgtgtgcgtctgggtccctggctcggccgcaactggggctgtgtgggtggtggagtgtctcagcagaaatactgaatattgagccttgctgaagctgtaatctccacgctgactgcagctgtggtggccgtccctgccacccccccactgccctcctcccctacctacatgcacagccagcagggcccatccccctctccccccaccacggcaagcctggagacccccaccagcacatggggcctccaagcccccagactcactggcatcatccgagtcatagctgtccacctccgcaccatcctcaggcgtggtggccccaaggagggctgcagggggggccagagccagggggaccagatgggcgggggcctccccgccgcccccgccgcccccttcaggtcctggtccccgggggaagtagtcagagatctggcggatgggccggatgggcccggggcacacgttgatggccatgtgctcctggatgttgatggtcatgcgatcgcccctgcggcccctcatgcagcacccctggctaggagagggcgtgtgagccagtgagcccatcatacctagccatcctggctgagggccaggcgacggcctcctcggtctgtggggccctcactggcctcccttcctaggtgtcgagggagagggtggtgtgtgccagccggtggcaggtgggaggcctgggccctgcagaccccaagctgactccacaggggctgggctgccaacccactccttgcagaagtcgaggttgcaccaccccgtcctcacccacccacttctaggttgtccctgtatcatcttgccagctccttcctctcctccggggctcccctctgctcctgagcctgcctgtcccccaaggggccctgcagggccccgcctctgtttctcggaggctctgtcctcctctgcaccaggcgctggtctagtcagggtgtcacccacccctctaggctccaactgcccactgtcccctcattcagccccaggacctgtctgcctgcctggttcccccgctcgctcaccacagcccacggtggagaccccagcctcagatgccacctctggctcctcaggggagccagaaattgcagccgcaggagagccgaacacccccgtagcgcacacaggctggcacgcttccccgcaccctcacgcccccggcctgcccagccccctgcacctgcctctgcctccaacaggtgcccaggcactggggggacggcgggcgcaggctgggcggcggcggccggcgaggagagcgcggagtcgagctgtgcgagccgagagggagggagcgccgagaaagtgcggggaggagggggtgagcgaggtggaggcgaggatgcagccggcgcggcggcgggggacggggaggggcgctggggctggggagggggcgggatctcggactcccacccggggcccgctcgggagcgcacgcgagcgcgcacacacacgtgtgctcgcgcgcgcacactcacgcaggggcacgcggaccggcacacactcgtgtgcacacatccaaccgggcacccccgcgcgcacacgcccgtgcccacgtgtgcacgctcacacccttgcacacacccaggcgcgcgctggcacacttacccggagaacttcgcacacacacgcactcgcaaacacgcgggctccctgcgccaccaggaagcagccgccagaatcgccgggtgttccccaactactcctgggagacctggccccccgcccccgcccgcgcgcgcggccacggcgcctccctccctcccgggtccccaaggccggaccaccggcctcgttgtcatggcgacgccggctcatctccccccacccccgcgcgtcttcacgcccctcccccgcagggagctggggcctccctcctcccttccccacgtccgtagggacccacaggttgacaggagcagggggtcgcctgctgtcaccggccggggatctcggggtctcccgagccaggctggggagcctcacgatctgagggaggaggcagaggtctgatgctgcggcttcccccacgccccctccctttggccgttcaggcctctctccttgtggcccaacccaactcccaggggcccatgtccccttaccagggatggtatctcctttgggaaccaccctcccccctgccatccccagttctgccccgcaggtgggaaggggcgtcggggcttggctctgaaggtctcagagccctgcggtagttccccatgggctgccatttctcacccaaaccttgccacccccaagccgcccccctgcccggccctgcgcctgccacggagtgtcagtccacccctggccttcggtcttcactcacctgtgccccaaacttaccatcccgaagacacgaaggggcttatcaccctcgctgcccaccactgactcacccaaccgtttcctgcagttcctgggacacacctagacggctcaggcctagggatcttggctcacatgcgctcctctacctgggaaccgcgcttccttaggaagtcaccgtgggtcccctcttcctaggagccttcctggggcatcccgcactgcccctcagctccagcgccgtcaggactcggctcagcaccgcttcgccagtgcctcccccaccagcagggagttccactggagcggctgattcatctgggagtccctaatgtcccaaactgggcctggcacgaagtcggcatctctaagtgctgttatttaaaacagcaatctggttgcacgacaactgaacatacctaacaccacctaatcttacccttaaaaatggtgaagatggtacatttcgatatgcgtatttcacggcaatttttttttttttaaataagagaaatggggccgagagtggtggcgggtgcctgtaatcctagctactccagggactgcggcgagaggatcgcttgagtgaagccagcctgggcaacacagtgagacacagtctcttaaaaaaaaaaaaaaaaaaaagtaagagaaatgtaaagtcaacaacactgagggggcggggcgcagtggctcacgcctgtaatcccagcgctttgggaggccgaggtgggtggatcacctgaggtcaggagtttgagactagcctggccaacatggtgaaaccccatctctgctaaaaatgccgggcgtggtggtatgtgtcttgggaggctgaggcaggaggatcgcttgaacccgggaggcggaggttgcagtgagctgagatcgtgccactgcactccagcctgggctgtaagagcaaaactcagtctcaaaacaaacaaacaaacaaacaaacaaaaaaccctgagatatcacttattacccataaaatgggcaaagccaaagtgtctgggctggggggaagctgagacggactgatcccttgagctcagaagttcaagaccagcctgggcaacatggtgaggccctgtctctacaaaaaaaaaaaaaaaaaaaaaaaaaaaatccaggcatagtggtgtgtgcctgtggtcccagctactcaagaggctgaggtgggaggatctctcttctttttttttcttttcttttttttttttttgagatggagtctcgctctgtcgcccaggctggagtgcagtggcgtgatctcggctcactgcaagctccacctcccaggttcatgccattctcctgcctcagcctcccgggtagctgggactacaggtgcccgcctccac

SEQ ID NO: 1242837 - DNA, 4001 bp, Homo sapiens
cgagggagagggtggtgtgtgccagccggtggcaggtgggaggcctgggccctgcagaccccaagctgactccacaggggctgggctgccaacccactccttgcagaagtcgaggttgcaccaccccgtcctcacccacccacttctaggttgtccctgtatcatcttgccagctccttcctctcctccggggctcccctctgctcctgagcctgcctgtcccccaaggggccctgcagggccccgcctctgtttctcggaggctctgtcctcctctgcaccaggcgctggtctagtcagggtgtcacccacccctctaggctccaactgcccactgtcccctcattcagccccaggacctgtctgcctgcctggttcccccgctcgctcaccacagcccacggtggagaccccagcctcagatgccacctctggctcctcaggggagccagaaattgcagccgcaggagagccgaacacccccgtagcgcacacaggctggcacgcttccccgcaccctcacgcccccggcctgcccagccccctgcacctgcctctgcctccaacaggtgcccaggcactggggggacggcgggcgcaggctgggcggcggcggccggcgaggagagcgcggagtcgagctgtgcgagccgagagggagggagcgccgagaaagtgcggggaggagggggtgagcgaggtggaggcgaggatgcagccggcgcggcggcgggggacggggaggggcgctggggctggggagggggcgggatctcggactcccacccggggcccgctcgggagcgcacgcgagcgcgcacacacacgtgtgctcgcgcgcgcacactcacgcaggggcacgcggaccggcacacactcgtgtgcacacatccaaccgggcacccccgcgcgcacacgcccgtgcccacgtgtgcacgctcacacccttgcacacacccaggcgcgcgctggcacacttacccggagaacttcgcacacacacgcactcgcaaacacgcgggctccctgcgccaccaggaagcagccgccagaatcgccgggtgttccccaactactcctgggagacctggccccccgcccccgcccgcgcgcgcggccacggcgcctccctccctcccgggtccccaaggccggaccaccggcctcgttgtcatggcgacgccggctcatctccccccacccccgcgcgtcttcacgcccctcccccgcagggagctggggcctccctcctcccttccccacgtccgtagggacccacaggttgacaggagcagggggtcgcctgctgtcaccggccggggatctcggggtctcccgagccaggctggggagcctcacgatctgagggaggaggcagaggtctgatgctgcggcttcccccacgccccctccctttggccgttcaggcctctctccttgtggcccaacccaactcccaggggcccatgtccccttaccagggatggtatctcctttgggaaccaccctcccccctgccatccccagttctgccccgcaggtgggaaggggcgtcggggcttggctctgaaggtctcagagccctgcggtagttccccatgggctgccatttctcacccaaaccttgccacccccaagccgcccccctgcccggccctgcgcctgccacggagtgtcagtccacccctggccttcggtcttcactcacctgtgccccaaacttaccatcccgaagacacgaaggggcttatcaccctcgctgcccaccactgactcacccaaccgtttcctgcagttcctgggacacacctagacggctcaggcctagggatcttggctcacatgcgctcctctacctgggaaccgcgcttccttaggaagtcaccgtgggtcccctcttcctaggagccttcctggggcatcccgcactgcccctcagctccagcgccgtcaggactcggctcagcaccgcttcgccagtgcctcccccaccagcagggagttccactggagcggctgattcatctgggagtccctaatgtcccaaactgggcctggcacgaagtcggcatctctaagtgctgttatttaaaacagcaatctggttgcacgacaactgaacatacctaacaccacctaatcttacccttaaaaatggtgaagatggtacatttcgatatgcgtatttcacggcaatttttttttttttaaataagagaaatggggccgagagtggtggcgggtgcctgtaatcctagctactccagggactgcggcgagaggatcgcttgagtgaagccagcctgggcaacacagtgagacacagtctcttaaaaaaaaaaaaaaaaaaaagtaagagaaatgtaaagtcaacaacactgagggggcggggcgcagtggctcacgcctgtaatcccagcgctttgggaggccgaggtgggtggatcacctgaggtcaggagtttgagactagcctggccaacatggtgaaaccccatctctgctaaaaatgccgggcgtggtggtatgtgtcttgggaggctgaggcaggaggatcgcttgaacccgggaggcggaggttgcagtgagctgagatcgtgccactgcactccagcctgggctgtaagagcaaaactcagtctcaaaacaaacaaacaaacaaacaaacaaaaaaccctgagatatcacttattacccataaaatgggcaaagccaaagtgtctgggctggggggaagctgagacggactgatcccttgagctcagaagttcaagaccagcctgggcaacatggtgaggccctgtctctacaaaaaaaaaaaaaaaaaaaaaaaaaaaatccaggcatagtggtgtgtgcctgtggtcccagctactcaagaggctgaggtgggaggatctctcttctttttttttcttttcttttttttttttttgagatggagtctcgctctgtcgcccaggctggagtgcagtggcgtgatctcggctcactgcaagctccacctcccaggttcatgccattctcctgcctcagcctcccgggtagctgggactacaggtgcccgcctccacgcctgactaatttttttgtatttttaatagagatggggtttcaccttcttagccaagatggtctcgatctcctgacctcgtgatggtgggaggatctcttgagcccagaaggtcaaggctgcagtaagctataatcactccactgcactccagcctgggtaacagagtgagaccctgtctcaaaaaaaaaaaaaaaaaaaaaaaatccttagacccagaaattccacttttaggattttatcttacagatatgccaacccataagccaaataatagaagttcaaattctttttttctttttttttttttgagacagactttcactcttgttgcccaggctggagtgcaatggtgcgatcttggctcaccgcaacctctgcctcctgggttcaagcaattctcctgcctcagcctcccaagtagctgggattacaggggcgcacgccccacacttggctaagtttttgtatttttagtagagacggtgtttcaccatcttagccccgctggtcttgaactcctgacctcatgatccgcctgcttcggtctcccaaagtgctgggattacagctgtgagccaccgcgcctggccatgaagttcaaaattcttaaatgtagcacgttccaaaagactggaaacaactgagatacccagaagcaggggaccagttaaatcagtcatgatgtaattccatgcagtgaaatagggtgcagccacaagaggctgttttgctcttgtttagaatcatctttttttttttttttaaatatacaaggtctcactactttgcccaagctggtctcaaattcctggactcaagcaatcctcccgcttcggcctcccaaagtcctgggattacaggcgtgcgccactgtgcctggccctagaatcatttcacagtttcattttaacttagaaaagccaag

SEQ ID NO: 1242838 - DNA, 4001 bp, Homo sapiens
gagtcttcgtttttagcttattggcctgggatgtggggatgaaaggttctcaatacctgtcctccagccccacaggctggagtcatgggctgggccgggcggggcgagaggaggctgttaccttacaggctccaggcagcaagtgcagcttgacgtaggggtcggcgaggccattgaaatccatgggcttgaggccctggagaggagggcaggggagagggctagaggctcccggcacctctctccatccctcttgtagagctggaccctggaggagcccagaaggagggggcaagggcaggacgaaggagcaggcctgggaagggaaggaggaatgggccccctctgggggctgcacgcaaaccgggcccgggcttgggtggcagggagtgcccaccttggccctgaggatgctacagtgcagagtgcaggaggcccggtcgtagagaaggtcaaactccagcgtgcctagggcggctggagagagaggaaaggcagcatgggtcggtatggagacaggtgtgtgcgagaggccagcaggtgggcactggctctgtgtgtctctctctcttgccagcccgcgagtgtgagtgcaagaggctgagtgggcccatgcgtgtgtgcgtctgggtccctggctcggccgcaactggggctgtgtgggtggtggagtgtctcagcagaaatactgaatattgagccttgctgaagctgtaatctccacgctgactgcagctgtggtggccgtccctgccacccccccactgccctcctcccctacctacatgcacagccagcagggcccatccccctctccccccaccacggcaagcctggagacccccaccagcacatggggcctccaagcccccagactcactggcatcatccgagtcatagctgtccacctccgcaccatcctcaggcgtggtggccccaaggagggctgcagggggggccagagccagggggaccagatgggcgggggcctccccgccgcccccgccgcccccttcaggtcctggtccccgggggaagtagtcagagatctggcggatgggccggatgggcccggggcacacgttgatggccatgtgctcctggatgttgatggtcatgcgatcgcccctgcggcccctcatgcagcacccctggctaggagagggcgtgtgagccagtgagcccatcatacctagccatcctggctgagggccaggcgacggcctcctcggtctgtggggccctcactggcctcccttcctaggtgtcgagggagagggtggtgtgtgccagccggtggcaggtgggaggcctgggccctgcagaccccaagctgactccacaggggctgggctgccaacccactccttgcagaagtcgaggttgcaccaccccgtcctcacccacccacttctaggttgtccctgtatcatcttgccagctccttcctctcctccggggctcccctctgctcctgagcctgcctgtcccccaaggggccctgcagggccccgcctctgtttctcggaggctctgtcctcctctgcaccaggcgctggtctagtcagggtgtcacccacccctctaggctccaactgcccactgtcccctcattcagccccaggacctgtctgcctgcctggttcccccgctcgctcaccacagcccacggtggagaccccagcctcagatgccacctctggctcctcaggggagccagaaattgcagccgcaggagagccgaacacccccgtagcgcacacaggctggcacgcttccccgcaccctcacgcccccggcctgcccagccccctgcacctgcctctgcctccaacaggtgcccaggcactggggggacggcgggcgcaggctgggcggcggcggccggcgaggagagcgcggagtcgagctgtgcgagccgagagggagggagcgccgagaaagtgcggggaggagggggtgagcgaggtggaggcgaggatgcagccggcgcggcggcgggggacggggaggggcgctggggctggggagggggcgggatctcggactcccacccggggcccgctcgggagcgcacgcgagcgcgcacacacacgtgtgctcgcgcgcgcacactcacgcaggggcacgcggaccggcacacactcgtgtgcacacatccaaccgggcacccccgcgcgcacacgcccgtgcccacgtgtgcacgctcacacccttgcacacacccaggcgcgcgctggcacacttacccggagaacttcgcacacacacgcactcgcaaacacgcgggctccctgcgccaccaggaagcagccgccagaatcgccgggtgttccccaactactcctgggagacctggccccccgcccccgcccgcgcgcgcggccacggcgcctccctccctcccgggtccccaaggccggaccaccggcctcgttgtcatggcgacgccggctcatctccccccacccccgcgcgtcttcacgcccctcccccgcagggagctggggcctccctcctcccttccccacgtccgtagggacccacaggttgacaggagcagggggtcgcctgctgtcaccggccggggatctcggggtctcccgagccaggctggggagcctcacgatctgagggaggaggcagaggtctgatgctgcggcttcccccacgccccctccctttggccgttcaggcctctctccttgtggcccaacccaactcccaggggcccatgtccccttaccagggatggtatctcctttgggaaccaccctcccccctgccatccccagttctgccccgcaggtgggaaggggcgtcggggcttggctctgaaggtctcagagccctgcggtagttccccatgggctgccatttctcacccaaaccttgccacccccaagccgcccccctgcccggccctgcgcctgccacggagtgtcagtccacccctggccttcggtcttcactcacctgtgccccaaacttaccatcccgaagacacgaaggggcttatcaccctcgctgcccaccactgactcacccaaccgtttcctgcagttcctgggacacacctagacggctcaggcctagggatcttggctcacatgcgctcctctacctgggaaccgcgcttccttaggaagtcaccgtgggtcccctcttcctaggagccttcctggggcatcccgcactgcccctcagctccagcgccgtcaggactcggctcagcaccgcttcgccagtgcctcccccaccagcagggagttccactggagcggctgattcatctgggagtccctaatgtcccaaactgggcctggcacgaagtcggcatctctaagtgctgttatttaaaacagcaatctggttgcacgacaactgaacatacctaacaccacctaatcttacccttaaaaatggtgaagatggtacatttcgatatgcgtatttcacggcaatttttttttttttaaataagagaaatggggccgagagtggtggcgggtgcctgtaatcctagctactccagggactgcggcgagaggatcgcttgagtgaagccagcctgggcaacacagtgagacacagtctcttaaaaaaaaaaaaaaaaaaaagtaagagaaatgtaaagtcaacaacactgagggggcggggcgcagtggctcacgcctgtaatcccagcgctttgggaggccgaggtgggtggatcacctgaggtcaggagtttgagactagcctggccaacatggtgaaaccccatctctgctaaaaatgccgggcgtggtggtatgtgtcttgggaggctgaggcaggaggatcgcttgaacccgggaggcggaggttgcagtgagctgagatcgtgccactgcactccagcctgggctgtaagagcaaaactcagtctcaaaacaaacaaacaaacaaacaaacaaaaaaccctgagatatcacttattacccataaaatgggcaaagccaaagtgtctgggctggggg

SEQ ID NO: 1242839 - DNA, 4001 bp, Homo sapiens
aaggtggatggcaaagacagaccaaatacccatctaggcagacagggacggcagaaggaggggacatctgaacagccatggtcccccagacccttaagccaggagagtaatgctgtggccccgtaccactctggttctcctgggtcccctgcccacccctcaacatgccaaaacccctccctcgagggaccactgcactagctgtttcccacctacaacattgttccctcacatgctcatggttcattccattgcttcatccacctcctccaggaggccttccctgactaccctcaccaaaggacccccactagtcagcctctctcacaacatcagatgcggctgtcttcatcgcacatcaccatgggattttcttgttcttacatctgtccatttgtttctggccacagagagacatctggaatgtcagctccctggtggctcggcctcgtctgtctagttaacagctctatcccagctcccagaatggtgcccggtgggaaggagatgctcaatatttgggggctgaacacgtaattctctccaggacttgtcctcctccccatcctttcttccaccaccaccagcctccatctggctggacctggctcagcttccagaggtgcgtgagccacagtgggctcccagctcctgggtctcagcgctgactggcatggccagcaggctgttgttactggagaaccagctgtgcccaagacccgcagtttggttcagagctgcctcagggaagagcatgctgctgacatcgaggccaggcctagttgggcggccccaccttggccagggttgtggggtgaggtcatgcccagccctgctgccctgcccaggagggaagtgctgggagtaaccagtaccagcacagcaaggcaagcaactggggagaggaggcacagctcctgggatcagagttgggggtgggggcaggaagagcctgtaccagcgccacatccctctgaaagggtccaggaaagaacctgccctaagcaagcccacctcacactgcccaagtggagtctcctagagatactgccaggcccctcgctgccctggccatcagacccctccaacccacaccctccatccaagcggaagcgccccagcaactgacgtgtccccatggcttggggcaggcaggctgcacagagcccctgctctgccacatcacccaggtgcccagcctcggctcatgccccttttcagtaatagaaagcatgtaactggatctagggccttgcgggccctgggggagaaggtggacaggaccttgggggccaatggagaaaggttcaaggacaggaggcagctggccatgagtttgggctgtggggagaaaccccataggcaggagggggtcggcagtgggggccagctggggtacagaaaatcatctcttggaatttggaggaggtgagcgaacaggaggccccggggaggagcaggaaggcagagagaaggttgggagctgccaggggctgggttatgccccttccgggggggcaggcccgggagcgcagggcctgggttgctcggatgaggtttgtgtgggtgcgggtgaggtcagctcgcgacctgggctcccccggagaggaaagctgcgggtggagagagcgcagggagtttcagggcccaggcactggcttttggggggcgggtctctaagctccccacccgagagtaggaaggtcccatgggacggagcgtcctcaggttcaggaagtgactgagggtcctcaggggtgggagtcgccgagactcttgcaggctctgggcggcctatgtccccctccctgcctcacgccccccaatttacctgggcgccgaggcccgggccaggagcgcctgctcagcggcgccgcggagcaggctcatgcccgcgtcacggcgcggctggcgggggcggcagggcggcggcggcgccgggctccaggcggggacggcgagggaggcgcggccgcagggctagggatcgggctccggctggggctccggctgggactccgctccgctcccccctccgccaggtctcgccgctgcgccccgccccctgccccgccctggcggccggcccccgccgtattcctccgagccgcgggacgcgcgattctgccctggcgccctggcacccccgcacccgcttcaggtcgcccccggtacccccagctcattcccaccgcccctccctgggccccaaagcccacatggcctctcagcccctgaaagctgaactccacatcagctcccagcccccacatctcaaccccttcacttcttcaggaatcacatacacacccatacgccacatcagctcccagcccccatatctcaattccttcacttcttcaggaatcacatacacacccattgctcccctaaccccatcatgactctctgggccctcacagcccagctctcccagccccacagtgacctcctctgctacccctcctcaagtagccgcaccagcacctctgtcttccctggtctcctctccaccctcaaaacatccagttctcccattctaggtccccctgagactttgccctcaagctcaaacttcattccccttcattgctgcccccacccagcccccaaccccctcacctctgcccttcgggcctgtgcagtggttgactcactgatctgtcggaatccccagtcacaggcctcagctgtgccaggcagggacaagagaagttgcccagtgcctcctctggggaggagctgtcccccctctggttttcacgtctgtacctttttacaccagggcttctcaaagtgtagtccctggaccagaagcttcccatcaccttgaaacttgttagaaatgcaaattccctgccctactcagacctatgaaatcagaatttttgggggtttccagcagaaatgtgtgttttaacaggccaggtgattctgatgcacacgaatgtgtgagaaccactgctttagaccatatatacaaaacaaaacaataggccacctgaacagccaaaatcctgagaaatgaaaatacctccacatccagctactgtccaggtgtctcagaggaataggcctaaagcagtgagggaccaaggatcccaacacccacccatggaatgcatgcccctgccccggagacgcctgggcctcagccttgcccagggagcttaaaaggaggctgcctctggatgtctgaaaatttccctgatggtcattgtggtgtctgtgatcagcctgagctaaccagccccaggcccatggccaagctagcctgggcctcaacctcctgacctccctatgcgtctttcaaacttgacctcacctgctttgcttcaaaccacagcccctaaagctcccagcacttgattcatcatagcaaactgtttttcaacaccagaaacctctaggggagctttggccaacaacaacaacacaaatgaattttcacaataaaaagccttctttttttgttactgaggctggagtgcagtggtgtgatctcagctcactgcaacctctgcctcggggcttaagtgatcctccctgctcaggctcctcagtagctgggtctacaggtgtgcaccaccacgcctagctaattttttggatttttttgtagagacagggtttcaccatgctgcccaggctggtcacaaactcctgagctcaagcaatccacctgcttcggcctcccaaggtgctgggattacaggcatgagccactgcaccccatgtgatgatttgcttttttactgttgaatttcgagagttgtatattctacctactagtcctttgttgaatatgtggtttgcaaatattttctcccagtttttggcttgtcttttcatccacttaacagagtctttcacaaaacaaaagttttaaatttcgataaagtctgaattatccatgtttccttttatggatcacacttttgttgcctaatctaaaaactctttgaattttctcctgtgttttattctgaaagttccataat

SEQ ID NO: 1242840 - DNA, 4001 bp, Homo sapiens
ccgacctgtgaggccacccctcaggggcggctctgagaggccgctttggggctcagtgtccgtccaccgcagcctacgtccccctgaagctgcaagcagggactgagggaccctccccgtctgctcctggcctccgactggagatttgtcaaagctgaccttttgtcgacaaggagactgaggcccagcgggaggtattttagagacacttccacgtttggaggccctagatgcccccttccacccatgacacccactgagcttctccatggggtcagacgccaatcagcaagaattcgccaagagatgtggaggctactagaccctcaccatgaaaatagcttggctgtgtaagagccattggccgaagtaggttctgcccttcgctagcccagccgcagctccagactccaacttccgcctgtgcccaaggctttctctctagcatgtcctgtgataaccctgaagctccccgcaccctacccggggagaagatttttcttttatttttttggatacggagtctcgctctgtcactcaggctggagtgcagtggcacgatctcagctcaccgcaacctccgcctcccgggttcacgccattctcctgcttcagcctcccgagtagctgggactacaggcgcccgccaccacgcccggctaattttttgtattttttattagagacggggtttcaccgtgttagccaggatggtctcgatctcctgacctcatgatctgcccacctcggcctcccacagtgtggggattacaggcgtgagccaccgcgcccggccacagctttgattttcattcagcaaatcctttccacctggaaggaaattgtggggccggacaacaggccctgctcttagctgggcgggaaggcagatgactgcgcagagaattccagaacagagagtaagtccggggactcggcgctcctcacacagcctctgagaactcttcctggaggaaggggtacgtgagctgagtcccaagggtgcctaggaccgcactgggcgccacaaggaaggaacagccggcacagtggacaagcggggttgtggggcctctggagggcctggcgggtccagacctcatcctagggaccacggggagggccagtgggaggacagcggcgggtctgagagcagctctcccacctccttgagtcccaggaagccgccgcgtcccctgccccacacacctggccccagtttcctagaatcccaggaagcagccgcgtcccctgccccacacacctggccccagtttcctagaatcccaggaagcagccgcgtcccctgccccacacacctggtgccagcctcctagaatcccaggaagctgcctcgtcccctgccccacacacctggtcccagcctcctagaatcccaggaagccgccccgtcccctgccgcacacacctggcctcagcctcctagaatcccaggaagccgccgcgtcccctgccccgcacgcctggtcccagcttccacccacagtggtgccctggggtccccgggcctgcaccaccccaggtgggcaccccagtaccctggcgcaccgactccccagcccactcaccctggcctctgcgatgcagacttgctccctggcagggcccggcctaggcagctcccacgccaggctcacagctgggctggccctacccggccacctgctgcccctcccaggcccctcctcaggaaggtgaaactgccccatttcctgcaggaaccctgtgttctctgaaagtagaaagaggagggaaatggaggaggggaggggaaggttggagagaaagggccaggggtcggaaggaagggctgcaggagggagagaggaggagggagagaggaggagggaactttgctccaggagatggctctgcgtcctgacctcccccaaggctagaaacttctccagcagcttcctcatttcctgagagtgccctgagatgtcctggcagtgtttttccctcatgtgtggatgtgccacctcccagccaggggggtgcgtgcacagctgtgctgtccagctctgtgatgtcagatcttagagaatgctacacatcagtacacataagccatctgtgtcctttttctcatgcattttcgttgtgaaaatacaacatgtataccaacaagacatataggtgttgggagggaaactgaggcagggcttgcatgatgtcctttggaatgtgtctagacttgctggctccttccttctagccctcctaggcccctattcccattatctcaagtagcagaacatgctccatataaatgctaaaccggcacagctgtaatcatgtgcttaatgcaacgtggtcttttgacctccatattctcaccatctgtttctttgttgcattaccaataaataccgtgggctcccagagctcgggcttttgcagcctccacaatagcgatggccccctggtgtgccacctttctctctctgtgtttttctgaatcctttgactccgccggactttgtcacccccacgacctggggttgggtctgatcaccccaacatataggtactgtacctttacacagaaactacacaggtgttcgtagcaggacaatttagtatagccaaaatgtgggaagagtgcagatgcccaacacggggacagataaatgtgtctcttcacgcagtggagtattactcagccatgaagaagagtgacgtgctgacacgtgctataacatgaagaacctcagaaacatttcgctaagtggcagaagccagatagtcgggtgtggtggtgcgcacctgtggtctctgctgtgaggctgaggcaggaggagcgcctgagcctgggagactgaggttacagtgagctgcgatcacgccattgcacttcagcctgggccgcagagtgggagcctgtctcagaaaagaaagaaagaagctagactcaaaagaccacatgtcgtgtgattccacttatatgaaatgtccagaataagtgactccatagacacagaaggtggattcatggttgttgaggctgtgaaggaaagtggggagtgggtgctaatgggaatgggtttctatttggggcaatgacttttttttttttttttttgagacagagtcttgctctgtcgcccaggctggagtgcagtggcgcgatctcagctcgctgcaacctccacctcctggcttcacgccattctcctgcctcagcctcccgagtagctgggactacaggcgcccgccaccacgcccggctaattttttgtatttcttttttagtagagacggggtttcaccgtgttagccaggatggtctcgatctcctgacctcgtgatccgcccgcctcggcctcccagtgtgatacccaaccttgttttaacctaagtgaccttctcgtagcagagagagcgccggacagactccattttagtttcttcacctgcagcccccttcacctccctcccttaaggcttaactagtgtgactgactcaaagcacgtctgggaatgcacctactgataagatactgaggcaagctgcaccagcagctcctcgggacgcgctcggtggatggcacccgaagcccctgcatttatctctttgtgatagtttaagcccctgcacctggagctgtttattttttgtaactgcatttgtaaccaattaattttttaactttttgccagttctgcttctataaaaattgcttcagttaaactccccccccccatttagaccacggtatacaaacaaagctagccccttcctcagggccgagagaattttgagcattagcggcctctcggtcgcaggctaataaaggactccttaatttgtctcaaagtgtggtgtttctctataactcgcttggttacaacaccaaagtgctgggattacaggcgtgagcccctgtgccctgcgagggcaatgaaaatttttaaattaaaaatctggaattaaatagtagtgatggctgtgcgactctgaatattctaaaaacatt

SEQ ID NO: 1242841 - DNA, 4001 bp, Homo sapiens
aggatggtcttgaacccctgacctcatgatccacccgcctcggcctcccaaagtgctgggattacaggcgtgagccactgcgcccggcccgagtgcgttattcttttctaattcctttcctctcaccttcgtggacaggagcaggaggaaatgcttgtgccttacctcacatcttgacccagagggtgcagccggcagagttgcggtgggaaaggttcagggtgtgtttaattctgtttcttccaccggttctggttgtgcgtctttcatgtccccgactgaccagggtcctttgtcctgcccaggccctcctgcctctcccctcccctggccatagtgaggcttagggagagagctggggttagtagtcctggccccgaaagttaatgtttagagaagcgttgctaggagacccctcggggtgggagcagtgctctgtgaagagtgtgggctcctgcatgagagtcctgggtccatctccagagatgggtgcaccgaggccccaccccacacgctctcctcacagggtggtgctgactcggctctgtcgagacgcaggtgacagcctcgacagtgatgtctgtgtttccacccagctctgtctcccagaaccacacagaagccccatccacagccaacatgcagacgccaccgtggccatttcggatgataccacttctgcacaggcagccacaggcaatgcggacctacccacgccccccacacacagatcatcgcagacgagaacacctgggcgcatcgcaagcccacacggtcagatacgtccgcgtacctagaacagacatgtgcagactttcccacgggatgagtaaacgcacactcagatacctccacgtgcacacagacacacgtgcatgcacaggtgagccgcacacgcgcacctgctcacctgagcccttccttgcatgtgcgagggacgggagcccacactcagcgtggggcccatctgaccacccatggggcctggcacagaggcccccaaataagccttgagaagggaacatcgggagcctgcagctccacggggagcccggccctgtctctctccgtgggaggccccggtggctcacagcaggctcagcagccccggactctctcttctggctcctgaccaggctgatgtctgcactgggggagtccacaggcccctcaatctgcaggcccagccgtaaggccggcaccccacttctgcccccaacgcctccctcccagcgtccagcccaccctgaggctggtggcttccccacatccctcctcaccctgcccaggccccccacggttgcccccaccactctgatcccccacagcccacatctgcaccagggcgcgagctcttcctcccagtgaatcccagtgaagcacttctcagggacttcccaacaggctcccagctcccatgaggtcagggcccctcagcctggcctccccacccttgctaccccatcctccagacacagtcaccccagaagccaccctctcacccctgcctggagctgaggcccccgccggttccatcctctgagagcctcacccttcactgcccgtgatggcacgagctgaggccccccacccggttccatcctctgagactctcgcccttcactgcctgtgatggtgctccatgctatgctgtagatgcctactctctgaggttctccctcgctgacggtggatcacaggcagtcagagaggagaggggctttccgccctcattacagccctgggcctcaacctggctgcacgctccccaaaaccacaacccctggctcccggctccccgctccccgagactcaccatgcgcgggacagggtcccgagtacctcggctcagccacccaagtcccagggagacagacccgcctcctgcctcccaggtcacaaggcttgggggttgtttctggtgttcaagttcagtcctgccacccacggagctctccagctacagaacagccacctccttgagggctcgcacagtaccccagggagagccgggctaaagcctcacacatgtcagctggttcttgtttccgaagatacgcatgccctcagtgaggccttgagcatccggccagcccaggggcttctgggactctcggtcccaggccaggcaggagagcttgtgctgggtgatcaccctttgaggccccccaggcagtagtgtagggtatctgccttaggtggcagcaggttgagaaatggagaggagggggcctgggagcttgggcccagcccaacgagcccagagagtctcaagtggcctgggggtcccaggtcgtgtgtcccccccactggcagaccccagccacctccctgactccctcggaggacactgaccctggccccggagttgggacaaactccgtcctcagtttctttatctgtaagtgcgatgggttgatctccctccatccccagccacaatcgaggattggaatgtcctctggcaaagccacacgggctttcgaaatccaaggagggtctgcgtgtggaccgcactgagctggagaccaggctggctttggaattctgaggttgcggcgggaggggggcatactcagtgggttcaagcaggcggggggaggccaggcctatcccggaccccacccaaggcagggtggagacctagggctgctgctgggctagtcacaggggcccttggagtctgacattttcaagcagccaatgatgggcagcagtgggaggaacagtgggggctgcagagaggggaggggacgcagggggctgcagagaggggagtggggggcacagggcgctgcagggagggggtgcagggggctgcagggaggggagcagggggcacagcaggctgcagggagggggtgaagggagtgcagggggctgcagggaggggagcagggggcaaaaggggtgcagggaggggagcagggggctgcagggagctacagggaggggagcagagggagcagggggctgcagggaggggagcggggggagcagggggaccagggggctgcagggaggggagcggggggagcagggggaaagcgggctgcagagaggggagcaggggggcagggagctgcagggaggggagcaggggggcagggggctgcagggaggggagcaggggggcagggggctgcagggaggggagcaggggggcagggggctgcagggaggggagcagggggggcagggggctgcagggaggggagcagggggggcagggggctgcagggaggggagcgggggggcagggagctgcagggaggggagcgggggggcagggggctgcagggaggggagcgggggggcagggagctgcagggaggggagtgggggggcagggggctgcagggagggagcagggagggcaggggggctgcagggaggggagcgggggggcagggagctgcagggaggggagcgggggggcagggggctgcagggaggggagcagggggggcagggagctgcagggaggggagcaggggggcagggagctgcagggaggggagcagggggggcagggggctgcagggaggggagcaggggggcagggagctgcagggaggggagcggggggggcagggggctgcagggaggggagcgggggggcaggggggctgcagggaggggagcaggggggcagggagctgcagggagggagcagggagggcaaccctccggaagccaaaggtagagggtgctggtgggatgtgcgtacgtaaagagcaaaataaaaccagttttgtgcagggttcctaccgttctggtgaaaataaaataaatattaatctataagttacaaaatgcgaattgtgcaactttgcccggggaacagtgcagcaatcacttaagctcaggagtctgagaccagccggggcaacacaaggagacctcgtctctacagacataaagaaactagccaggctggtgtgtgcctgcagtcacagttacttgggaagctgaggtgggaaggttgttgagcctcggag

SEQ ID NO: 1242842 - DNA, 4001 bp, Homo sapiens
gctaattttttgtatttttagtagagacggggtttcaccgtgttagccaggatggtcttgatctcccgacctcgtgatccactcaccttggcctcccaaagtgctaggattacaggcatgagccaccgcgcccagctcacattttttaaaatggaagaaataggtatggcttttctgtagggaatgggctggaggccaggagatcaggaggggtaaggaatgaaggggcctgtaagggggagaagcagtgggaacaggaaggagacattcctgggacatgtttggaagttgaacccaggatttggagatgctttgaagcagggttggtgggagacagtaaggaggaatcagcggtgacacttaaggtcggctctggagtcaggccctgagtttccccgcctctgccttgtttccactctgcccactgccagcatctagctaacttagactgtagcctctgaccccaaattatccctgtgctcaggtctgtgccactgatattggcagctcctaatgagaggtgacagcgtgctgccagtcctcacagccctcgctcgctctcggggcctcctctgcctgggctcccactttggcggcacttgaagagctcttcagcccaccgctgcactgtaggagcccctttctgggctggccaaggccagagccagctccctcagcttgcagggaggtgtggagggagaggcgcgagtgggaaccggggctgcgagcggcgcttgcgggccagctggagtttcgggtgggcgtgggcttggcgggcccgcactcggagcggcccgcgggccctgctggccccgggcaatgaggggcttggcacccgggccagtggctgcggaggatgtactgggtcccccagcagtgccagctcacaggcgctgcgctcgacttctcaccgggccttagctgccttcccgggggggcagggctcgggacctgcagccctccatgcctgagcctcccaccccctccatgggctcctgtgcggccggagcctccccggtgagcgccgccccctgctccacagcgcccagtcccatcgaccaccacagggctgaggagtgcgggcgcatggcgcaggactggcaggcagctccacctgcatccctggtgcgggatccactgggtgaagccagttgtgctcctgagtctggtggggacgtggacaatctttacgtctagctcaggattgtaaatacaccagtcggcactcagtatctagctcaaggtttgtaaacacaccaatcagcaccctgtgtctagctcagagtttgtgaatgcaccaactgacactctgtatctagctgctctggtggggccttggagaacctttgtgtcgacactctgtatttagctaatctggtggcgacgtggagaacctttgtgtctagctcagggattgtaaacgcaccaatcagcaccctgtcaaaacagaccactcggctctaccaatcagcaggatgtgggtggggccagataagagaataaaagcaggctgcctgagcccgcagtggctacctgttctggtccccttccacactgtggaagctttgttcttttgctctttgcagtaaatcttgctactgttcactctttgggtccatgctgcttttatgagctttaacactcaccgcgaaggtctgcagcttcactcctgaagccagcgagaccacaagcccactgggaggaacaaacgactccagacgcactgccttaaaagctgtaacactcaccacgaaggtctgcagcttcactcctgagccaacaagaccacaaacccaccagaaggaagaaactccaaacatccaaacatcaaaagaaacaaactccagacgcgctaccttaagagctgtaacactcactgcgagggtctgcagcttcattctagaactcagtgagaccaagaacccaccaattccggacacactaagacaagatttcactagtgtgtgctgtttcccctgcaagggggagggcacagagatggctttgggtgaggttagggggaggataggcctcctggttggctaacacttgtttacttctggggcatgagtgttcatgtgagcccacgatgcctggcctgttcctcttttaacaaagtctggtaggacatggtggctcatgcctgtaatcccagtaatttgaaggtcgaggtgagaggatctcttgaagccggaggtttgagaccagtctaggcaacataatgagaactctaagaaaaaggaaaaaaaaaagtggtgcatgcctgtggttccaggtacttacgaggctgaggtgggaggttcgcctgagcccaggagtttaaggttgcagtgagagacgatggcaccactgctccctagcctgggcgacagagtgagaccccatctctaacaaaacgaaaacaagatccaatgcatcctcctgcctgaagttcttccgtggcttctcattgcagaaatctaccgaatttctttctttggctttcaactcatggagagtctgctctcaccagcctctccagtctcagcaaatagcacaaactttcctgtcctccaaaatctggccacctcagtgatgctacgtccccccatagagccttggcacaacctcagcctccaattggtagggctgttgaggcaaggccaggataggaaatcttgctaccaggaaggagtaggtgggtgaacagcttttccctctacttcctcttctatgcagtgtttgcataaatcaagacctgcagaggaggcagcagtagaaacagtttgctccaaggaccaaacttattctggtgtgcagctcactcgcccctactcatctccagtgtatttcaagagtatgcagggaaggaaaaagtcaggctgagttatagctgcacaggctgcctcccatgctcagagcgcagaggtggggtgcagctggggcttactcagtatccagcagtgcccagatgatgatcatctgcatccaagcccctctggtcctggagactcatgcttccctttgatgtcgccctggatctgctcccatgatgtctgatacagacaattcccaagaaacaatagtcttccaagccagaaagcagcctggccactgtagacaaacatcctccaatcaccaagctgaagccacccttcctgaaacgtcaaatagctaacataacatttttcttccacaaaaggaagtcaatgtttatgtttctaggagaagtgcaataaccccaaatgcatctttatctcctgaatgcatctagaaccttctgctcaagccttaccaaccaacccctaccccgccagcctctctgtccaacattcctggggtgctttttttttttttttttggagtgcgagggcacgatctcggctcactgcaacctccaccttccaggttcaagcgattctcctgcctcagcctcccaagtacgtgggattacaggcatgcaccaccaggctggctaatttttgtattttttttagtagagatggggtttcaccatgttgatgaggctggattgtctcgaactcctgacctcgggtgatccaccagccttggcctctgaaagtgctgggattacaggcatgagccactgcgcccggccttttttcttttctttttttttttttttttgagacaggatcttgctctgttgcccaggctggagtgcagtggtgccactttggctcactgcaacctccgcctcccaggttcaagcaattctccaacctcagcctccctagtagctggggctacaggcatgcaccaccatgtccagcaaatttttgtatttttagtagagacgggatttcactacattggccttgaactcccggcctcaggtgatccacccgccttggactcccaaagtgctgggattacaggcctgagccactgtgcctggccctgggttgctttctgatggagacgattgatgacttgggtcccatgtgtaccattgagttcctcttgcagctgggttctgcctgatttcagacagtacagag

SEQ ID NO: 1242843 - DNA, 4001 bp, Homo sapiens
atgaggtcaatctgctccagggcgaggcgcacggcagtctggtcctgggactggcatgagacggaggctgaccagaactgagggtaggtcaaggggtccagaatgaggccagggcggtcttcaaccccctaggcctgccactcctgcctcagaccccataacacccatttgggtcagtggccccaagtgaggcactacatgactccatggtaccttgatgactttttttaaaattattttttatttttattttaaaatttgagacagggtcttgctctgtcacccaggctagagtgcagtggtgtgatcatggctcactgcagccttgaccccccaggctcaaacaatcctcctgcctcagcctcccaaagtgttggcattacagatgtgaactaccgagcctggttccttgatgactgtttgctgccagcagtcaaatgatggactcacgacacatcataaattactgttacggccaggccaagtggctcatgcctgtaatctccacactgtgggaggccgaggagggtggatcatgtgaggtcaggagttcgagaccagcctggccaacatggtaaaaccctgtctctactaaaactacaaaaattagcagggcgtggtggcgagtgcctgtaatcccagctactcaggaggctgaggcagggagaattgcttgaacccgggaggcggaggttgcagtgaaccgagatcgtgccactgtactccagcctgggcgacagaaggagacactgtctcaaaaatgcaaacaaacaaacaagcaaaaaactgctgttagtccatgtgctatgtgaatgccccaaggccaatccactatgtcctttgtggttacggcagaccccacactcaccagggattttctggtcattttctgcgtgtttccacagaacctgggcatacatgcagctagcctgtcttggcctccaaggccccactctccttagaaaccacatgatggcacactgcatgccccattgtatttagtcacccagaggctggctgacccaggtttctgtgaccccaacatcccccagcagccatgctgtggcaccctgtgtgtccctgtggtacctgggcacccacgaggccgtctctaagcctgtccaggctggtctgaccatggctgaaatttcgcaggttaacatcctgaagcacattcttgtaacgctgtctcaggacctggggcaggtcattgtggctgggggtgtgaaggtcagatggaaacaccgcctccagatcagtcaggatatatcaggtgcttgggtctaccctcctccaccccaccaggcacctcctcacacagaccatatagagacctcctgaggttgggttggagggagggggttagattccaccaggaatggagtaatgcggggaagggcacccatgggtgatggaggagagagggcatccaggggtggtgtgagggagcctccttgatagcctccttgatagcatgctcagaacctcctctcctgcccaagggtgtgctcaccccgcgttgcccaaacgctgcacctacatacccgtccacgagtgggaaactccgcatcagggcctgcgcgcgaccccgaaggtccagggttttgggggtgcctggcgtagtgaggcctggggtagtgagggcgctggggacacccggcgtggtgaagaggctgggggagcccagcgtggagagggctctgggggcgcccggcgtggtctccgcgcgggttacgggctgccgcagcagcagcagcagtagcaggagcagcagacgccgcagataccgccggctgagcgcgcgggaaccctcgcggcccgtgggctgcatgttgcgcgggggtcggccgcgggagcctgggaggagcaggcgatgggcagaggccgacaatggggtccggatcatgacgacccagcctcccgaagagggggttgaagtcacgcgactctgagaccgacgcgccacgcaagggggcgccacggcttttccgcccccaagcaggagagcgcccccatgggccggaaccgccgctgcagcgtcgaggactcctcgcccttccacccccagcgctggctccgtagacccccacacgagtgggggaggaggccaggcagggaactagtaggggcccagggatcttcctgatctcacctcctacccaggcccacgtggcggttagctgccggcttgtgcccagctcctaggcaggtcaaatattctaagctgcgactcagaagagttaattcggtctgtctggtttgatggacagaaagattccctataggtatttcatttcatttcatttcatttcatttcatttcattatttcatttcatctcatttcagttttgagacggagtttgggtcttgttgcccaggctggagtgcaatgatgcagtctcggctcactgcaacctccacgtcccgggttcaagccattttcctgcctcagcctcccgagtagctgggattacaggtgcccgccaccatgcccagctaatttttgtattttcagtagagatggggttttaccatgttggccaggctggccttgaactcctgacctcaagtgatcctcctgcctcgacctcccaaagtgctgggattacaggcgtgagccaccgtgcccggccccgaaaatgaaatttaagaacaatttttgttggggatcattattttagctttttttccttctccaagagacagagtatctgtcacccaggctggagttgcagtggggtgatcatagcttgctgcagccttgatcatagcttgctgcagccttgaacttctgagctcaagcgatcctccttcctccacctcccaagtagctgagactataggtgcagtgccaccatgcatggctaattgttattttttattttattaaaacaaatttttttttgagacagggtctcactggagtgcagtggcaccatctcagctcactgtagcctcgacctcccaggtaaaagtgatcctcctgcttcagctccctaagtagctgggagggactacaggcatgcaccaccatgcccagctaatttttgtatatttgcatttttttttagagacagggttttaccatgttgcccagactggtcttgaactcctgagctcaagcgatctgcccacctaggtctcccaaagtgctaggattacaggcatgagccaccacgtccggccttatttcttttttagagacgtggttttttttttgagacggagtctcactgtgccacccaggctggagtgcagtggctccatctctgctcactgcaagctccgcctcccgggttcatgccagtctcctgcctcagcctcccgagtagctgggactacaggcgcccaccaccatgcccagctaattttttgtatttttagtagagaccgggtttcaccgtgttagccaggatggtcttgatctcctgacctcgtgatccgcccaccttggcctcccaaagttccgggattacaggcgtgagccaccgcaccgggccgaatatttttttctatatatatgttagtatacagacacaaaaatgagaggtgacagcgtgctggcagccctcacagccctcgctccctctcggcacctcctcggccttggcgcccactctggccgcgtttgaggagcccttcagcccgtcgctgcactgtgggagcccctttctgggctggacaaggctggagccggctccctcagcttgcgggtaggtgtggagagagaggcgtgggcgggaaccgtggctgcaggctgcgcttgcgggccagctcgagttccgggtgggcgtgggcttggcaagccccgcactcggagcggccagccggcccgggcagtgaggagcttagcacctgggccagcagctgctgtgctcgacttctcgctgggccttagctgcctccccgccgggcagggctcgggacctgcagccctccatgcctgagcctccacccccgccgtgcgctcctgtgcagcccaagcctccccgacgagcgc

SEQ ID NO: 1242844 - DNA, 4001 bp, Homo sapiens
acagagagtgaaggtgcctgcaccagggcatacaaacagggagtggggggtgggggtaacacagcctactctctcttggccaaggcctgtgttggcccagagaacaggcttcattctgtgatccacgcagagacgccacatgtgctcaccatatgtcctgtggtcacagagcagagccacactgagcggggactgctagtcacctacccaaagatccagtctcctcttctatacggcagaaccccagttgtgtggggggcagcagtgtgcctggtttgaattgctcagcttcccagattctcttgcagctagaggtggccctgcgatgtgacccggttctggccaatgagatgtgggcagaagtgattggggagccctctgcccttctcctcctcccacctggaatgtggagataaagtgggaggtggggcagccaaggcgagaccatgaggtggccacacatgagggctaaagctgcctgctatggacggcagggccgagagatgggggagctggggtccccagcagtgccacagaggcctggagtgccacctctagcctttccttatataagaaacctcagcttctatgggggtccctgttccacaccacccaacgccatcccagctgatgcactatctgcagcctcccagctggggtctttccatttctgtcctcgaacatctgttttccttacggcaaatgggggtccagagatgaggaaaacaaacgaaacccacaggacaaagggggcgagtagtaaggaaaaaaagcagaatccccttgattttctaatcatcccccacttccctgggtgaagccaggagcaagagggcagaagggagcagcagataaaggctggccccaatttccaactccacacccacatgggccacctcggcctcctagggaggtgagtccctggccaccagccacgactgagcctggttggggaaaccctggctttgccagtagctcctgctggacccttgggtcactgtctgcgcctttctgtgccttagtttctctttatagtaggaagggagggcagatattttctgtccaattctgacattctgtgctctgggactcaggaggggacgaatgctcatctggctggaagccacccaaggcctaggtagcccaacaccattcaggaccccagatcctcaggggagaacctctagccaagcagcacttctcagtgatcagatccatttgttggcctcttggtcccagagacaatgagcccaggaagggcagtcatcaccattacaaggcatttacagtttgctgaatgcctactgtgtgtcagacctgtgctgagggttgtacggagatcatctcacttatcctctactgactctatgaggcagacactgaggacacccactttgcagatgagaagattggggcccagagaagttaagtgcactgcttaaggtacagccagtaagtagcaggtctgggatttgaacccctgtatttctggttgtgaaacctgtgtgtctcaggctggaagagatatgagatggggaagtgctagaagggatggtgggggtgggggagtggtgggcaaggaaagaagtaggctgaagaggaagccgacgtgtcagtcccagaacaccatcagaggcagagctggggagaagaacccacagcactttattccctacacaggtggcctcttcagctatagcccagtgtggggaaggcagtcttatctcaaggttccttagattctgccccaacccaccggcccttccctgcaccccctctccaccagcaacttcctcctcccaacacacataaacacgcacacacaccccaccaacaacttccccagaaagatcagggctggaggcccccaggcagaagggggccaccagcctcaccctttccctgccagacagggtccagccaccccaagtcccttgctccctcctcacccctccgaggacagcctgctctagctgttagccatctccatggtaacaacctgggaagctgaacgccggtcctgggagaggaggcttctgggaaatgtagtcttcccaggtttcatgggtccttctgccagcggtgcactggtatagtggggcatcaacttgatagttgttaaactttccaaaatttttgtgaaacacagccattattaaaaattaagagggctgggcacggtggctcacacttgtaatcccagcactttgggaagccagggcgggagaatcctttgagcccatgagttcaaaaccagcctgggcaatatatagtgagaacctctctaaaaaaaaaaaaaaaaaaaattggccatggggttatttacaccacaaaaattagcaaacgccaagaccagggcttttcctctgagccagccagttgttaaacatttaccagcacagcacagcccctgccccacggcatgccgaatgtggccttgatcgagacagacagaaaccagtgtggggcctggagtagctgccagctgcggtggacagaaccaggctgccttgactgagtcctgggttctagtccaggccggagctgtgatgtagaacattacctcgaagtacggggaaaacctatccattaggctagtggctcatgaaaatgtttaatttcttttaaattcagaagaaaaaaatgagaataataatgactatataagtgtgaatctgccctgaattatatctgtgtttttaccaatacagtcctaaaatataatcttcactgttttatttttggagggaggggtgcatgggccttttttggtcaggggatagggctgccaggagggaatccagactgtcactgtgctgacaagtttgcacagttagtgttactgctagaaacttaggaattgcctcaattctcatgaatagagaatgatgttccccctcccagctggaatatcatgcagccataaaaataagctgtaaaggatcaattgcactgtggagagctcacgagacagtgtgtgtagtatttcagacttggtgctaaaggatcaattgcactgtggagagctcacgagacagtgtgtgtagtatttcagacttggtgctaagcaactcgtaattacctctgtggggaactggctgggatgaaggcaggaagggaggagggaggagaaaggaaaacaggtgatgcgttatgctagtgggatgcagcataggcttcattgtcctttttcaaccctatgcaacacttcattccttttacatatttattcattcctttttctcttcatacccactttcatttcccacctctataaagtaaccattctgatgtgtattttttttttccaaaatgagtattgtttggcatgctggtgtttttaatatatgtttaatatgagactgaacaaatatatccttctggttcttatattttcatgaagggctgtgtttttaagatctctccacgttattgtgtggatccacacttattacctcttcgtccttccagtgacgggcactcggtgtccaggtgttctagagggagctttcaatgtccccaggcactgatagttgtttaggttgttgctggaaacatggaaagatcaaacaaatgctaaacgtgccccagccctgaaccgaatcccttaaacactcatataaactccataaacccacctcctcgttatgaacagactcatctcccttcttgctgtctgtcatgagaacactacagccttccctatgtacgtttccctaataaatgctttggatggatacggatcaccccggcgcttagtgtttatttctttggaattccaactggccctacctcttgacggtttggggcagtcttgagggaactccccagcagacattgggtgggctggacagaccactcagatttgctaccagctcccttccatcacagacaatgctacacaggtctagaggggtctagatctggaagaatgtttcttcaagataaacaaccagtagcaagattgctggctcagcagaagcactgtgtttttctccagg

SEQ ID NO: 1242845 - DNA, 4001 bp, Homo sapiens
caggagaatcccttgaacccagaaggcagagactgcagtgagctgacatcgcaccactgtactccagcctgggcaacacagtgagactgtctataaaaaaaaaaaaaaaaaaagtatccagccattgtcaaatatggtgggagggaaagggcaaaatcacccttgttttagaaccactaccctatccaatgactgttcattcacccatcactactcaaaactttctcttcctacttccagatattttcttgtggagaaaaaaagcctctcttcctctgatttatctggtaactctccagaaagtctaattgtgtagcacaagggtagagtgtacttaaaattgtgaaagtttttcctcatactattccaaaaaaagcaaagtttttatcttttcattggtatttgatgaaactaaaacgttttctccagatgttacgaacctcccagagagttaatccataaatatttaccttatctcccaccccaggcactgcaaattacagaaaagatctgacacccattttccagatctgttcaagaagtatctgttgggcatggtggctcacgcttataatcccatcactttgggaggccgaggtgggaagatcgcttgaggccaggagttcgagaccagccaggcctacatagtgaaaccctgtctctactaaaaacagaaaaaattagccgggcgtgggtggtgtacggctgtagtctcagctacttgggaggcagaggcaggagaatcacctgaacccaggaggtggaggttgcagtgagccgagattgcgccactgcactccagcctgggtgacagaacgagactgtgtctcagaaaaaaaaaaaaaaaaagtgactcgtatagttcttgtttttacaacccgaatatctgaattcaggtaaaatattctgcctgaccagggctacatgataagccacgtacttgatcactttgtagggtcgcagcacccttcttactactattttaggtaattcaggtttctgacggggaagccagtggagctgagcgggctgcaagaggggtgggttctggatgagaagttgggacgcgtgacgagggagtagagagtgaaccttggcttaaaaggaaggaaaataactgtgaagaaaagatgacccaacttgaaataaaacctgaagaccttatctcccacttgagagagagaagaagctgaaagccatcagcttgcactctgggctcacagacagagagggtgaggggttgagcccagatctatgacttcagacccctgtctcggcccctaggcctgatcattcattcaaactctcaataaacacggattaccagaccctgcgcagggaacacatctgggaaaacagctgcaacctcggataccagcacgggacaagctatctcagggcaatgaggaacaactaaagagaatcccaggaaccaggtaaccaatcgccagaagccctccgccctcatggtccattgggtcaaggccccactgccgcctcgtatcgccagcctccagtcctgcctccacgacgcgcccttccccaaggctggccgggtctggatgtcgccatcccctattcggagctacagacctcgcagctgaactcttaaaaagaacctcgcttcttcctcacggtgctccagctccacacaccgtactgagcctcgccagccaccgtacgcgaggtcgcggcgcgtccgtgacgtcactgatgtgcgcttctcccgcactaagggaaacatggctctaacgcggccggtgcggctcttttccctcgtgactcggttgctcctggcgccgcgacggggcctcacggtccgcagtcccgacgaacccctgccggtggtgcgcatcccagtggctctacagcggcagttggaacagcggcagagcaggcggcggaacctcccgaggccggtgctggttcgacccggaccgctgctggtttcggcgcggcggccggagttgaaccagccggcgcgcctcacactgggccgttgggagcgcgcgccgctagcctctcaaggctggaagagtcgacgcgcgcgtcgggaccacttctccatcgagcgcgcgcaacaggaggcgccagcggtgcgaaagctctcgtctaagggcagctttgctgacctgggcctggagccccgtgtgctgcacgcactacaggaggctgcgcctgaagtcgttcagcccacaaccgtgcagtctagcaccatcccctcactacttcgcggccgccatgtcgtttgcgccgcagaaaccggcagtggcaagactctcagctacctcctgccgctgcttcaacggctcttgggccagccaagcctggactcccttcctatccccgcgccccgaggcctggtccttgttccttcccgagaattggcccaacaggtgcgggctgtggcccaacccttgggccgctccttgggcctgctggtgcgggacctggagggaggccacggcatgcgtaggatcaggctgcagctgtccagacagccttcagcagatgtgcttgtggccactccaggggctctgtggaaggccctgaaaagtcgactgatcagtctggagcaactctccttcttggtgttggatgaggcagacacactgctggatgaaagcttcctggaactggtggactacatcttagagaagagccacatagcagaaggcccagctgacttggaagaccccttcaatcccaaagctcagttagtgctggtaggagccacatttcccgaaggtgtaggccagttgctgaataaagtcgccagcccagatgctgtcaccaccatcaccagctccaagctccactgtatcatgcctcatgtgaaacagacatttctgagactgaagggagcagataaggtggccgagctggtgcacatcctcaagcatcgtgacagagcagaaaggactggtccctcaggaactgttctggtgttctgtaatagctccagcactgtgaactggctgggatatattctggatgaccacaaaatccaacacctaaggttgcaggggcaaatgccagccttgatgagggtaggaatcttccagtccttccagaagagctcccgagacatacttctctgcacagacatagcctctcggggcctggacagcactggtgtggagctggttgtcaattatgatttccccccaacgctgcaagattacatccacagagcagggagagtgggccgtgtggggagcgaggtgccaggcaccgtcatcagttttgtgacccatccctgggatgtgagcctggttcagaagattgagctggcggctcgccgaaggagaagtcttccaggactagcatcctcggtgaaagagcctttgccccaagcaacctgattttgacaaatctgattaaaatgtgatgctagaacagggatctttcccagtatcttgagtgggtgaccacacttgtcagtgggaggctctgggctgccctgtcggctccttgagggcgggatgaactgctttgtgacttggaaaggtacgctgctggccagcattggagaagaagctgctgagcatggctttctgtagtctttagcaagacacaagtggattttgactttgtatcatgtcatgatttctaacaataaatgatgtttttatgtgcctcccctaagaataattagcaccggggcggaattcagtagtttctgaggattcatacaccaaacctccacatctaggacaaaggctctttcagttgatgttttcatttataaacatttagtttgtatttcctgcccccaaaaaggtatccattaagcccccagggaaaggaaaggaaaggaaatgtgactagcagtagacagagttactctctaacaatgcccaagacaaacgggcgtcttggcgaaatctctggaaggtactggcagaaaagtaaagggtagacgaacacagaagttttgcttgtacattttcaggttctgccttctatcccaactcggtagccgagaaagaggagagatg

SEQ ID NO: 1242846 - DNA, 4001 bp, Homo sapiens
gtgaaagtaaaaggtagggttagtttctcacaagaaaaagtttcaccacaagaaaaacaagaaatcttcaaaatatgatacaattaacctaaaagtccaggtactgtgaactaaaaaaagtctgatcctgcttcacaatggtgaagaatggaagttattcacttttgattttagtacatctccttcacaaacattctgaaggctaagaaactgacgaaaataattatagacctagcaaaactcttcagtacaatctcagttaattattaagcacttcttcatctccctccacccaaacaacaccccccttccccggatccttaaacatcaaggagaaccatcgccaaacattactaggcacttctgccatttaataatatggaattacagaacatgagaattgaaaggcagtcagtccacagatcaaagacctcctctccatctccaatgcctctaccttattcaggccctctgcatccagaccaaggtgaggacctgtcagcctgacttcagtacctgctcattttgagctactgtccctctgcaggcagcgttctttctaaaactcagatctggtgatcttgatcccccacttcttgaagatctctaagggtccggtattacctaccacagtcaattcctgagaaaggtcacacattctaacagtaggaaaactaccaaggcagtgattcccatgggaattgggggatggaggtgagataaaagccatttgaaaaatcagagaacttcaggaaacagcactaactcttcagccttcccacaatctgcccccaacttaccttagcagccaccaaccacaaggcgcttctagcagtttccaaaccccacaccctcttgtcatctgtgtccctgcatactgacacttttctgcaaaatactcaacccccgaatcatcctccttcaccagctctaagcagtgtaatgcttccacaataatcggcatggtgcaatgcaatcaccaatacatctgtcttccaccagactgagattcttctatagtgtttaagagtcgcctatgctgagcctgtgcccagcccacaggtcccaagcaacaaatggacttgctgtgtgaatgtacccaaactccctcacttgaggagagtgaggccagagggagtaagggacctgactcaggtaacctagcagtgagggctagcataatggaggaaacgtccccagtgctgactctctgtcctctgcaaagtccctaaaacctcggactatgcactactgatgaggctcaaagaaggctcccgtggtcatttccccacagctccgagcccaggtcacctcgttctcccaccttctccacctaatctcatctactagcttcccctctccacgacctcaatttggtaaccgtcgaggcaatgaaggcatagagggccaagtgactgaaacaatatgccgacaaccccaaagcaccactacgctctccaaagagggcagcatcccaccctcaggcgctggaggcttgaccactctccagctgaccggccagggccgacggtccctttcccgccaggctgcgggcaggcggctggaacggggaaggcggggacctgagggaggggcgcccgcctcgcccaccccagcgacctggggcaacgccccgccgccggcgctcaccgaagaccaggatgttcttgccggacggcagcttggacctggcgcgggtggacacttcgctcagaatggaggacctgtggcgacaatggcaagagtggtcagccccgggccgggctgggatggcccggctcgcgtcggcccctcagtgtgtccgacggtccggcccagaggccgcgccccccacggcccggcccgaccgcccgcggcctcaccataggctctggccttcctcctcctcactggtcaggtcgccggcggccgccaccgcgggcccgttgggacctagcagcagcttcttctccacccccaccggcgccatcttgccaactgcagccacaaagagggccctcccccgggcccgccgaggacccgcgaggacccgggccgggccgccccccgctcgccgtccctcgcgccgcgccgcccgccgaccttgccgcggcgactgcgccgcccaacgtgtcctctaggtctgcgatggccacgggctcccacgggttgcgaggccgccgaggtggcgggcggcggtcaggcagccgccggggcagccatgcgcggggaggcggtggcaggggcgggcaccgtccggaccgagggcgcgctggcggcctctgccggctgaggggcgcagcgcagcaccccgccacgctcgccgattcccctgcgccgtcgcgggtcgggcagccggatgaccgacccgaaagcctaggctttgggaatgagactgatggacacaaaagcgccatttatctagagctcaccatgtgccagagtcacacattatctcactgaatcttatctaaccctttcacagatgaggaacctgaagctcaaaaaatttaagaaacccacccaaggacccaaggctagaagataacattcggtacttctaatttattccccaaccttggaccattatatcatgaacttggcctaaccctactcaagccctgcattgaaagactagccttaaggaagaccccagaatcctcataaatatcctgcatttccccctcctcctccgaagactaaagactgtgaagtagtgctcttgaccgcagtgcataatacacttggctttgctttattaacatgctttttaaaatgatgttttcagggagccagcatttcacaccagaagaggagcccttaatttccttgggggccagctggcaggtgcagagcggggagaaaaataaaaggaaaggggatggaaaagggaaagagcggagagtaaccgaaggaaaaacatacattccattatcaagcttaattttaggtgtggcctctacttgagggctcttgccattctctatggaaacaggctaacaagacatttctaaatatcacaaggaagtggaatgtggcagaaaagcaccacctaagtaggtttcagatgagtaggattgtgatcctgatgccaaaaaatctggcggcatgaattacgggataaaacaaatgggcatatcatctgccaaactggatgtaaggtttaaacaagacgagagtgaaaacccactgagttcctcccttggaaatctgggaaaatcaggcaaagtgccagaagtcctaaaagggcaagcagtgctgaattttcacaggacagaagatggagatgaaaattacaggccagtgagcttaatcagcactaagtgaaattttgtgattaaacactaaaggaaaagagaataccagatttacacagtatctttcttttttgcaggagtaccaggtaggcggatgctgcagatacagcaaatgcagatttcaacagggcatttgacaattcacatcttagatgcgaaagtgaaatcaatgctggatgatagcactgaggcttattaaagactagcccagaggtggctgatgaagaggagggaccagcagatgaggctgctaggggcctgcccaaacctcctgccctggccagccaattcagggtgccatcagtgacttggataagaatacagcagcagtcatggaagttgtggatgacctgaagcaggaagggttgccttatctactgcatgacaaactgagcagagactaaatctaacaagttgaaatttagcaggaactattaaagtcctgtggaagagtttaacaaaaaagcataggaaggccaggtacggtggctcacacctgtaatcccggcactttgggaggccgaggctggcggatcacttgaggtcaggagttccagaccagcctgtccaacatggccaaaccccgtctctactaaaaatacaaaaaaaaaaaaaaaaaattagccaggaatggtggcatccgcctgtaatcccagctgcctgggaggctgaagcacgataattgcttgaacccaggagacagag

SEQ ID NO: 1242847 - DNA, 4001 bp, Homo sapiens
aatttgtcccagattatctttcattcattgaccctgctgtattcaaatgaaaattccttttctacattacagtgctttaaatatttatagagctatatcatggcctccctctgtctaaaagtagtccttattgagaaatcttattttcattaatgtgacctaatcagttcggatgattaaatttaaaggatagtctataaaaacaaagtattccaggattctaggattttcttgataactatagcttgcgtctcagtgcaagctgaatgttcaactatgagtgattattctggaatctattattgtgttttaaactcattcggaatcttatgtgtagagtgtattgtatgttttcttcccctgtagaaaactcaaagacaagaacgatcttttccaaacctgcaaatttttcatgactgagcaatcactggatattttgaattctgcaaattctcttgatgagggtttgctatattcttttttcctcagtattgcacaggtgaacattttgttacttcaagatagttttcctttgtacttggtatgggcaggagcacttattttctctatttcagcatcagagccaaggttttcttgactttaggcatttgtgtactagattcatgattcttgccattatgaatgccatgtatactatttatctaggtgttctttaaattatctcactgctaaaagcttaaataaatgcattttaagaggaaatcgtatgtcactaccacaaatggaaacctgacgttattcctcataaatagaaataactgtaaaacaaacaaaatgaacaaaatgaagagagagcctatcattaaattctactgcaatgaaagctctgagcctgaggcctgctcttcggatgaaaaaatggaaatttccaaatgacagtggtattaaggacctaatagcaacagaaattttctcctgtatgtagtctgaaggttgaacaaaatggaagaggaataactttctcacgatgtgattcactcttatttagcatttctcggccatcttatgtagcaacgaatgtttgcatctgactttgagaaacactacactaaaccgtaagcgttgaacaggggatcaataattcactgcattttgggcaatctttaagacgatgtccacagcttcttacagccactgtgtccttatttatctttctccctttacttatctcccaaactcctttcttttctttccctggcctttccatttctccacccagttgtttctcttctcatgatttgtaagtgctcctagtataatttcttaatccccatctccaatccccgtttcattcttctcttaacgccctttgctttccacagtctctacttttttttttcttacctctttttctgggggggaggggggcgggtctcccatcacttctttcctttttctttatttccctttcttctttctcagtatcttcccttctcacccttccattcccttgctttccctgtcccacctcttccttctctctaagggtctgattttttttcctctccatctcggcctcccgccccctctttggaaactttcctggctccccggatttctcactcccctgagcattcttcatcctctgaatctctctcttccctttctcaacatcacccctccttatgtaccatccccgcgaaatcaattcccaaaacagcttccagtcatctagacatcttcttgcccctttccaaggtctccctctcgcccctccaggaagatcctggagccaccagcctccgccgcggcccctggaccgcccgtgcctgggtgggccccagaagctgggtgcgaaggtccttgacggtcggcgtgcttggaacggcggggcgtggacggagaccccagatttaccatcgcggaggccgcgaaactctgggctcaggccggcggcacagcctcccgggatgtcaacaacgctacccgccgttgctaggagacaaaaaaggaagtggccccacggaagcgtcagggctgcgcctgcgcgctcgcgagtcggctttttcgccctgaccgcgctcctgatgcctcccggccgccgtaggcgaaggttcgcggaagaggggagcaggcgctcacctgaggttcgcccaatcctggagcagtgggtcccgggagggaagagggaagtgggtcaggctcccggcctgtgtttgtccattcattcattcattgaggcacgaattaatgtgataaccacttattcgttcaaaaactgctgattcaccacccaccaggtgccagggagacggacaaaatgcaccaaacaaaatgcacgaaacagtaccggaagcagtaatgtccacgtgtgatacttgccctggagcaagtaaggaggggacaggaccatctgacttcggggttgggctgctctaggggtttggtgatagtcttagctgcctgtgaccgtccattagtactgccctgttcagggcagatactgttcgctcgcctcccagtagtttttatattgaagaaaaatatatcagagcatcaaatagtacaaccttatgtacttaaaaaaattactttctatctgtctactctaagatcagtagagtaagcacagttgcacattttatgttctcacctagttatagcaccctcttcctgttctcaactccattgaagagttgctacttgtcagtatttctgttagttgtcagtatccattaggatctgtatttttgccattttaaaaatcaacagttctgagttactaaaaaattgcaaatggtagttccggaggttctatacgttgccatagaagagcattccattgggtgtttaaggaactgttggaggaaacacgttaaagatcagttaggaatgatcagaagtcacttgaccttttgagggacattgataatatccttatagcctaggaggaaaagagccactattgtacgacgaagcacagcaggaaaattttatggctggagtcgtgttatgacttcctgaggttagaggaggacaaatattgattacaaaatacaagctgtaagttgggaatgcatcttcatagggatcatgccataacaacttcctgtaataccgattctgtttgtgcatccatttccagaaagtagtctcacactgaacaaggcatacatcgtgctaggaatgtcaactggattctgaatggtccatgttaggggtgctctgggacagttttgaactcattggcaggcttggactcgatgatccatttcaactccacatctgtcattttattatattaactacagaaatactctgagaaactgtagttctgctctaatttttgttgaggtgtgggtgattctgatcactgtagttctctcctttttttccctccaagaaatctgtatatctcagccagttcactattactagccaaagaatcccgcttgactctcaacacctggtactccaacaaagttgctttggaaaggactgctatagctgtggggaaggagtctgagtctggtgtgtgcgtgtgcgtgtgcatttgtgtgcttgtgtgtgtatgcatgcatgtgtgtacagatctggctcttacctgattgactatagctaccattttgcagtaatacaaataataggtctttacagaaatactggctgagttgaatgaagagtgattcttgggttctctgggtgtttctgatcaaggagattccacttgattgtgtagccgtttgtttttcttacaaaaatcagtgacagtgcaccatgtctgatatgtcaatcagctttaatgaaggaaccaactgcatatgcatggagtgtgaatttccttgtttctggagtcaggatgtcaagctcattcaatagctgacagctgtaattagagcaaagaacgattctagcataaaacgcactgacgggagaacccaactgctgaaaaagaaataagaagtagccaaactgacttccaaccaacagtcaagtttgactctgtgcacagaaaatcaatgaggagaacttgagccatt

SEQ ID NO: 1242848 - DNA, 4001 bp, Homo sapiens
acaggcacctcattcctctaccgatggctgatccctaggtgagggtgttctagccaaggccaacatccctttcccatgaccagtcaggagcatacaagatggagaagaaacacatcagcggggcacagtggctcacacccataatcccagcactttagggggttgaggagggaagacagcttgagctcaggagttcaagaccagcctgggcaacacagcaagagcccatctcttaaaaagaaaaaaaaaggaacagatcctgtattcacaatgcaactaaactaacaagttggaagtgggcacccccatgccctgcatgtaagagcctgcacacaagcaaatacacacatatcctctctccctctctcccccttgtgcctctatcatacccaagaagccaaatccaggaaacagtagagatgggaacagacccagggacccactccagaatttctgtacccttttggtatagctgacctccacagggtcccagtgacactcagacagaagacttaccctgcctggttcctctctgagcaggccccagaaaccctcttaagagacagaactctcctaagacactgagcccagtgctcaggactttggctgagcccagcccacccccttacccctacccaggctctgctcaccagcaaagcatctgcagatgtcctcatgagtgacgtaggccaaagtgtgagggttaaggagaatggctgatgccctatggtgacagatggcagactacagaaaagacccaattctttagctaaggtctgacacacaggccctcagagaccgttctggggactcaggtccaccgggggagggatcacaggctaagagtggaaggggaggggctctgaggagggagcctgaggctgggccatggccagtggctataagacaaactcccaagaggaacaggactcagggcaagttgaaccagagggccccttgcccactccccccagcagggaccgccaggaggatatcagctgttctgcacgtcctctgtgacgttccggatgctctgctgcacccacaccttgtgctggtctagttcttgctcccgctgctgcagctcctcgatctctgccttgagctcaatcagtttgtcagcaatctcccgggtattgcagccaggccccacacccctgagcccagggagtggggctgagagggactgctgagaactctgggtcccatggcccctgccttcttcggcaccctccaccccacgcccgacacttctgggtgggagactctactaccctcccactatgcccactcacttccactggatgctgttcttggactttttctcgattagcccgataccttccaaaacattggtaatgtcgtaaatccgccgcttctggcgtacagctagggtgtcagctgcctggcagagagaatggagaatgctcagccccactctggggtgtacccccagccaccctgagacgtggtctgggaagggagtaatctggattccaaccctgtagtgcctcccaggcgctactgcagctcaggaccgcagctctgtcccataggcagctcttctcctcgccagccaggaagggccacgaggacgaacacctgcagcccgagcctggcccatagctgtagctcgatggcctcggccgaatgaatgaaacatcccccggcttctctcctgtgagaaagcacacgatggcggccggctctcggaggacccagctgggccgcccccggggttcccgctaccggcccaggcctggtccaccagcctcccttgtctccccttagcccaggccgcaccagcttgaggtcaagcacgccgtccttggcctcctgcagaagggacacgaacttggtggtgagcagtcccaggctcttttcgtgccggcttggagtgcccgggggcggcggcgcctgtggcccggcctccgccatcgcgcccgcccgccgcctcccctcagccaggccaggccaggccggcgccgccgccacttccgcttccgttcctggccgccgggcagccggagccagcgttactgcttccgcttccgtcccgtgcgccttccagggaacgtggcgctattgctgtctgtgggtgcagccgcaaaacttcagggaccagtagcaaatgtccagcctccgaataagacgaaaactacctgggtagaccggggagttgggatgaagttggggaggaatgagaagggcgtcagtgggccgccctggcagtagagaaggggacgccatcggaactttccttgccaatctgccccaacatcactaactctgcctagtccccatcttgggagaggagaccacactacctgactaatccaatctgctccctcaaacctgttccttttccatttttttctctttatttattcttttatatatttcaaactcattttactgccacatcaaacctgttcctaaaggctgccctactgtcttggggtcaccccatctattcctatccctcacttcctgccaaacagcaagcactaactatatctaccttgtccaccttgttccacccatggtcctagcctcatctttcgctcgtcttgtcctcacagtacagtgctcagagactatggggttatgaacacttcagccaatgcaaacgtgtttacctatgtgtaaatatcagtaaagcactcagtcattcctggcatgcaggaatgtgtgatacggtcattttgtaacttttaacattgttactatttattattgtttcttttagatcaggtcctctgggaaatgggactcgagatagggttttgcagcaagtttgttggggatccacactttttttttttgagacagggtctcactctgttgcccaggccggagtgcagtggcaagatcaatgccgtctcagcttcctgggcccaagcgattctcccacctcagcctcccaagtagctgggaccacaggcatgcaccaccatgcccggctcatttatttttagttttttagagatgtgggtctcactatattgcccaggctagtcttgaactcgtgggctcaagagatcctcccacctcagcctcccagaatgctgggatgaccggtgtgagccaccgcacctggtcaggatccacacctttaagggattaagacaagcagaattgagcagatgcaattatattataggcctcagcctatcccactaggatctctgaaattggggtagcacttctgaagggttcatgttcacacgatggtaccatgcttttgcaccccaatattgactgagagactcagtggtgtgatctcagtagcctacactcctggcagctggagaatgagcacttctgtcctgaagggtggatttgggtggtggactgaacatccactaaataattaccaccttatagtcccttccctggctccctataactctcaagataaacacagctgcccagttgcggtgactcacgcctgtaatctcccaacactttgggaggctgaggcaggcagatcgcttgagcccagaaggctgcagtgagctatggtggtgccactgtactccagccttggtgacagatcaagaccctgtctaaaacaaaaaagataaacacagctttcatgaccctctcctaccaccccccaccacacccctcttcacaagagcctgccacctctcactcctccgcagaggtacacatcctcctcagaggctggccaacacagttttcatcctgtgctgttgatgtcgtctgcatccatatctgcacactctgcccaccaccccaggttgaggccaagtctagcaaatccctatctcctctcctgagcactaagaggttctgggtaggctggtcaagactggttgagtacaagtacaccccacccccccgcccctcagggaagtgtcgcccagctgtccccaccctctgtgcagacactctttcctgttgggaataaaatgccagagactcagcttccttcctttctgttgatggccttggggagggaggagcctcggtgg

SEQ ID NO: 1242849 - DNA, 4001 bp, Homo sapiens
aaaaaaaaaaaaagaaaatagagacggggtcttactatgttgcccaggctggtctggaactccttgggctcaagtgatcctctcacctcagcctcccaaagtgttggggttacaggtatgagccacagtgcccagccatctgcagcctcataggacaagctcagagggtacagacccaagctccatctccaaaagctctcagtgcccccaggaatgagcccttagtgcatccccaacactgctctcggcacatgacacacaatcttttttctttttttgagacagtcttgctctgtcacccaggctggagagcagtggtgcgatctcggcttactgcgacctccgtctcctgggctcaagcaattctcctacctcaccttcccaagtagctgggattacagacgcgcaccaccacgcccagctaatttttgtatttttagtagagaaggggtttcaccatgttggccaggctggtctcgaactcctgacctcaggtgatccacccaccttggcctcccaaagtgctgggattacaggcgtgagccactgcgcctggccacaatctttattttaattcccatgatgcttctatgaggcagcagagcccggaagttaaaggggctgtgaaggccttcacagtgctgagatccaatccaacccttgctacttaactacctgggtgaccctggtcattttcttttcttttgagacggagtccggctctgccgcccaggctggagtgcagtggcgcggtctcggctcaccgcaagctccacctcccgagttcacgccattctccgcctcagcctccccactacaggcgcccgccaccacgcccggctaattttgtttttttgtatttttagtagagacgggtttcaccatgttggccaggatggtctccatctcctgacctcgtgacccgcccgtctcgacctcccaaagtgctgggattacaggcgtgagccaccgcacccagcccacccggtcactttcaggtctccaaccttcgattttcctcatccccaaaatgagaataacaataacatccacctgtcaggactggtttgagaatgaaaaaacctaaagcaggataagggcttgttacattactggcagaagccgccgccccattctgtaggggaaatagaggttcacagaggtagggtcacctacccaggatcaaagaactagaaagcggcaagtgtgggactggaaggggccacaggctggctgcagtgcaccagccctcttgcactaggctctgctgcctccctacggacaggcccagagcccagatcctggagaaaccgaggccccaccctcttggaaccaccaacagggccctagacgcccatcaggtgcaggaggaaggggcccagaggaggggagggccaggctcaggcatcggaggcagagaagggccgggacgccggcgtctgcgaatgtctacaccgggcgcccgggggctcagcaacccgcgagcacttgtggacgcacaccagagaggggggatgacaggcgccccgcaggagaggcccgtgagggtcgcagcaaacctgggggtttcgtggagggctgtgagggtcccgcgagatccgcgaggtgtctgggtctgggagggtcggtcgagcccgcagctcgggccatccgggcctctgccagcccgggatgaactgcccgcaccccggccgcaccctccgggtcggcccggttaccttcctcgctgaagggcgccgggaggccgaggaagccgctgggggccaaggccgccgccaccgccgcaactgcaccctcgcccgcttcccgcccggcttcggcctgggcttctgccgtatgagcggccgtcacccgcactgccatcgcgccctccatgtcgcaacgcgccgcaggaagatggcggatttacgaccatgtcgtcataacaacgggccgcgccgaggccagcgtgagggaacggcaagaggagggcggggcagaaccggagcggattgacggacaggcggggagccgggcctggatagcggtgtggccttaaagggcagaggcggggccgggcgcgctgagagcgaagatggggcgggactgtggggagggcgtggttacggtggagcagattgccagccagggggcggggcggcagaaggacctatgttcgaggctgcactcggatttgagagccagagaacgcgaggggcgagcggactggcggctgctaggcagccgcgccccagcgcttccgtacctaaggacaggtcgccccgcccgcggctgctgctgggaagccgccacagctccaaccaggggtgtggtgcctgctgcccactgaccgcctagggtgttagagcctcccaagatggttacccgggtcacgggaaaagaacacgggtcggggatggctcatgggtagctctgcgaagctgttttattcttttatatacttttaatttttttttctttcttttttgagacggagtctctttctatcgcccaggctggagtgcagtggcgcgatctcggctcactgcaagctctgcctcccgggttcacgccattctcctgcctcagcctcctgagtagctgggactacaggtgtccgccaccacgccaggctaattttttgtatttttagtagagacggggtttcaccgtgatagccaggatggtctcgatctcctgacctcgtgatccgcccgcctcggcctcccaaagtgctgggattacaggcgtgagccaccgtgcccagccactttttaaattttttaaaatttatttgcattatgtattttaaatagagacagggtcttgctgtttagactaggctggtctcaaactcctagcctcaaaccattttcccatttcggcctcccaaagtgctaggatgacaggcgtgagccacgactcccagccacgttgaatttttggttttggagatgggggttgtttttggtttttgtttgtttggggtgtttgtttttgagacagagtctcactctatcacctaggctggagtgcaatggcgcgatctcactgcagcctccgcctcctgggttcaaatgattgtcctgcctcagcctcccgagtagctgggactacaggagtgcaccaccatggccagctaatttttgtatttttagtagagacagggtttcaccatgttggcctagatggtctcaagctcttgacctcacgatctgcccgcctcggcctcccaaagtgctgggattacaagcatgagccaccgcgcccggcctgtttttgttttttgagatggagtctcgctctgtcacctaggctagaatgcaacggcacgatcttggttcactgcaatctccgcctcccaggttcaagcgattctcctgcctcagcctcctgagtagctgggactacaggcaactgccaccacacccggctaatttttttatatttttaggagagacggagtttcaccatgttggccatgctggttttgaactcctgacctcaggtgatccgtcccccttggcctcccaaagtgctgggatgacaggcatgagccaccgagcctggccagatttttttttgaaacagcaccttgctctgtcgcccaggctggagtgcagtgccgtgatctcagctcactgcagcctctacctcaaccacccaagtagctgggactacaggtgcccatcactagctaatttttgtatattttgtagagatgggtttttgccatgttgcctaggctgctatagaactcctgagttcaagcgatctgcctgcctcagccctcttacatacttttaaaaaattgtgggccaggcacagtggctcactcccgtaatcccagcactttgggaggctgaggtgggtggatcacctgacatcaggagttcaagaccaagcaggccaacatggcaaaattacgtctttactaaaaatacaaaaattatctgggtgtggtggtgcacgcgtgtaatcctagctactcaggaggctgaggcaggagaatcgtttgaacc

SEQ ID NO: 1242850 - DNA, 4001 bp, Homo sapiens
tactcgggaggttgaggtgggaggatcacttgagccccggaggctgaggttgcagtgagccgagattgcaccactgcactccagcctggacgacagacagagccaaaccctgtctcaaaataacaataataatttgcacatctagtaagttacacatctaataagtggccacgacagaaatttggacccaggcaatcccaggctttggcattctacataagtgctcttcaaagcaaagtgtgcaatccagtgctggtctgaaaacagttgtcagttcacaatcaagtacagaaactgagagtaaaggtttagaaacttttgttgttgttttgagatggagtctcactctgtcacccgggctgcagtgcggtggcacgatctcggctcactgcaacctctttctcctgggttcaaacgattttcagcctcctgagtagctgggattacaggcctgggccacatgcccggctaatttttgtattttagtagagacaaggttttgccatattggccaggcgaaacttacatagcaatctggcagaatgattttacctctgctaacccaaataaaatgagattggtttgtattttggatgttttcaaaattttatttttctggtcattatattaattttgtgcaaatattgatacacaattgattggaaatttaaaaccagcacttccacaacagatggtttgaaaggcactgctctaggctatactgcctgccagaaagatcctgtcatgtatagctgggattttactacaaagatctttgtatgttcatcctgggatttgggatgagaggcatactccgtgtagagaacgtagaaggtagccttactggtgggaaccaaaaggccctgacgagatctccaacaggctatacaatgggcctctgtcaccctctagcttgctaagctcccaacagcactagcacagtgccttggtacctgcgatttcctctacccagaaggttccttcttttttgtttttgagacacagtttcgctcttgttgcccaggctggagtgcaatggcgcgatcttggctcaccgcaatctccacctcctgcgttcaagcgattctcctgcctcagcctcccaagtagctgggattacaggcatgcgccaccatgcccagataattttgtatttttagtagagacagggcttcaccatgttggtcagacggctctcaagtgatccacttgacctcaagtgatgcacccacctctgcctcccaaagtgctgggattacaagcgtgagccaccgcgcctggcctccagaaggttccttctataggcttcacatagcgtgctccttcttgtcatttggatctcagctcaaatgttacctgctcagtaaagccttctggagcgtccttcttaatccccagtctcctatcctgtttcacttcccgcatggcacatgtgactctaaaattacacttattttttataagtgtctgcggcagccactagaatgcagacttccacagagcaaggcccctacctttctcaatgatcactgtatcccagcgtctacaacacctgttacacaggttgtcatcaatgcacatgtatggaatgcatgaaaaaaagatcgaaagagatgggatggcacaaaaaacacaagaaactcctggcaatttgaattatttccgctcctgcacctcagtttccgcctctgtaaaatgggctcgcgctgccttaaccctcctccgcccgcccactctgacaccaccggaaaggattcattcgggaacattcgtggggcggagacgggacagggggcctcggcctgtagcgtcacgtccgccagggttacctgtggggctgggagcgaaccgcactcgcaccgcaaccccggcatcagtgcccaggttggcctcgcgccgtcctacggggcggccagaggccgccgaaggcctctcgcgctgcagcagtctcctcaggagcgccgccatgtgggatggaatagcacacgtgggcttctccctgcgtcacttccggggactgcttccagccaatcggcctccgccacagccagcgcagccttgccccttaaagtcacaggccccctagcgcgaaatcccacgcccccctggacggctgcggccgcactcgccaccagggggcagaggccagagaaagggctatttcccggacccgcccccttcagcttgggaaagcgaaagcgtggcaggggccggacctgggagcggaggaggcgggtctccatagaaacctccacctgtttccggccgggctgtgagagattaggggctgctgcgggggccaatctcagccagctcgcctcttcccagcggcctctgcgggagcggtgggtgttgtacacaatcatcatggcggcggccggggccccggatggtgagtgcggcgggggtggcgggcgccgggccggggctgaggttgcggtcgctcctctgggggatgcggcccggcccgggagggagaaccgcggctcgggaacggaggtccggcggcgcccggacagcgtccgttcccaagcccagcccgcggcgagcgcccaccccctaacccccttgcaggcatggaggaacctggcatggacacggaggccgagactgtggctactgaggctcccgcgcggcccgtcaactgcctggaggctgaagccgcggcgggggcggcggccgaggactccggcgccgcacgaggcagcctgcagccggccccggcccagccccctggggaccccgcagcccaggcctcggtcagcaacggcgaagacgcgggcggcggcgcgggcagggagctggtggacttgaagatcatctggaataagaccaagcatgacgtgaagttccccctggacagcacaggctccgagctgaaacagaagatccactcgattacaggtaattcctgtggcgctgacagccagtcttccccaccccgcctcctgatggcccttgcaccctactaggcacctggtggctttccttgcatcaggtccccccatccttacagcagtcttctgaaggatacttggatgcccattactcagctggggaaagagactcaagtttatagagctagtaagttgcagagctgggattaaagccgaagtctgacgtttaggccccagtttctcattgatgttgctctaacatctctaattaaaaaatcacctaaggcgcttgttttacagcttctgggccctttcccaggagattctgattcagtgggtctgggatgtagccaggaatttatttttagcaaatatcttaggtaattcttctaagtgaagtttaggaaacgctgctattgactttgatgctggttcttcacagtcgattctgtttcttaattttaccttgttcatagctctttgccatctgagatttcttttctttttcctatttttttttttttttgagacggagtcttgctctgttgcccaggctggagtgtactggcaccatcttggctcactgcagcctccgcctcccaggttcaagcgattctcctgcctcagcctcccgagtagctgggattacaggtgcccgctaccccgccgggctagttttttttattttatccacccacctcggcctcccgaagtgctgggattacaggcataagccatcactcctggccttgaacttttttttttttttaaagctttctacatgtagccttgtaatctccattaagaacaggagttttgtccctattggcttctgtagctctgatgcctgtggattctcacttaatatgtgaatgatttagatgactgaggaacaacttggaaagaatgagagctagtacttactgaacaattattcaatgctagccaccgtactaaatgccccgcattggtctcttaatccttgaaacaggtctgtacagaaggacttactctaataaatcttctacagttctagaaactgaggttcagaggttgtaaatctcccaagttcacaaagctaataggtggtggaggcagtattca

SEQ ID NO: 1242851 - DNA, 4001 bp, Homo sapiens
tggctcacgcctgtaatcccagcactttgggaggccgaggcgggtggatcacgaggtcaggagatcaagaccatcctggctaacatggtgaaaccccgtctccactaaaaataccaaaaaaaaaaaattagccgggcgtggtggcgggcgcctgtagtcccagctacttgggcggctgaggtagaagaatggtgtgaacccgggaggcggagcttgcagtgagcggagatcgtgccactgcactccagcctggcgacagagcaagactccgtctcaaaaaaaaaaaaaaaaaaaaaaaaaaaaagacaaagtagagtttggagtcagaaagtcaggcctgactgagattgcagtgagccggaaccgcgccattgcacgccagcctgggtgacagagggagcctctgtctcaaaaaaaaaaaaataataatttttttttttgcattttgttgagatatattcaaatatgctacagaaatgatcccttcagaaactcagtttttacaaaaattagtgggcatagtggtgggtccctgtaatcccagctatttgggaggctgaggagggagaatcgcttgaacccaggaggcacaggttgcagtgatcggagattgcgccactgcactccagtctggcgactggagagcaagactacatctccaaaaaaaaaaaaaaaaaaaaaaaaagtcagtttgaagttggtcttagtttgtccctctcaagtttgtagagagagcccaggcagctccctcagcccagacagagaggacggaaccaagttcagaggcaccaggagcctggagtcctgaagctgtgcaaagttgggcacagccctgagtctggggggttggggagggcaggggctgtgacttacttgcggagggggagggcctcctctcaggagccacagcagggactgctgcaccgggaggtccaggtcagcatgtcctggaagcagaactgctggcgcctaggcgtgccctctcggtgccctcagctcggcctcctgtctggagggagcgcacaggcttctcttccaaaagtactttttctatcctttccagtgggttttaccaagggttctgacgggcgggtaggtacgaggttctgtgccacatgggagtgttaacaaacgtaattttattccaaaagattccaattcttttccacttccaattgaataacttagataacagctcatatccccgccaactttatttttatttatttatttattttgagacggaatcttgctctgtggcccaagctggagtgcagtggcacaatctcggctcactgcagcctccacctcccagattccagcgattcttctgcctcagcctcccaggcataggcacgcaccaccacgcccagctaatttttttcttttgtatttttcagtacagatagggtttcatcatgttggccaggctgatctcgaactcctgacctcaggtgatccgcccgcctctgcctcttaaagtgctaggattacaggcgtgagccaccgcgcccggcctccgccaactttaaaaacagaaacttttatctcatgacgaacgaacccaggtagagcggcaaggttctgtttcgaaacttgggttctaaacacaaaccgagcgtcgacagacgtggttctccgacagcaccccgcgagcgcggacccccgcgggtcctgaccccacgcccgccctccctcggcgccgcccgctcacctgcgcccgcgtccggctccaccagcacccgctggctcccgaagcgccgcgcgccgtctccgccgccggccgcccgctccgtccgcccgagggccgcgcccgggagccgggcccctgcgaaggcagcgtgggggagcccgttagttcccggtcctggccccggccccggcccgatccctgcccaccccgggtttcgcacccgcgcggagcagaacgcgcgccgggactcgcacagaagccaccagcgccatcttgaccgcaacgcgcgggataaaggtcgcgggctgagctcgcctcctggggagggggcggagcccccccaactaggtcccgccccgttcccagaggctggtcaacgcctccacctaccggccgaaacagccgctcgccgccctccggcttcaccccgggcagccgcgcgcttccggggcaggcacctggatctgggccagggctggcctacaaggaggcgcaggcccactgctgaagcagccacgaccagctcagcgccagggcaggctcttctacagcgcgggacactgtaggcaagaggctgccggtgttcgtgaccgcgagctctcggccgggcccagctactgcagtatcggcgctggaaaggcgatcaaagcacggaacccctcccgagggggccgtcagggaggccaggggctgcctggggtgagcccggcctcctgcccctttgggaacaggatcagagctgcaggtttagtcaccgaaatgggggtgggggcagcagaacccagcggtaagaacaggccacccgccttgctcagcacaagggcaagtgcacaaaggccggaccgcagtggcacctttttatttgcagagaaatgccgaaagataagaatacagtctgttcccgctgggccgtaagcggcagctcgggagtgggcctttgtactgtctggtgtggggttttggtcagaccactgggagcactgggcagtaaggtcccagctgtgttgggtggtctcaacttttgttctcatcttaagcatttccaattcttccttgtgtcccaaaccaatttttgaggtggaaaaatggccacttaacggaggaggaagcaagcctggcatggtgacacacacctgtaaccccagtgactcaggaccagctgggtaacatagcaacaacttgttgctacaaaaaattcttaaaaattagctcctgctgctgggcgcggtggctcatgcctgtaatcccagcactttgggggccaaggtgggcaaatcatgaggtcaggagtttgagaccagccgggccaatatgatgaaacgccgtctctactagaaatacaaaaaattagctgggcatggtggcaggtgcctgtaattccagctactcaggaggctgaggcaggaaaatcacttgaacccaggaggcagaggttgtagtgagccaatattgcgccactgcactccaacccaggcaacagagactgtctcaaaaaaaaaattaaaaaattaaaaaaaaattagcccctgctactctggacactgaagaaggagttggaggctgtaatgagctatgatcgcaccatggtacatactccagcctgggtgacagagcgagagtctgtctgaaaacacacacacattccaaggtggcgataaaaccatctccttctatttgtccaccctaggagcaacctggtccccacagcacacaaaccctaggttctcctggctgaaagcatcggaggtgccactgcggatggtgaggaacagaaagttactaggggcgaggggacaagtgagaaggcagtgaacccagaactagatttgcattccgatcttgggtttattcaacacaattcttccactctacacaacaaagtacaaacacaatgtcatctaaaatgctacaaaggtataaaactcaaaagagaaattttatagtactgactgtacaatgaaagcaaaaaagaaaaaaaataaaagcaatgtacatgttgccaagataacctgaaagaccaccatgaacggcaggcacaaccatggctgcgtgatgactccgcagagctggctctccactcactcgccaatttcagagtacagtggtggggtgcggtgtgtgcatcggtgcacggacagacagaaccacgagcagcaactaccatgggtgagaggatctttgagggggtgtgacccttgaggtcagaagaggcctcgagaggccaggcctaacagggttggcagctgcactaaagcctggggcagctccctttccaaaaggacactgcccagcaacagcaagggcacgg

SEQ ID NO: 1242852 - DNA, 4001 bp, Homo sapiens
atggcaacctctaccccctgggttcaagggattctcctgcatcagcctcccaagtagctgggattacagctcacctaatttttatatttttagtagagataaggtttcaccatgttaagaaaccatgttggccaggctggtctcgaactcctggcctcaagcaatccacccacctcggcctcccaaagtgctgggattacaggtgtgagccaccgcgcccagtcctcaatagtctgagttctgacctggtcgtccagtgagaggagacaagaaagagctgcttggcaaacaagggaatcaagtgccaatcaataaacaaagtagttataaggaaagcctccaggccacttcattcagatcagagccactttagctgctcagggacaagctgacaactctcccttccatgaagggtaccatgaggacaaccaaaaagcaggctcaggctgtacatggttggccatgccaggctctaccaaatctctgcggagtctagtctacaaagcagctgagcagcaggagaggtccacgcccaactcatgagtaaagagggcacacactccaggcctgggacaaagggccgagtggtctcaggcagcagatggattttctgaaagtaggggttagttgaatccacccctagtgagcaccagtgcctgcttccagaagcagccagtctgggcctcccagcaggtgtaagaacaagatctgaggaaacacaattctccactgtacgcccacaccatcatcaccggccacttcagagatccctaaacctgtcagtaaactagtgcctgcacacgtgctatttcctcttcctaataggtggcttctccataggtgccttgggtgcctttcctgacacccaagcccctgttcacattacaagacctagcccagtctcccctctcagacctgcactctgcactcaccagcctccacccttcccacgcccatcacagtatcgagacactcctttctttcaatgacaacagtatattacaaccctgttagctgtgtcttggggaatctttgggggcaagactagttctgaggtatcattaagagccaaagcgaaatatgaatgaatgggaaccaattagggcttgcagatatttgtagcataattcagtcagggtggtgcggtctgtgatttgccttcatcccagaaagaacacggaattgagactggacaccttcctcctggaaatcagtttcagaacgggaggcctggagtctttattccagagagaagggcaagttatggagggggaccggcagctcttcagcatcgcgcttaagcctgggcccagaattccatatacggagcccagaccaggcctctgaaccatggagaaagggaagaggagctaggccagtcccaggaacactagagacctcggggccaggaaaccagagggccccagcggattcagagaaggcgcctcaccttcaaccgagacgctgaaggacaaggcagaacagcctgaggacaagatagggaggggtcacacccaggggtctgcgcccttcgaggggcacagtcaatccccgtccacccttacccgccgggaggatccagagctagtcctaagggagctgtgggccccaatggcggttcagacgcgcgccgcccttttgtcagctcgcctggggcccacccccgcaacccccgctcaccgcccgcgggccggtccagcttgaggatgtcccgcaggtgctgcgtggcgtcctcgatgtcgatgctcgcgcaggaggccatgggccctgcggcgggcgccccgcccgcaccgcgttcgttccgccgccgccgcgcaccacgcaccctcgctcacccgccacggggcgagacagcgggacgccggtcactacacagtccacccgcagttcgcaaaccgccacccgcgcagcgtcgctgagccccgccaaccccaccaaccgcctccacttccggcacccacgagccgaggctcccggaacctgccagggccggagaagaaaggttccgggctgggggcggaagcctaaacccctcccgcagccagtccccctcggcggccccgcccctgtgtccgcgaggtcaggaaagtcccacggggctgaagtaagcgtccacgcactgggccacctaaagccctactcgactcagaaggcgccaggtccctgcccactcccagagcatggactccgatggtcctgggacggggtcaacttagccgcccatgctaaggtccctcagacccccagaatatgctgaattggcaggtgcctcaggttccctttgggaatgggtcggaataactcaaggcctgaggctaccctcgaggtcataaaactcaggaattgcaagagcaggggagatgatcccactacaatgaccagtcattgttccctactgtcccccagcatccccttgtcccacctggcaccctcaggttggaagaaagaaaccacagtttacaaattcttctttattgcagacagttcaggcacaggtacatggaagaagccgtattgcagattttacacaaggtggtttgaggcagcaggcacctacctcttccccacccccacttccccaaatacacatcagcctagagatcattcccactgaaatctcctgagcatgctgtcctctcaaacagcacaccatccagccctgtgcccaatgtcaccaggcaatctgtgggatctgaggaggtccttagcctccacccgtagtgggacaggggaagggtatccttttacatgtcagatttagctgtggtgtccttaccaatcctaaaacccttaacagggcactgacccaaatcttgggtttggttctagcctatggttgctacattgccactaggtttataccatccagaagtctgtgggacaaggggctagatttgtactgggcaaggcctttgtccccaaaatggagaagcagaaactgccctaatagctaagactccccggaattggaagatagcatgaagtctgtatgctgaggaaggaagtggagagaggcctggcaatgtcctgcagcagtctgaggggtgaggactcctaaagcatgagtccctcacagactgcctccttccacagctcctgacctatactccaacacaactgggcctggctctgtgggcagtggaggctggctcttcgggttacctgcctttgggtaaagatatccaaagcagatgggacaggagctgagctgccctctgcctggcttggtgtatgtggggcatcctggatatgatcctgatccttctggggatagagcaggcccctcccttgatactgctgacaactcagcccggagggcctgaacgtgatgagccattttgccaaggcctctccagcttcaacaggattcaggatcatctctcctgctactagggccctgaacctacccagagcagaagtcacaggaggtatcagaactgactgcacaggcttcagtgagagaagcttcaggccagacctgagctcttcctgcctgctttccaaagaccagtcgccctgtggagtgggagagaactgccctacacggcttctgagaggctagctgggagtgctgcttcagcagtttctccctgcaacaggtattcagagttggggcagaagtgggagggtgaaacatgagagagacaacgggtctgggtagcttctgatgcccagccaactagtaaactaattaaaacaatttaaactgttaagaaaatttttgtggttttattgtatcatgaggcattgaaacatctgaacaaatcaatgtctgggcggtgaggcagctgctttctccttcacttctttgggttactagagcaacttgtcagtagattaaaaaaaaaaaaaaaaaaaaaaggacaaccttttgcattacttaagtctttccaaggcatgcgctggtacaacacaaacttctcccgtcagatgcaactagtctagcatccaaacatcatgcacaacacctcagtggcagcagcgcactgcgcccactccca

SEQ ID NO: 1242853 - DNA, 4001 bp, Homo sapiens
agattaaaggcctgagccaccacgcccctggcccaaaacaccggtagctcttggaatgtacaccgatgattatgtgtaaactgtgaccacttcagttctgtcttctggcctccccattccctgcagaggataagaacttcggaccccacccccttctttgagaatgggggctgagaggagggcggacgccaatcccagccatgttacactgaaattcatgtccttgagaggttttactgtagttgttgaattaatagctgaacaaaggaatgaacatcgggtgctgtggaggccacacagaaggaagacacctgcatacgccatctctgaactctacctccttccacctgcctcttccccagctcagcttaaacagcacttgctacaggaagccttcccccataaccctctcccctttacacacacagtgggcattctcagctcccacctgcttgctctgtattcccatttactccatctcgctttttagaatctgtttatgtgactggcttcctcttagggagcttctgtgggcctggggatcactctgaccctcggtttcctcctcgctaaaaacattaggatagactacgtgactcaattcgctgtgacttcacagcctgtccagggccctcaaccacagggctcttggccatcagatgtctcccggggccatagactatgacactgtgtgccaggcactgttccaagcacctgacatatacatactcatctactctttccaaggatactaagtggtagatactaatactgtacccattttaccgatgagaaaaccgagggccagagagcataaatgagctagaattccaacccaggactccagccctagtgtttcctgctttcctggctgaagaagcacccaccaccgaggtcccagaggtcgggctccctgggaccgtccccctgggcagatctcacttccccatgcggcccatctgtcacactcagggcgcagctgggctggttccccgaaatcccccaggcgcgcgcaaaaggatctaggccggggcttacccgggaggcccccacccccgcgcggccaccggcttattaatgcccagccccttggcacacatgtcagcagcgcctgccaacaaactcccgcagccaacaatgcagcaagggcgcgtctatacagtcctggaggttccgggaattcgggctgacgcaggcctctagttcaggggaaaggtgggggatgcggctctgagccctgcaggggacaggaaggcagcgatgcgcccacactctaggggccccgaggggggaggcccccaaactctctgtcacttgcagccagatcaccgcccattgcttgccaattgctttccatatccacatcgcctttaatccgcacaacttccccatttctccaaagcaagcacttagccccagagagtttaacaaccagaggagaagcgcccccacactctccttccatgccttctccggccccattcccaagcccagacccagcacgctccagacgccagctgcacccgggcgcacaggcctgcagcgcgggctcccagccccccacagccttgccggccgcggtccacacctacctccctcgggcagacaggcgcggcagccgctgcccacggccgcgagggtccagaggagttggcagaggctcgcggcccggagctccagggtgcagggcgggcgggccccccgagagtgccggggagcggagagcggggagcgctagctggcgctccgggcaagcagctggggccacgcggggtagatggaccgatcccagggcgcgcggggcagtcggagtgatcccaggaagggcgcaggggccgttgggacgatcccgggatgtgggagcgcgtgccaggggggactcgcgtgcaggcgacagcgagcgggactcgggtggctgcagggccgggagtgcgggcgctcgatccaggaaggaggggagctgaggctgaagctggggctggtctaggttgagcagaagcgggcgggcaggggcggggctggcctggcgggcgcacggcgtggcgctcacgtggccgcccccaggtggccatcacagcgcctgcagccgcctagcgggcctcctggctccggcgctggctcccagccccaggtgcaatggttagcgctaagtcttggctccccctgctgagtacacagtgtccggttctcctgctcaaggctggcctagcatccggcagcgagggggcaattcgagggagtgaccaacttccgtcctctcccgccgcgcctcgccattctcgcctgcttctcgcttagttcctgtattcctgtcctttccaaaatcattagtgatccaagcccatcgcttgtttgtatgtatctctatccataaccttaaaatattttttatcggaaatactttgtttttcctgatttctgctttgtaaaaacaggcacgtatgacgattgcaattatttgtgtagttttaaaattagtatctcctttagttattcctaactcttgacacagggcctgggtggcacacagtagatgcttaataaatacctgtggcatgagtggtagagtggctaaggtataaaaaagaaaacgaattaaaactaatagctactgtgaacactttaatattaggtccttccagatactttgttagtgaaattttagaaatttcacacattctagatagaaaagtagtaacaatgacatgttttgagggatttctctcattccatcttcccagcactttgggaggccgaggccggcagatcacctgaggtcaggagttcgagaccagcctggccaaaacggtaaaaccctgtctttagtaaaaatacaaaaaagcagccgggcgcgcctgtagtcccagctactctggaggctgaggcacgagaatcgcttgaaccctggaggcagaggttgcagtgagccgagatcgcgccactacactccagcctgggtgaaggaatgagactccgtcgcaaaaaaacaaaaacaaaaaaataaaaaagaaaaaagaacaaaactgaggcttatagagataatgacatgccccaggtgaggcagctagaaaaggcagagccagcagtaaatccagacttctctgatttcaaagttcaggctctccaaagaacttttttccttatttataaaccccaaagagagtaaactccagcttttggcaagacaaaattgcacctggaattctgaccctggggccgtcaggcaggaagggaagatcaaagatgctgaactagtctgtccaagcccaaagcaagattggaaaaaaaaaaaagacgctactgcttaaagctctatggcccttgggcaagttattttacttctctgagcctctgtcatttttgtctgcccagcaggagtgtccttctttgcattagcgtcttggttagtcttcagggaaccagttcaccctatttcagttcaggaaaatagccctccccactcccctggctccaaaaatggacacatgaccagacctggccaattagcatatttcatcccttcagcctcattgattggttcagggatgagcatgtgatccaagttaggccagtgaaatactaatctgggccttttatagtaaccataaaaagagaatgtctcttttccagggagttgagcagataggatgtaatagtagagtttctgagcattaattcttatggcaaattttattaagctcctattgtgtgccaaatatggtgctaggaattgggggaaacatttgccttcaaggagatgtctactgcggtaaaataaaattactcaaggccgggcaaggtggctcacacatgtaatgtcagagctttgggaggccaaggcaggaggatcaatggggccaggagttcaaaaccatcctgggcaacatagcaagacccctgtctctaaaataaaacattaaaaaaaaaaaaaacccaggtatggtggtgtgtgcctgtagtctcagatactcaggaggctgaggcaggaggatcccttgggc

SEQ ID NO: 1242854 - DNA, 4001 bp, Homo sapiens
ttgatgggcttgccatctaagtggagatgcagaatgtgcccataccagcctgagttacattatcctcttacaggggcctcaagcccagcagcgagccttggctcccgagttaggcagactgtctcggctggtatgtgacacagggcaaggcacttcattgcttcagagctccctccatgccataaaaggccctacaagacctggtcctaatccctctctctggcctgttctccctcacccctggcccaccctgctcactccactccagccacactggctgccttggtgttgttcctcaaccacagctggcttgtttccaccacagggcctttgcatatcctgttccccaagcccttcccatggctggctgcttcaccactcaggccccagttcaaatgccacctctttggggaaggcttccctgattccctgactttggtgactcttcttcccagttcccgcattcactatttccctgttttattggctttaaagccactgtcatctggtcttttcttgtttatttatttgtttattctctggctctcccatgcaagcagagcctcatctgtcatgggtactgctgatccatggtgcctggctcacagaaggcatttattaaacattttgagactgaataaaaacactagctaacaccaacatgtatttaccatgagccaggcactgatccacaggcttttgtactcaaccctgacaacaaccctaagaggtaggtatcattatatcccccattttattaataagaaaacagcacagagagatgcagtcacttgcccaaggtcacacagggccaggggctgggccaggattcgaagcagacaggctgtctcctgggtctgaactctcaactactgcaccctaatcaaacaatccctctggtcaaatgtgagtggtaataatagtacccacctcgtgggtgttgagggtgagcccaagttagcattcagcgtgggcatgtgaacaattacagtcaatactgaatggagacctatgatgcttttatgaaggtttctattttgggttaaaaatgcacgaatttctcttgaccagaaatgatctctgagtgcaaatattttatgtcaatggaataacgcaaatgattaagcaacaccccataaaatggggcagacccagggaggaatatatatccaaactcactcatcccagtgagctcaccgcacatgaattacaaatgaggccgggtgcattaagcccctctgctggcagaagggaggctgctgcctgccatgggcctgtgctgagaatggcaggtccccagggcgaggagaggccacccccttctctgtctcttccatcacaggcgtgacagcctcagagcatgagccgattctgtgcagtgctcaacatacagatgagaatactgaggcacgagggacagcctgtgacccggtcaccgcgctcaggaggacgtggttacctgcggtcctgacggcgctgactttttagaatgggcgagggcagctgtgtcccagtgaccagaacgattactgcctttaaaaagtcgtgaaaatgatcgtgaactgtaccccacaccgagcgcgcgtctgccccccaaggctgtggagacgcccccagcttcccccgccagctcgcggggcaggaggggtgcgagcgactctggccaggccccagggacggggaccgggtcgcgcggccctgaccggcgggagcccaggaactcacgtggcgggagcgccaggggcttcagcacggagacccgtcccgtctgcccctggactcccgcgagccccgcgggcctctccgctcgccccgccgcccacctgccaggggaaggagcgcagtgtgcgtgccgccaggaagcggcgctcgaaactctgcagcaagagttcggtccccgcgttctcctcgggcgccatgacgtgggcggggccgcagcgttgccggcagaccgggcggaagcccggcctggactgaagagggggcgggcccagggcagtgagcgggggcagagagggggcggggcccgggggtcccccgggggtcaggaggaacgtcgtgggggcggactctagggcggggccaggatgattgttatgagggcggggcctggggtggggccaggataagcgtcgttggggcaggtcctgggtagggggcaggtcctgggtagagtccaggttggcgggtcctggggcggggccaggatagggcgatcctggaagctgggcttcagaagcgtccaggttggtggcgtcctggaggcggggccttgcgtgggggcaggataagagtcctggaggcgggcattagggcagggataaacgccattgggttcaggaggcgagactcggagcagagcccaggagacaggtcttagggcggcgctaaggccagacccagagaagagctcaggaggcggggccggggcggggcgttgactatgtcgtagcacatggccaggcggtgctcggactctgggaggcggagcttaggacgggccgacgtggggaggggcccagggtccgggaggcggggccgagtccgggctgcgggctgcgctcaggaggcgggccctgggaggcggagcttagggaggggccggtgtcgggagggacccagggactgggaggccggtcggggctgggctcaggggccgagacctagctgggcttggggcggggccgagacggagcgaggggtccagggcgtgggaaacggggaggggtttgaggaggggatcggaatgtggctcaagttcgggaggcgttacctgtggagggtttgaggcaggcccagcagcgaggccacggtctgccgacgcggggccaggggcgggccccaggatccggagcttagggcggggccgagtccgggtttggggaccgggaggcggggccggttagggcgagggtccctgggatcgtcgggtcaggccttgggccaacgtaggcactctcgcagttcctccgccttcaggaaggtctttttggcaggggccctacgggtgcgcgcttcggtcctggaggccttatccaagcctcctctccatcagcgccacccgtctggggtccgaaaggagggagctttccctctgtcccccagcctttggactgtcaccaaacaagccattcgttcaccaaatacttattaagcgcctaccaggtacctgacaagggagatgtaacggtgagaaaaactaggtgtggtccaggccctccaggggctcaggggctcgtggaagaagtggacattgaagtatttatcacacaaatgagtataaaagtacaatagcgatatctgccacgaaggcgagcagacagagctagcggggcttgcaggaggagttttgatcttgcagggacaggaaggaggagttagctcctgcggggtgggattgggggtggtggtgatatagacgtggggacagagtggaaaacaacaaaaatataattaatttagttcaaagttattgtgtcttgagttgaaaggcagggcagttagcaacacagttcagatttcagtactgcccctgaaatctgaactgtgttcaaagtctaaaacgtttaccttagcaaatccctcataaaactccatttggaagagtcccgagagctaatttgtaaagtatacttgcagaaggtagatgaggagacagattaaatcttattacctctttcagatgagaggctcttgagccctgctcagctatgagaataagaggggaattaattctaatagaatacacttgttctcgcatagctgttgttccccaccagaaccaaatgagctcaagatctgacaaagaaaaaaaaaaaggttcatcttttattcccccaaacactttcatttaaatcaagagggtgggatgtggttattgctgtgtttttagacagaatcaacagtttctgggtctgagatattgcatacaccctctcagtccctgtatcctgagatagagtcacctgataatccacagcaagtcctaaccagggatgggt

SEQ ID NO: 1242855 - DNA, 4001 bp, Homo sapiens
acaagtcaccacagaagtaatgaataaaaaaagaggtagagaaaaatgatacttgagctataatgaacagaaaaggctttagggaggtggtacctaaactagatcttagcaacatttcccaaagtatgagaggccaacagcaaggagaaagtctcaatggtattaacacctccactgctagtatttttctacgataataagaccagaccacaggctcacagtcagcaacagtatctctactctttttgtttgttaagagataaggtctcactatgttgcccaggcagcctccaactcctgagtttcaagggatcctcccacctcagcctccagagtagttgggactacaggcatgcaccatcttgcctgcctcttttccctttttattattttttggattattttagcggtgttttttgaggtggagttttgcttttatcgcccaggctgcagtgcaatggcgcaatctcggctcactacaacctccgcctccaaggttcaagagattctcctgcctcagcctcctaagttgctggggttacaggcatgtgccaccacaaccggctaatttttgtatttttagtagagacggggtttcaccttattggccatgctggtctcaaactcctgacctcaagtaatcagcctcccaaagtgctgggattaccggcttgagccacctgcccagcctggattatttggtattttatggcaaatgacactggtttccacctgtggaagtgatacgaaaccatatgcatattggcatatacatgtgcaatacatacttttaaaacagtagcacaaacgtggcagatgtttaagaaacaccattccagtggggcacagtggctcattcctgtaaccccaacactttagaatgctgggcgggaggttcacttgagcccaggagttcagaaccagtctaagcaacacagtgagacaccttctctacaaaaaattaaaaacaattagcctgctgcgatggcgtgcacctgtagtcccatctacttgagaggctgaggtgggaggatcgcttgagatctgaaggtcgaggcagcagtgagctatgacccctcaaaaaaagaaaaaaaaaaggaaaaagaaaaaccattctattgttccaaagggtaaaaaaaaaaaaattaatgtacagaaatggcggatgggtatttacgtagaggtgaacaggcatataaaatgtttaagcacctgcgtacacagcaggtgaccagacttcagagtcgcatcagggggctcccagataccaatcaagcattttgcatttccttctgtgagcagtgagaagtcactaaggacttctcggcggtaaaatgagaggagacaggtagaggctgtagacttaaggccagttaagaagctgatgcaacagatctggcttgggaaacctctgtgattctatcccttgtgcctggtgggtggctaccggctatcacagccctctaaggctgtctctctccaacaccgctccgatcctgcaaactctggtcattgtccaaacccactctccccgccctcacctccatcccctcccatgtgcactgcgttccacagcctgcctaaccccgcactcccagaatggtcacagccacagcccccgcaactcactgtttgccatagttgcctccgacaggtttggtgacgagctcctccccggacaaggacgactcggactcgctgtccgaaccggtggtgaaaaaccgcgacatggcgacggcgcggaggtgctacggccggacctgcgggggagccaaggcgtcaccggccacgcgaagaggcccgagccaacacctcccgacgcccaacccctcaccggccccacccggacctcgacctgggtctcccaccacgaagcacgaggcccaaaaaataccaaccagctgagcccgcgagtcacaccgcagggccctgacagcggaaacgccgagagagaaggcgggtcctcgcgtcacttccgggaagcgccgactaactacactgggagactacaactcccagtggccttcgcgccataagggggcggggacaagcctgagggaaccgggcgctgagaccttggctgcaggcgtcgcgaatcctaccgcgcgttggtgtcgggatttaaaacacgaagatcggcggggcgcagtggctcacgcgtgtaattacagcattaataggcattaatagtatagaagtagataatcctgccgggtgcggtggctcactcacgcctgtaatcctagcactttgggagaccgaggcaggcggattacccgaggtcgggagttcgagaccagcctgaccaatatggagaaaccccatctctactaaaaatacaaaattagccaggcgtggtggtgcatgcctgtaagccaagctactcgggaggctgaggcaggagaatcgcttgaacccgggaggcggaggttgtggtgagccgagatcgagccactggactccagcctggacaacaaaagcgaaactccatctcaaaaaaaaaaaagtagacaatgctagccaggcacagtggctcactcctgtaattccaacactctgggaggctgaggtgggtggatcacctgaggtcaggagttcgagaccagcctggccaatatggcaaaaccccgtgtctactaaaaaatacgaaaattagcctggcacagtgtcacctgcctgtaatcccagctacgtgggaggctgaggctggagaatcacttgaacccaggaggaagagattgcagtgagcagagatcacaccactgcattccagcctgggtgacagagcaagactctgtctcaaaaaaaaaaaaaaaaaaaaaaaaagtagacgatgctagatcttgcaggtctttataggcctgtggtttggagccgccatcggcagaggttttagtgcaagggactgtgttacatttttcaaggtggttttgatatgggagcgggacagggaagtgctgggaagggaagagcatgctcttccaaagtgctgggattataggcatgagctaccacacctggccgttttgttttttattgtgaaatatttcaacagacaagaataaagactattccaatggacatctatgtactcacaacccacccagcaccgtcaaaacttaatatgaggctgggcatggtggttcatgcctgtaatcccaacactttgggaggcagaggtgggcagatcacttgaggtcaggaattcgagaccagcctggccaacatggtgaaaccccatctctactaaaaatacaaaaattcgcctggcatagtggcagatgcctgtaattccagctactcaggaggctgaggcaggagaattgcttgaaccctgaaggtggaggttgcagtgagccaagatcgtgccactgcactccagcctgagcgacagagcaagactctgtctccaaaaaaaaaaagttaaaaaaaaaaaccaaggggttcattgtacgtctgtaaatccataaatatcttttttttttttttttttgagatggagttttgctcttgttgcccaggctggagtgcaatggtatgatcttggctcacttcaacctccgcctcccagtttcaagcaattctcctgcctcagcctcccaagtagctgggatttacagacgtgcaccaccacatccagctaatttttgtatttgtaatagagaaggggtttcaccatgttgtccaagctggtctcgaactcctgacctcaggtgatccacccgcctcggcctcccaaaatgctgggattacaggcgtgagccaccacgcccagctctctttattttaaataatatgtgtacatttttacaaaatgaaaatggtacaacagaatacacaggaagaaaaaatatacaggaaaaaatgtttccttcctgccctgacctcatgttcatcagcttttctctctagaagcaaacacaattgtcagtttatagcgttatcttccagatgtcactttgtgccctctctctccgtatctctctttgtgtatacacaca

SEQ ID NO: 1242856 - DNA, 4001 bp, Homo sapiens
cacaagtcaccacagaagtaatgaataaaaaaagaggtagagaaaaatgatacttgagctataatgaacagaaaaggctttagggaggtggtacctaaactagatcttagcaacatttcccaaagtatgagaggccaacagcaaggagaaagtctcaatggtattaacacctccactgctagtatttttctacgataataagaccagaccacaggctcacagtcagcaacagtatctctactctttttgtttgttaagagataaggtctcactatgttgcccaggcagcctccaactcctgagtttcaagggatcctcccacctcagcctccagagtagttgggactacaggcatgcaccatcttgcctgcctcttttccctttttattattttttggattattttagcggtgttttttgaggtggagttttgcttttatcgcccaggctggagtgcaatggcgcaatctcggctcactacaacctccgcctccaaggttcaagagattctcctgcctcagcctcctaagttgctggggttacaggcatgtgccaccacaaccggctaatttttgtatttttagtagagacggggtttcaccttattggccatgctggtctcaaactcttgacctcaagtaatcagcctcccaaagtgctgggattaccggcttgagccacctgcccagcctggattatttggtattttatggcaaatgacactggtttccacctgtggaagtgatacgaaaccatatgcatattggcatatacatgtgcaatacatacttttaaaacagtagcacaaacgtggcagatgtttaagaaacaccattccagtggggcacagtggctcattcctgtaaccccaacactttagaatgctgggcgggaggttcacttgagcccaggagttcagaaccagtctaagcaacacagtgagacaccttctctacaaaaaattaaaaacaattagcctgctgcgatggcgtgcacctgtagtcccatctacttgagaggctgaggtgggaggatcgcttgagatctgaaggtcgaggcagcagtgagctatgacccctcaaaaaaagaaaaaaaaaaggaaaaagaaaaaccattctattgttccaaagggtaaaaaaaaaaaaattaatgtacagaaatggcggatgggtatttacgtagaagtgaacaggcatagaaaatgtttaagcacctgcgtacacagcaggtgaccagacttcagagtcgcatcagggggctcccagataccaatcaagcattttgcatttccttctgtgagcagtgagaagtcactaaggacttctcggcggtaaaatgagaggagacaggtagaggctgtagacttaaggccagttaagaagctgatgcaacagatctggcttgggaaacctctgtgattctatcccttgtgcctggtgggtggctaccggctatcacagccctctaaggctgtctctctccaacaccgctccgatcctgcaaactctggtcattgtccaaacccactctccccgccctcacctccatcccctcccatgtgcactgcgttccacagcctgcctaaccccgcactcccagaatggtcacagccacagcccccgcaactcactgtttgccatagttgcctccgacaggtttggtgacgagctcctccccggacaaggacgactcggactcgctgtccgaaccggtggtgaaaaaccgcgacatggcgacggcgcggaggtgctacggccggacctgcgggggagccaaggcgtcaccggccacgcgaagaggcccgagccaacacctcccgacgcccaacccctcaccggccccacccggacctcgacctgggtctcccaccacgaagcacgaggcccaaaaaataccaaccagctgagcccgcgagtcacaccgcagggccctgacagcggaaacgccgagagagaaggcgggtcctcgcgtcacttccgggaagcgccgactaactacactgggagactacaactcccagtggccttcgcgccataagggggcggggacaagcctgagggaaccgggcgctgagaccttggctgcaggcgtcgcgaatcctaccgcgcgttggtgtcgggatttaaaacacgaagatcggcggggcgcagtggctcacgcgtgtaattacagcattaataggcattaatagtatagaagtagataatcctgccgggtgcggtggctcactcacgcctgtaatcctagcactttgggagaccgaggcaggcggattacccgaggtcgggagttcgagaccagcctgaccaatatggagaaaccccatctctactaaaaatacaaaattagccaggcgtggtggtgcatgcctgtaagccaagctactcgggaggctgaggcaggagaatcgcttgaacccgggaggcggaggttgtggtgagccgagatcgagccactggactccagcctggacaacaaaagcgaaactccatctcaaaaaaaaaaaagtagacaatgctagccaggcacagtggctcactcctgtaattccaacactctgggaggctgaggtgggtggatcacctgaggtcaggagttcgagaccagcctggccaatatggcaaaaccccgtgtctactaaaaaatacgaaaattagcctggcacagtgtcacctgcctgtaatcccagctacgtgggaggctgaggctggagaatcacttgaacccaggaggaagagattgcagtgagcagagatcacaccactgcattccagcctgggtgacagagcaagactctgtctcaaaaaaaaaaaaaaaaaaaaaaaaagtagacgatgctagatcttgcaggtctttataggcctgtggtttggagccgccatcggcagaggttttagtgcaagggactgtgttacatttttcaaggtggttttgatatgggagcgggacagggaagtgctgggaagggaagagcatgctcttccaaagtgctgggattataggcatgagctaccacacctggccgttttgttttttattgtgaaatatttcaacagacaagaataaagactattccaatggacatctatgtactcacaacccacccagcaccgtcaaaacttaatatgaggctgggcatggtggttcatgcctgtaatcccaacactttgggaggcagaggtgggcagatcacttgaggtcaggaattcgagaccagcctggccaacatggtgaaaccccatctctactaaaaatacaaaaattcgcctggcatggtggcagatgcctgtaattccagctactcaggaggctgaggcaggagaattgcttgaaccctgaaggtggaggttgcagtgagccaagatcgtgccactgcactccagcctgagcgacagagcaagactctgtctccaaaaaaaaaaagttaaaaaaaaaaaccaaggggttcattgtacgtctgtaaatccataaatatcttttttttttttttttttgagatggagttttgctcttgttgcccaggctggagtgcaatggtatgatcttggctcacttcaacctccgcctcccagtttcaagcaattctcctgcctcagcctcccaagtagctgggatttacagacgtgcaccaccacatccagctaatttttgtatttgtaatagagaaggggtttcaccatgttgtccaagctggtctcgaactcctgacctcaggtgatccacccgcctcggcctcccaaaatgctgggattacaggcgtgagccaccacgcccagctctctttattttaaataatatgtgtacatttttacaaaatgaaaatggtacaacagaatacacaggaagaaaaaatatacaggaaaaaatgtttccttcctgccctgacctcatgttcatcagcttttctctctagaagcaaacacaattgtcagtttatagcgttatcttccagatgtcactttgtgccctctctctccttatctctctttgtgtatacacac

SEQ ID NO: 1242857 - DNA, 4001 bp, Homo sapiens
gtatttttagtagaggcagagtttcaccatgttggccgggctggtcttgaactcctgggctccagtgacctgcctgcctcagcctcccaaagtgctgggattacaggcatgagccactccgcctgacccagatattattattgtttttgttactcttattatcgcaaagactctctcccaatttatggcttatcttttcattctattaagtgccttttttcccccaagatgaagtctcgctgtgttgccccagctggagtgcagtggtatgatctcagctcactgcaacttctgcctccacggttcaagtgattttcccacctcagcctcctgagtaactgggattacaggtgcctgccaccacgcccagctaatttttgtttttttagtagagactgggtttcaccatattggccaggctggtctcgaacccctgacctcaagtgatctgcccaccttggcctcccaaaatgctgggattacaggcgtgagccaccgtgcccagcccggcccacatgcattttagaaacagtacattgatttgtattctactccctttctaaaatcacttatcagttcttggaacttttttttttttttttttttttttgagacggagtctcgctctgtcaccaggctggagtgcagtggcgcgatctcggctcactgcaacctctgcctcccaggttcaagcaattctcctgcctcagtctcctgagtagctgggactacaggtgtgcaccaccacgcccagctaattttttagtagaggtagggtttcaccgtgttggccaggatggtctcgctctcctgaccttgtgatccacccaccttcacctcccaaagtgctgggattataggcgtgagccaccatgcctagccaagcctgtggttttctttctggaagtgacgcagtgcactgagaagaatccgtcccacgccacagcccttacagtcatcgttattgacatcacagtcaagtacagcagccacttgggctcccgggacatgcgctggagttggtactttataaagacaagctgtaggcaacagtctgattaactcgatgccacagcacatcacagattaccgacgtccagttcccattaccttggagctcagacaaagctcaaacccaagggcatggacaaaccagtccccaaatgctatccttgtggatctatctccaggcacccctcttgtaataatgctacatcgatcgggatccactcacaaggcggaaaccacagagtcatttaaacagggaagttttaacagaacaatgaactatttacaggggattgtgactaagtgtgaatcaaagagaactctaaaaaacacccatggggccgggcgtggtggctcacgcctgtaatcccagcactttgggaggctgaggcaggcagatcaagaggtcaggagttcgagaccagcctggccaacatagtgaaactccgtctctcctaaaaatataaaaattggctgggtgtggtggcacgcaactgtagtctcagctacctgggaggctgaggcaggagaatcgcttgaacccgggaagcagaggttgcagtcagccgagatcatgccagtgcactccagcctgggtgacagagggagactctgtctcaacacacacacacacacacatacacacacacacacacacgcaaacaacaacaaccaaaaaacacccaaagggtgagggagagagcccagagaaagaacaaacctggaagggggtagcctcgttaaggctgggtctcagacctcactggagagaggtggctgcagcccattggacggtgaggttggctgggttgccccaggtcacggctggtccacaaccagctggccgaggctggtggccaggggaccacaagcagaaacccctcctgctggggtgctggggtgccaaggttgtcaggctgggaaccacacactggggctggcaggcaggaagttgaatgccactgtgtgtccggtgcagggctgcctgccacgggggtgggacagaggaggaaccaggacaagccccttcctcctgtggtgtccctccggcgccctctactggcaaagaagaaatgtttgccagttccacatctggtagcaagcggtgcaataaatggatttggaactgggaggcaacagatagaaaactggcaccagtatgtgctcatggtaaaaaaaaaaaaaaaaaaaggaaaggcaagttttgtttctctttccttcttgcttgcttgctttctctttctttctttctattattattttgagagagattcttgctctgtcgcctaggctggagtgcagtgacaatctgggctcattgaagcctcgaactcccaggctcaagtaaccctcccacctcagcctcccaagtagctgggactacaggtgtgtaccaccatgcccggctaatgtttatttatttatttatttattttttgtaaagatgaggtcctcactatgttgccctggcttgtctcgaactcctgggctcaagcgatcctcccaccttggcctctcaaagtgttgagattataggtgtgagccaccacacctggccacagtttcatttcagaatgtccttgttgaagcagtaaaaatgatcaattttattaaatctcaaccgttgaatatatttcttcttaatattctgcgtgtcaaaatgagaagaatggataaagtgtttagattaatcataaatccaatggttacctctggaaaggctctcagagatggagttgtgggatgagccaaccaccacctgtcatggaacaccatttatacatggaagaaccaagaacaatttattattattttgagactgagtctcactccgtcgcccaggatagagtgcagtggcgcaatcttggctcactgcaacctctgcctcctggattcaaacaattttcatgcctcagcatcccaagtagctgggattacaggtgcacaccactacactgggctaatttttgtgcctttagcagagatggggtttcaccatgttgtgctgggattataggcgtgagccactacgcccagccaaattattattattcagacttgggtagctggcagacattgtttcaaaaatgaactgagtcggtcacatcaagaaaaacaactgacagtgctaccaatgatgaaattctttttcttttttttttttttgagatacagtctcgctctgtcacccaggctggagtgcagtggcaccatctcggctcattgccaagatctcggctcattgcaacctccatctcctagaagggtcaggtgattctcctgcctcagcctcccaaatagctgagattacaggtgcgtgccaccacacttggctaatttctgtatttttagtagagacagggtttcaccattttggccaggctggtctccaactcctgacctcaagtaatcttcccaccttggcctcccaaagtgctgggattacaggcgtgagccactgcgcctggccaaaattctactttttaagtgaaaattagaatttaaaaaaatgaaaaaaaatatctgttttcattagcctggcggctgcctaccacttacagattttatcctctcctttattattattattattattattattattattattattattattattatagagatggagtctcgctctgccccccaggctggagtgcagtggcatgatctcggctcactgcaagctctacctcccaggttcacgccattctcctgcctcagtctcctgagtaccttggactacaggcacctgccaccatgcctggctaattttttgtatttttagtagggatggggtttcaccgtgttagccaggatggtctcgatctcctgaccttgtgatccacccacctcggcctcccaaagtcctgggattacaggtgtgagccaccgcaccccgcctccttttttttttttgagacagagtcttgctctgttgcccaggctggagtgcagtggctctatctcagctcacaacctccgcctcc

SEQ ID NO: 1242858 - DNA, 4001 bp, Homo sapiens
tatttttagtagaggcagagtttcaccatgttggccgggctggtcttgaactcctgggctccagtgacctgcctgcctcagcctcccaaagtgctgggattacaggcatgagccactccgcctgacccagatattattattgtttttgttactcttattatcgcaaagactctctcccaatttatggcttatcttttcattctattaagtgccttttttcccccaagatgaagtctcgctgtgttgccccagctggagtgcagtggtatgatctcagctcactgcaacttctgcctccacggttcaagtgattttcccacctcagcctcctgagtaactgggattacaggtgcctgccaccacgcccagctaatttttgtttttttagtagagactgggtttcaccatattggccaggctggtctcgaacccctgacctcaagtgatctgcccaccttggcctcccaaaatgctgggattacaggcgtgagccaccgtgcccagcccggcccacatgcattttagaaacagtacattgatttgtattctactccctttctaaaatcacttatcagttcttggaacttttttttttttttttttttttttttttgagacggagtctcgctctgtcaccaggctggagtgcagtggcgcgatctcggctcactgcaacctctgcctcccaggttcgagcaattctcctgcctcagtctcctgagtagctgggactacaggtgtgcaccaccacgcccagctaattttttagtagaggtagggtttcaccgtgttggccaggatggtctcgctctcctgaccttgtgatccacccaccttcacctcccaaagtgctgggattataggcgtgagccaccatgcctagccaagcctgtggttttctttctggaagtgacgcagtgcactgagaagaatccgtcccacgccacagcccttacagtcatcgttattgacatcacagtcaagtacagcagccacttgggctcccgggacatgcgctggagttggtactttataaagacaagctgtaggcaacagtctgattaactcgatgccacagcacatcacagattaccgacgtccagttcccattcccttggagctcagacaaagctcaaacccaagggcatggacaaaccagtccccaaatgctatccttgtggatctatctccaggcacccctcttgtaataatgctacatcgatcgggatccactcacaaggcggaaaccacagagtcatttaaacagggaagttttaacagaaaaatgaactatttacaggggattgtgactaagtgtgaatcaaagagagctctaaaaaacacccatggggccgggcgtggtggctcacgcctgtaatcccagcactttgggaggctgaggcaggcagatcaagaggtcaggagttcgagaccagcctcgccaacatagtgaaactccgtctctcctaaaaatataaaaattggctgggtgtggtggcacgcaactgtagtctcagctacctgggaggctgaggcaggagaatcgcttgaacccgggaagcagaggttgcagtcagccgagatcatgccagtgcactccagcctgggtgacagagggagactctgtctcaacacacaaacacacacacatacacacacacacacacgcaaacaacaacaaccaaaaaacacccaaagggtgagggagagagcccagagaaagaacaaacctggaagggggtagcctcgttaaggctgggtctcagacctcactggagagaggtggctgcagcccattggacggtgaggttggctgggttgccccaggtcacggctggtccacaaccagctggccgaggctggtggccaggggaccacaagcagaaacccctcctgctggggtgctggggtgccaaggttgtcaggctgggaaccacacactggggctggcaggcaggaagttgaatgccactgtgtgtccggtgcagggctgcctgccacgggggtgggacagaggaggaaccaggacaagccccttcctcctgtggtgtccctccggcgccctctactggcaaagaagaaatgtttgccagttccacatctggtagcaagcggtgcaataaatggatttggaactgggaggcaacagatagaaaactggcaccagtatgtgctcatggtaaaaaaaaaaaaaaaaaaaggaaaggcaagttttgtttctctttccttcttgcttgcttgctttctctttctttctttctattattattttgagagagattcttgctctgtcgcctaggctggagtgcagtgacaatctgggctcattgaagcctcgaactcccaggctcaagtaaccctcccacctcagcctcccaagtagctgggactacaggtgtgtaccaccatgcccggctaatgtttatttatttatttatttatttttggtaaagatgaggtcctcactatgttgccctggcttgtctcgaactcctgggctcaagcgatcctcccaccttggcctctcaaagtgttgagattataggtgtgagccaccacacctggccacagtttcatttcagaatgtccttgttgaagcagtaaaaatgatcaattttattaaatctcaaccgttgaatatatttcttcttaatattctgtgtgtcaaaatgagaagaatggataaagtgtttagattaatcataaatccaatggttacctctggaaaggctctcagagatggagttgtgggatgagccaaccaccacctgtcatggaacaccatttatacatggaagaaccaagaacaatttattattattttgagactgagtctcactccgtcgcccaggatagagtgcagtggcgcaatcttggctcactgcaacctctgcctcctggattcaaacaattttcatgcctcagcatcccaagtagctgggattacaggtgcacaccactacactgggctaatttttgtgcctttagcagagatggggtttcaccatgttgtgctgggattataggtgtgagccactacgcccagccaaattattattattcagacttgggtagctggcagacattgtttcaaaaatgaactgagtcggtcacatcaagaaaaacaactgacagtgctaccaatgatgaaattctttttttttttttttttttttgagatacagtctcgctctgtcacccaggctggagtgcagtggcaccatctcggctcattgccaagatctcggctcattgcaacctccatctcctagaagggtcaggtgattctcctgcctcagcctcccaaatagctgagattacaggtgcgtgccaccacacttggctaatttctgtatttttagtagagacagggtttcaccattttgtccaggctggtctccaactcctgacctcaagtaatcttcccaccttggcctcccaaagtgctgggattacaggcgtgagccactgcgcctggccaaaattctactttttaagtgaaaattagaatttaaaaaaatgaaaaaaaatatctgttttcattagcctggcggctgcctaccacttacagattttatcctctcctttattattattattattattattattattattattattattattattatagagatggagtctcgctctgccccccaggctggagtgcagtggcatgatctcggctcactgcaagctctacctcccaggttcacgccattctcctgcctcagtctcctgagtaccttggactacaggcacctgccaccatgcctggctaattttttgtatttttagtagggatggggtttcaccgtgttagccaggatggtctcgatctcctgaccttgtgatccacccacctcggcctcccaaagtcctgggattacaggtgtgagccaccgcaccccgcctccttttttttttttgagacagagtcttgctctgttgcccaggctggagtgcagtggctctatctcagctcacaacctccgcct

SEQ ID NO: 1242859 - DNA, 4001 bp, Homo sapiens
aaacaaatgaaagtgctaatttactgtgtaactaatgacatagagacacaagtcaccacagaagtaatgaataaaaaaagaggtagagaaaaatgatacttgagctataatgaacagaaaaggctttagggaggtggtacctaaactagatcttagcaacatttcccaaagtatgagaggccaacagcaaggagaaagtctcaatggtattaacacctccactgctagtatttttctacgataataagaccagaccacaggctcacagtcagcaacagtatctctactctttttgtttgttaagagataaggtctcactatgttgcccaggcagcctccaactcctgagtttcaagggatcctcccacctcagcctccagagtagttgggactacaggcatgcaccatcttgcctgcctcttttccctttttattattttttggattattttagcggtgttttttgaggtggagttttgcttttatcgcccaggctgcagtgcaatggcgcaatctcggctcactacaacctccgcctccaaggttcaagagattctcctgcctcagcctcctaagttgctggggttacaggcatgtgccaccacaaccggctaatttttgtatttttagtagagacggggtttcaccttattggccatgctggtctcaaactcctgacctcaagtaatcagcctcccaaagtgctgggattaccggcttgagccacctgcccagcctggattatttggtattttatggcaaatgacactggtttccacctgtggaagtgatacgaaaccatatgcatattggcatatacatgtgcaatacatacttttaaaacagtagcacaaacgtggcagatgtttaagaaacaccattccagtggggcacagtggctcattcctgtaaccccaacactttagaatgctgggcgggaggttcacttgagcccaggagttcagaaccagtctaagcaacacagtgagacaccttctctacaaaaaattaaaaacaattagcctgctgcgatggcgtgcacctgtagtcccatctacttgagaggctgaggtgggaggatcgcttgagatctgaaggtcgaggcagcagtgagctatgacccctcaaaaaaagaaaaaaaaaaggaaaaagaaaaaccattctattgttccaaagggtaaaaaaaaaaaaattaatgtacagaaatggcggatgggtatttacgtagaggtgaacaggcatataaaatgtttaagcacctgcgtacacagcaggtgaccagacttcagagtcgcatcagggggctcccagataccaatcaagcattttgcatttccttctgtgagcagtgagaagtcactaaggacttctcggcggtaaaatgagaggagacaggtagaggctgtagacttaaggccagttaagaagctgatgcaacagatctggcttgggaaacctctgtgattctatcccttgtgcctggtgggtggctaccggctatcacagccctctaaggctgtctctctccaacaccgctccgatcctgcaaactctggtcattgtccaaacccactctccccgccctcacctccatcccctcccatgtgcactgcgttccacagcctgcctaaccccgcactcccagaatggtcacagccacagcccccgcaactcactgtttgccatagttgcctccgacaggtttggtgacgagctcctccccggacaaggacgactcggactcgctgtccgaaccggtggtgaaaaaccgcgacatggcgacggcgcggaggtgctacggccggacctgcgggggagccaaggcgtcaccggccacgcgaagaggcccgagccaacacctcccgacgcccaacccctcaccggccccacccggacctcgacctgggtctcccaccacgaagcacgaggcccaaaaaataccaaccagctgagcccgcgagtcacaccgcagggccctgacagcggaaacgccgagagagaaggcgggtcctcgcgtcacttccgggaagcgccgactaactacactgggagactacaactcccagtggccttcgcgccataagggggcggggacaagcctgagggaaccgggcgctgagaccttggctgcaggcgtcgcgaatcctaccgcgcgttggtgtcgggatttaaaacacgaagatcggcggggcgcagtggctcacgcgtgtaattacagcattaataggcattaatagtatagaagtagataatcctgccgggtgcggtggctcactcacgcctgtaatcctagcactttgggagaccgaggcaggcggattacccgaggtcgggagttcgagaccagcctgaccaatatggagaaaccccatctctactaaaaatacaaaattagccaggcgtggtggtgcatgcctgtaagccaagctactcgggaggctgaggcaggagaatcgcttgaacccgggaggcggaggttgtggtgagccgagatcgagccactggactccagcctggacaacaaaagcgaaactccatctcaaaaaaaaaaaagtagacaatgctagccaggcacagtggctcactcctgtaattccaacactctgggaggctgaggtgggtggatcacctgaggtcaggagttcgagaccagcctggccaatatggcaaaaccccgtgtctactaaaaaatacgaaaattagcctggcacagtgtcacctgcctgtaatcccagctacgtgggaggctgaggctggagaatcacttgaacccaggaggaagagattgcagtgagcagagatcacaccactgcattccagcctgggtgacagagcaagactctgtctcaaaaaaaaaaaaaaaaaaaaaaaaagtagacgatgctagatcttgcaggtctttataggcctgtggtttggagccgccatcggcagaggttttagtgcaagggactgtgttacatttttcaaggtggttttgatatgggagcgggacagggaagtgctgggaagggaagagcatgctcttccaaagtgctgggattataggcatgagctaccacacctggccgttttgttttttattgtgaaatatttcaacagacaagaataaagactattccaatggacatctatgtactcacaacccacccagcaccgtcaaaacttaatatgaggctgggcatggtggttcatgcctgtaatcccaacactttgggaggcagaggtgggcagatcacttgaggtcaggaattcgagaccagcctggccaacatggtgaaaccccatctctactaaaaatacaaaaattcgcctggcatagtggcagatgcctgtaattccagctactcaggaggctgaggcaggagaattgcttgaaccctgaaggtggaggttgcagtgagccaagatcgtgccactgcactccagcctgagcgacagagcaagactctgtctccaaaaaaaaaaagttaaaaaaaaaaaccaaggggttcattgtacgtctgtaaatccataaatatcttttttttttttttttttgagatggagttttgctcttgttgcccaggctggagtgcaatggtatgatcttggctcacttcaacctccgcctcccagtttcaagcaattctcctgcctcagcctcccaagtagctgggatttacagacgtgcaccaccacatccagctaatttttgtatttgtaatagagaaggggtttcaccatgttgtccaagctggtctcgaactcctgacctcaggtgatccacccgcctcggcctcccaaaatgctgggattacaggcgtgagccaccacgcccagctctctttattttaaataatatgtgtacatttttacaaaatgaaaatggtacaacagaatacacaggaagaaaaaatatacaggaaaaaatgtttccttcctgccctgacctcatgttcatcagcttttctctctagaagcaaacacaattgtcagtttatagcgttatcttccagatg

SEQ ID NO: 1242860 - DNA, 4001 bp, Homo sapiens
aaaacaaatgaaagtgctaatttactgtgtaactaatgacatagagacacaagtcaccacagaagtaatgaataaaaaaagaggtagagaaaaatgatacttgagctataatgaacagaaaaggctttagggaggtggtacctaaactagatcttagcaacatttcccaaagtatgagaggccaacagcaaggagaaagtctcaatggtattaacacctccactgctagtatttttctacgataataagaccagaccacaggctcacagtcagcaacagtatctctactctttttgtttgttaagagataaggtctcactatgttgcccaggcagcctccaactcctgagtttcaagggatcctcccacctcagcctccagagtagttgggactacaggcatgcaccatcttgcctgcctcttttccctttttattattttttggattattttagcggtgttttttgaggtggagttttgcttttatcgcccaggctggagtgcaatggcgcaatctcggctcactacaacctccgcctccaaggttcaagagattctcctgcctcagcctcctaagttgctggggttacaggcatgtgccaccacaaccggctaatttttgtatttttagtagagacggggtttcaccttattggccatgctggtctcaaactcttgacctcaagtaatcagcctcccaaagtgctgggattaccggcttgagccacctgcccagcctggattatttggtattttatggcaaatgacactggtttccacctgtggaagtgatacgaaaccatatgcatattggcatatacatgtgcaatacatacttttaaaacagtagcacaaacgtggcagatgtttaagaaacaccattccagtggggcacagtggctcattcctgtaaccccaacactttagaatgctgggcgggaggttcacttgagcccaggagttcagaaccagtctaagcaacacagtgagacaccttctctacaaaaaattaaaaacaattagcctgctgcgatggcgtgcacctgtagtcccatctacttgagaggctgaggtgggaggatcgcttgagatctgaaggtcgaggcagcagtgagctatgacccctcaaaaaaagaaaaaaaaaaggaaaaagaaaaaccattctattgttccaaagggtaaaaaaaaaaaaattaatgtacagaaatggcggatgggtatttacgtagaagtgaacaggcatagaaaatgtttaagcacctgcgtacacagcaggtgaccagacttcagagtcgcatcagggggctcccagataccaatcaagcattttgcatttccttctgtgagcagtgagaagtcactaaggacttctcggcggtaaaatgagaggagacaggtagaggctgtagacttaaggccagttaagaagctgatgcaacagatctggcttgggaaacctctgtgattctatcccttgtgcctggtgggtggctaccggctatcacagccctctaaggctgtctctctccaacaccgctccgatcctgcaaactctggtcattgtccaaacccactctccccgccctcacctccatcccctcccatgtgcactgcgttccacagcctgcctaaccccgcactcccagaatggtcacagccacagcccccgcaactcactgtttgccatagttgcctccgacaggtttggtgacgagctcctccccggacaaggacgactcggactcgctgtccgaaccggtggtgaaaaaccgcgacatggcgacggcgcggaggtgctacggccggacctgcgggggagccaaggcgtcaccggccacgcgaagaggcccgagccaacacctcccgacgcccaacccctcaccggccccacccggacctcgacctgggtctcccaccacgaagcacgaggcccaaaaaataccaaccagctgagcccgcgagtcacaccgcagggccctgacagcggaaacgccgagagagaaggcgggtcctcgcgtcacttccgggaagcgccgactaactacactgggagactacaactcccagtggccttcgcgccataagggggcggggacaagcctgagggaaccgggcgctgagaccttggctgcaggcgtcgcgaatcctaccgcgcgttggtgtcgggatttaaaacacgaagatcggcggggcgcagtggctcacgcgtgtaattacagcattaataggcattaatagtatagaagtagataatcctgccgggtgcggtggctcactcacgcctgtaatcctagcactttgggagaccgaggcaggcggattacccgaggtcgggagttcgagaccagcctgaccaatatggagaaaccccatctctactaaaaatacaaaattagccaggcgtggtggtgcatgcctgtaagccaagctactcgggaggctgaggcaggagaatcgcttgaacccgggaggcggaggttgtggtgagccgagatcgagccactggactccagcctggacaacaaaagcgaaactccatctcaaaaaaaaaaaagtagacaatgctagccaggcacagtggctcactcctgtaattccaacactctgggaggctgaggtgggtggatcacctgaggtcaggagttcgagaccagcctggccaatatggcaaaaccccgtgtctactaaaaaatacgaaaattagcctggcacagtgtcacctgcctgtaatcccagctacgtgggaggctgaggctggagaatcacttgaacccaggaggaagagattgcagtgagcagagatcacaccactgcattccagcctgggtgacagagcaagactctgtctcaaaaaaaaaaaaaaaaaaaaaaaaagtagacgatgctagatcttgcaggtctttataggcctgtggtttggagccgccatcggcagaggttttagtgcaagggactgtgttacatttttcaaggtggttttgatatgggagcgggacagggaagtgctgggaagggaagagcatgctcttccaaagtgctgggattataggcatgagctaccacacctggccgttttgttttttattgtgaaatatttcaacagacaagaataaagactattccaatggacatctatgtactcacaacccacccagcaccgtcaaaacttaatatgaggctgggcatggtggttcatgcctgtaatcccaacactttgggaggcagaggtgggcagatcacttgaggtcaggaattcgagaccagcctggccaacatggtgaaaccccatctctactaaaaatacaaaaattcgcctggcatggtggcagatgcctgtaattccagctactcaggaggctgaggcaggagaattgcttgaaccctgaaggtggaggttgcagtgagccaagatcgtgccactgcactccagcctgagcgacagagcaagactctgtctccaaaaaaaaaaagttaaaaaaaaaaaccaaggggttcattgtacgtctgtaaatccataaatatcttttttttttttttttttgagatggagttttgctcttgttgcccaggctggagtgcaatggtatgatcttggctcacttcaacctccgcctcccagtttcaagcaattctcctgcctcagcctcccaagtagctgggatttacagacgtgcaccaccacatccagctaatttttgtatttgtaatagagaaggggtttcaccatgttgtccaagctggtctcgaactcctgacctcaggtgatccacccgcctcggcctcccaaaatgctgggattacaggcgtgagccaccacgcccagctctctttattttaaataatatgtgtacatttttacaaaatgaaaatggtacaacagaatacacaggaagaaaaaatatacaggaaaaaatgtttccttcctgccctgacctcatgttcatcagcttttctctctagaagcaaacacaattgtcagtttatagcgttatcttccagat

SEQ ID NO: 1242861 - DNA, 4001 bp, Homo sapiens
tgcagtgagccaagatcgcaccactgcactccagcctgggcgacagagcaagactccatctcaaaaaaaaaaaaaaggggggcttagaggattttgcttcagggtggggcagcgcccaccgggtgctgcccccatctagccaccgatcgacactcaccttgcgttccacagggctggccccctgcagcaaggctgtcagcagggccatggccttggtttgcagctgctggttcatcctatggcaagaagagggctcagtggaacattcaggctccagccctgctccctgcatctggaccccagccccagaggcttacacctgtaggtgcaccagcagcctatccaggggcacctcgctcttgaccagctggcccagggctgggctgctcaaggtcacactctccagcagcccaagggccaggggaggcacggaggcatccatgaggttcatgttcacgtagcacaccacctgtaaggggcgggggtgtcaccacctcacccccatggaagaccgggtctaccactgccccactgctccactgcccccacccgctgccctaggaaagcccacccaccttcctcacaaaggggatgctcagagtctcccaggacaccacgccgtgctccatgagctctgagaaggccctcaggctgagggccagcacctctcctaggctggaggggggacatctggggctgagcaggaccaccccaggaccagaaagacccaccatctcccccagcccacacatccctgtgctcactcgtccccatcttcaatgatggtgcctagtatctggagcccattacggctgatgacctccctggcaaagatcatgtccgaggccagcggaacaaggcgcctcagggcttcccggcgcccttcaggactgttactctgcagcccacccaagagctgctcagcctcaaggtcctggcaggaacggagcaggagcagaggtgaagaggctgggcatggtaagggtgggacctggaagtgtgcggccccgggcgtcaactaggtggcgcaaggcagggctggggcgggggcctccggggcggggggcctctggacctggagcaaaggggcagggatggggaaggcgggacgggaggggcattactggggccgtgctgaggcacaggatgctgccattcttgatctccgcgcggttctggagaagacagcagaaaaggcagcgaggtcagggagggctccgaggactgatcaactggggtgtcggtgagggcggctgggggtgaataacagatcgcgctccggtagtgggatgaagagccagagttatcggggccaggtgggttagaggggtcggaaggccgagcttggggctggggagaggggactcacattctcggtgatgtatctccggtgcccatccgcaaactgcagggcgtaacgctcagagtgcgtcaggctccacctgaggggcacgaggctcagcgaggccggcagggggcgccgcccctcctgccctcccgccctccgcaggccctggcccggcagcactcacgcgtcgcacacctccttcagcacagcggccaggggcttcgcctgcaagtggagtggtcattctcgcggcctgggcagggagggatggggaggagcctggggggaggggtggggcgggctgccccgagggccagggggctaccgggaggtggggcagtggggcagatggaggcgggaccagccgggtgacctggtccagctggatgagctgcgggatggcgtcacgcatcttgatggcaatcttcaccacgttccgcggaggcgccatggtccagctgggacgtgggcgcctgcactttccggagaccgtgcacctgcggccaagggtgcacctggcctggggcccctggggacgaggaggtcctccctttccgagacctgacctcggtgtcccgcactcgcggcccagactgctgctcctggccatgcaacgcggccttcccaagggagccgaggttagttccgggttggagtctgggggtaggaaggtaggacggctccgcctgccccgccccgccgaggcggccccgccccacaccaaggtgcggcaggtgggggcggggagggcaggctgccggaggccgccccacccctagttccagcaaggtgacccacccaatcacactgccagtccagcacagtcccaaggagggtccccaaagaaccacatcagagctagccttaggcatggtttttattcacttgaacactgtacaaatattacaatttccttttgctgcaaaaagtataaaaataatctttatataggaatccattcgttactgtaaatctttctaaatctctgcaaatggctctaaatgagggtaaatgaaaaagccgaaatgaagagagggttatggggcagcaggaggtggggccaatcatcagggctggaccacccagactcctccccagagacctctgttccttcttggtagccgcccccaccacctgcaggttctagggctaaaggcccagcagaagtgggcacgtgagagggccaggaggagctggagggtcagggggtgggggatagcgaaggaagctagaagtggtgctggcatgtgcccagttccaccccacccttccctcctaggggaaggagctggcagaagcaagacactgaggctggcaggaacaagacactgccccctatggggggtaatggcagctcctcggttctgtgccactgggtggcagccgagcctgggctggcgaaggccgcagaaagggagaagcaaacactttggctccacggtgatgggggctgagtcctgttcccctgctctgcgagcacagaagtgccagcacaggagcgggagctgtggccagaactgtgcggtgaggggaggccggagaagccaggcgtctgtggctctcaagctctgtaggggtcgggtgggagaggtccccaggcaacccccaggtcagacagtctgggtcccagccacacagggcatgtccctgtcagtcagaggttgagaacaggcacatcaaagaggtcacagacaccttcactctcgtccaggttgtagatataatcgtggtctcccgggggtggagaaagacgaagcagaggggcaaacactgcagagagcactagtctcaggccctgggccagggctcccctagcagcagcccaacccctgcccacacccactcccaccttccagggccacccaccttctgaggacatcaactcctccagcagctccgagctcatgcactctgggaatggagggagctcagttactaacattccagctcccacctctccacccaccaaagcccaggaaagggaaccccacctgcccatcaggaacttcaccctttgccccagttaccataagcgccacaacaaggtcctcaaaagggcaagaaaacagccataggacccaatgagctgtgtcccttacccctagcctcagggaggaatgcagcagcctacctcgtgtgggatcaaagatttctgacagctctttggggagttccaaaactgaaaaacaagaaagccatgctcagggcacagaggtccagcctggccccactacagccccctggcttcctcggatcctataccacccaccctgaggctccacacagctaaggagatgtaggtcctgcctaggccaagctggcactgtctgttggcctcacttgctaaacctgaattcctcagtgctgagcccagggtaccaaaggccccctgcaagcgattggtacagcttttctaactcggaaaggccacagaagcctctttctgggctcagcatgcaccccctgtctgacagaaggtaccccatctgtcccacccttgctgagcacctgctctgtgcaagactgagaccagaccctgggtcaggtcaccaggcagaggtggtggcgctacagggtgatgactccactacaaacctctggccaggaggacacaggggaagcagaagaaaatgcaaccagagaggactatgag

SEQ ID NO: 1242862 - DNA, 4001 bp, Homo sapiens
aatcatctgaatcctacccggaaatgatatgaagtttaactttaacaggcactcaaagatgtgcccaggaaccttacgccaggactctttgcccagagatacttcttgcttgcccagaactgacttgggtgtcataattagttaagttataaatggtagattatgaaatggcttcgttttacttggtggaggagggacacagataaagaaattctacttacaccttctcaagcttagctacttcttacatcaattagctactattttttagcatcacagtttattcttaaatgaaaaacaaacagcacctcagctcaggtatgcaggtctgaagctacagtttacttttccttcaggttttaacaactcgatggaatttatagatggtctttttcccttcattgatcaccggaactgaaaagctactgcctaaaattcacttaccaactagtctacctgcatgctacatcttttttcccactgtacttcaataaagctgtcattgcaaacaaaaacataaaagcgtgttggacagatcgtctgctcctgctgtttaatgtcacagaaattcgtttttttttttttttttttttttttgagacggagtcttgctctgtcacccaggctggagtgcagtggcgtgatctcggctcactgcaacctctgcctcctgggttcaagcgattctcttgcctcagcctcccgagtggctgggatgacaggcgcccgccaccacgcccggctaagttttgtatttttagtagagaaggggtttcaccatgttggtcaggctggtctcaaacttctgacctcaggtgatccgcctgcctcggcctcccaaagtgctaggattacaggggtcagccaccgcgcccggccccacagaaattctttagcttttaaaagccatggaaacattctagataagttgttaaccattaacgggaacaaattctctttacacaaagctcaggcacattcaatcaaggggagccaggcctaagatgcatcacacagatctgaccatgcaactacctttctacaagtgtctgagctccggggtgcccgagtaccgacagccaaagaagcatttacactttgccagataaggaatcggctctgcgaaggtgcgaagaaccaaatcctagcgattaatgtcccaacaacgtgaacacttcctgcaactcgaaatcctcaagggaaactctgtcgaatccccaccaagtgaacgatgacttgtttctacaaaggctactgatttcaggaaactaacgtataactcgtcgccttaaagtgcctctaaaagcatccacgacggttaaagtcgctgctactacgggacgctatttattcagcgccaagacccaagcgccatcgtggatcaccccattcctggccacggcaaccctagggagcgggtcctaggagcctgctggagggcgaccgctgggccagcttcctctctgctgactgaggggaggccaggctgcctgcaaggggaaggggccctttccgcgcttaccagggtgagagccacctccagcatgggggcgagggccagggtgccgtggaagagggggatgcagtccacgaagagggtgtggtgggcgccggggccgcccagggggaggtgctccttacgcggcttctgcttctcggccaccaggagcccgttgacggcgcagtgcgggtacttggcgccgtgcagcaccatcttgcagtaggcctgggtggtcagtttcaccccgggcatgctgacccgggagggccccggaggcccctgggcgcgcggctgaggcctggacccgctgcctggccgcgcggcgcctcagccgagaagcgggacgaggcggcggcgattgatggcgcggccgcgggctggcgggggacccttcaggcccggccccgtttgggcctcggctcctggaaaagcgactcgcgcctctgggaagccgcagccccagactccagtcgcgcttctcgcccggcgccgccggaaagcagcctctccaacgcctgccggaaagcagcccggcccggcattttacgacgttcgcagcgctacccttttccgctccacggtgacctccgtgcggccgggtgcgggcggagtcttcctcgatcccgtggtgctccgcggcgcggccttgctctcttccggtcgcgggacaccgggtgtagagggcggtcgcggcgggcagtggcggcaggtgagacaggaggtggccggtgcggcgccgccaggccgggccgggtcggggggccgggagccatcaagtctgcacgtccgcagcctggccgctcggcttcagcaggaagcaccgaatgggcctcggagccaggtgacattgaggccggcccgtggggactccgggctcggtggctccaggctcggggggccgccccgaagtgcccggtccatcttacccggtctcgcagcggctgcggaccggcctcgggcactgaccttggagcgcccgctggccgagggctcaggctgcggggaggcgggcccgcgctctgtgcctgcagcctccgcccttgctccttcaaaaggtccctgtgcaacccctcccgggttttgcggggctcccgggcggcgctcggctttccagcctggaaggcgcctattgtttgctcacgcaagggctaggcccaaggagagaagctagacgcgggcgttcagccctgacgtcatgcttgtttattctgccccaaggagggtatttccccacatcactctcaccagtcctccgaagggtcgatttaaagggggccgtgtaaggttgatgggcctgaatagaggagggcccgggtgagggggggtctcataggttttccgctctcctcagggattggaaattgatcggggctgtgttggcagccttctccaatttccccttctagtctatgtacaggcggtattaggttttaaacactcagttgaatgtgatgcgtgccacggtccctgtgagctgtcacctccccccaccgctccctgaagaatggagtctgtcacggcagcacagtgctttaatgatctctagctttttcagagtcaccttgttagcattttttcttcttgcctttttttgtttgagacggactcttgctctggttgcccaggctggggtgcagtggtgcggtctcggctcactgcagtctctacctcccgggttcaagcgattcttctacctcagcctcccaagtagcggggattacgggcgcccactaccatgcccggctaatttttgtattgttagtagagacgggatttcaccatgttggccaggctggtcttgaacccctgacctcaggtgatctgtccgcctcggcctcccaaagtgctggaattaccggcgtgagccaccgcgcccggcctctccttgtttttttaaaaagaccaatgttctgttaattacctgaagcgcgtatatattatggcagttgatttataatgaagctccttaaaagcatgccaattactaagaaaaacctcatcctaggtcattttgtgaattcagagacagtgataaagaatggatcatttgcgttggggagaagcaaacaaaaaaattccaaaatgctctggggcaaaaagaagactaattccttgctgtttgtccttattcatagagaaggtgtacatttttatctttcagaatgttggctaccagggtatttagcctagttggcaagcgagcaatttccacctctgtgtgtgtacgagctcatggtaagtgtgacttttcttacttttaaataggctgaactaatttcattttgctcctgctgtgtataaagccctgtgctggagttttaaagaccttaattcggctcttgagggtctttaggggagatataaatgttctcacagggcttggttctagattaagaagtgtttataagtcaaattgaatctcttctggatctttggttatactgatacttccccacttacccttcccttccgttccacttttttaagcttcgagatctac

SEQ ID NO: 1242863 - DNA, 4001 bp, Homo sapiens
gggatcagctgtgccacagcaaccccagaagtgtgcccacctcccctgaacccccgtcccagccagccctgctgtgggcatgagagtgagcggtaccacaggtaggcatccagcccgatgacagccaggtggggccgggcggtggtctcgggggagatccagggcacccagtgggttgggccagagatctgaagatgagaacgtgtggcacagttgttcacaggaggctgcggcctatggccatgggccaccaggccacagctggtttgcagaacagcaagcctgaaaaagagccagtggtgccgagaggagcctctgttccgttaccccttctgagaaaaccagctctgtgcctcccacgaggccaaagaggctaaggagaccctggagtggctgctcgggcacatgtcagttccattgagcccctcatcctggtccacctctgtactccagcctagctttgacctagcacaaagcagcagcttgagagacactgatcctgggacacagggacctggcagggggtctagcctaaccccacgctacctggcaccacagcacctgagcactgctccccgcaggcaggggccaggctgtctgctgtcagaggacgaagcctgcagcctactgcccggaccccggcctcctgacacttctcaggatcctctaggagcagctgtagcctccgcaggtgcccaggagctttctccatctcaccctagaaacctctacggctttggatcagagaggagtcctggcctgccccatgccccctccagccccgtctacaggggcagggaccggcggagcaggcgcctcccggctgggaacccacccctcctgattagagagggactactgccaccacccgagcacctgggtcagtgtggcgacgccctgcagaaactcctcgggctccagcagcagcagcaattcctgttcacctgcagcccacacttcaggaggcagctgtggggacatggggacgcgctgctgcctgtctcaaccccgggtgccccaggggccctgcctgggcagtccagcagcaaagcggttcgtggccccagccaagcccaggccctgacaggcctgctctacagaagcccagtgttccctttcctgccaaggccaagctcaggccaggtctctgtggctggcaggaatccagaccacagcctgaatcgagacggaaccttctccagccagctcggctctataccagcagaacggcttgggcacctccacttcccgttctccatccttgctttacccatccgcgagacgcgcacggcccagggcagctgcctcagggacagctccagggctgaaatcatggaagcaaaacagccaactcgcggctggccctcgggaacccgcgaccactcacgctgcgggggcaggggtcgggactcgctcgggtccaccgcaggctgcgggccgggcgctggggctcgatgcggcactcgcagcccagggcctccagggcctccatcaggacgtcggcaccggcgtcttccaggatggctgggaccgggggagaggagcgcggtcactgcttccttccaccctcgcgagcgccctacctgggcgggtggccggaccggggagtctccattcggcacaaacccccgactgggaggcgggcccggccccaggcccctcggcacgcgcgccccgcccagtcggacagagggcgccgcctggcggagaaaggcctttcctaccccgagtatcgcccgtgccctccgccgcacctgtgtccacgcacaccgcgaggcgcttcaggacctgctccggccgcagcagccgcaacgcctcggcagccgccctgcgctcacccgctgggtcccgggctctcgcggcggcctccgagccggcggagtcctcagcgtcggagtctgagatctcccaggttggaggtcgccgctgaccgctcccgccccgtccccggccccggccctggcaagagacccccgccctcccgggtccaacccgcgccatggccggaccgacctcttcctcgcttccggccgcgaccgaacactttagcctgggacaccggcctcttccggtgacttccggccggaccgctgaggacgcggacccgccatggcgcggaagaaggtgcgtccgcggctgatcgcggagctggcccgccgcgtgcgcgccctgcgggagcaactgaacaggccgcgcgactcccagctctacgcggtggactacgagaccttgacgcggccgttctctggacgccggctgccggtccgggcctgggccgacgtgcgccgcgagagccgcctcttgcagctgctcggccgcctcccgctcttcggcctgggccgcctggtcacgcgcaagtcctggctgtggcagcacgacgagccgtgctactggcgcctcacgcgggtgcggcccgactacacggcgcaggtgcgtgcaccccgtccgcaccccgcccctgcagccgcctggtctccccgcctcccctcctccctgcaggtttgcgtggctgaggctcccacctcctgacctcgggggccgagagctttgcgagctgaccccgcttccttctggctttgcagaacttggaccacgggaaggcctggggcatcctgaccttcaaaggtaaggctcgggagagcgggtgcccggcagttcgatgccgaccgccgacggcacagcaagtgtgtgcagacgcctctttttcttcatcagggaagactgagagcgaggcgcgggagatcgaacacgtcatgtaccatgactggcggctggtgcccaagcacgaggaggaggccttcaccgcgttcacgccggcgccggaagacagcctggcctccgtgccgtacccgcctctcctccgggccatgattatcgcagaacgacagaaaaatggagacacaagcaccgaggagcccatgctgaatgtgcagaggatacgcatggaaccctgggattaccctgcaaaacaggaagacaaaggaagggccaagggcacccccgtctagaatgccagaaccagcgggtggccttaggggctgtgaggcagtggggaccttattgatgaaagaaaccgtctttgcgttacacccgagtctgcctctcggagcagggagctcaccttccgcgacgtgttctgagggtctgcatcttaggggggagggctggggcaaatcgccacctgtgcctttcctctggccctgctgcccccacacccaactccgagggcccacgctggggaaagcgggaagcgctcgctccctttcccccattagtgctctctctgcctggatcccggcagaagctatgaaagggaataaagagaaaagaagtacccagggtcgtggtgtctttgcgctctgtctttaggaccggggagagaagggctgacgctgtggtcgtggccctggccgggggggcgcggggggggcggggttcgggcggtgcggagcagggcgccgcgtgggtggaaccacctgggcgggttgtgggggatacagttagtgtccgagctgctggaggagacttggcctccgcagctgccctccggccccccacggctgccgggttccggggtgcaagtgaagcagcctccccgcggaggccgcagcgccccgaccaggcctctttaagcgcaggccccgccccgggcgccaccgccccgccccgcggatcccgctcccgcaccgccatcatgatctgcctggtgctgaccatcttcgctaacctcttccccgcgggtgagccgcgcggcgcgggccgggggcgggtggccggtgctgggccggcctgacggcccgtccccgcctgccccgcagcctgcaccggcgcacacgaacgcaccttcctggccgtgaagccggacggcgtgcagcggcggctggtgggcgagattgtgcggcgcttcgagaggaagggcttcaagttggtggcgctgaagctggtgcaggtgggggcgcggtgagcgagcgggggcgcggtgtggggggaaggggagcggg

SEQ ID NO: 1242864 - DNA, 4001 bp, Homo sapiens
aggcgcacctcaatctctccacttgaggggcagaggaggctccaggctatgtggccagccctctgcctcctactcgactccctggctccccatgggatggaggtggtgagatccaaaaaccctcagtgggaaaacaggttctgcaccttcctgccacctccacgcctctccctgggctgtagtcttggcatttgccaaggcccccgtgggcatccacgccctgttttccccagaagggtctcccctcattccctgcaaaccagcagggcatctccaggtggaaagaaggggagggcttgggaggcagatggaggttcaaggtctagttctttgcatttaccagctcagtggccttgagcaaaccgacttagatctctagcctgtttccccacttgcaacaggagagcgtgctggaaacagctcaggggtgaggctcccagggagaaacggagatggagggcgagcaccagccaactgcaaacctccagcagctcaggtcgccatccttccccttgtgtgactcctgggaaaccaggaccccgtcccttcctcgtcctctttaagctttcttaactgaaggccgaattccaggaagaggtgcccagcaataatgtgtcggttcttagatttctctctgattcagactggagtgcagaggtggctaaaggcggcttttaaaaaatttttatgataaaatatgcataacatcataatcatcattttaaccgatgataagcatacaactcagtggcattaaataccttcacgatactgtgtaaccattgccactatgtatacccaaaactttttcatcctccccaagaaaaactctgtcccattaaacagtaactcccggttcccaggtacccccaggccctggcaaccatcattctactttctgtctataaaatttgcctattctaggtgtctcataaaagtggaatcacactgtatttgaactggaggcttcttaagtccctctccaagccccttacttagacacagctgaattataagatcaaggtgcacacacacacacacacacacacacacacaccctcaaagcttgggaggggcagtgctcccttccccaaaactgaagctggcctggagggagagctttgccctgtggtgtcttcggagtccccatgtccagccccacatcttcacctaaaagacctccctggagcgtgctcagatctctggatttggggagggcgtagaatacacactacgagctgcagcctctcctacctctggaacacatgggtgcggtctcgcctctttaaagccccccaagcccttctagagttggcagggagagaggtgtcatcccagcagcgcctcccggctcctccaccgttcctgacccccaagaagtcgctcctcgccgctcgggggcgcgacggagcagcggcgggggcctagaggggtacgcagcccaggaggacccgctggcccggcctggcgcaccagtcctgcccgcgaggcgagtctggggacgctgcccgggaatccctcacgcgacctggggatctccctggactccaagagccccgggtgtaagtccggcggggcgaggggaggcgccctgactcctccccaaacttttcccgcctgcttcggctcaaaaggcgtgggaagctgtcccgggatggcgaagtggaattctggggccggagcgagcgtggcgcagaccagaggtcggcggcatgggtggcacctcggccctcccgttactgtcaccaattccgggggctgctcccggtccagtaagtggaggggtcgcgtccctgctgcccgggcgtacacgatcccggggcccccccgatgtcgccccgcgccctgggtgcgcccacaactcacccggcgctggcggctgcgctggcagctggatcgacggactggctgggggtgcgaggcgaggccgccgggctgttttgaagctctgggctgggactgcgcgccctccctccaccctctaggcggcggggcccctccttccccgatcccgcctcccgggccgtgacgccaggagccgggagagccgagtgggaggggccgccggcgaaaggagggggccctggagggaaaggccgaggccgggagcgccctggcgcccccgcaccaccgttcccgcccgcctccctgcggctctgtggccagctttggggcggagccggtggcacgggcccgggggaaaagggagaaagggaggctcccgggagcaagggtcttcccttctctgcaggtttccacatccctctcattctctttcctctcctcttctccccttttcttcctcttccctaaggagttttggaatccgggctccctgctctagaaccccttctctggccttttatgaacttcctgagctcgtccataatctcccctgtctcagtttcctcttctgggaatgggagtgattataggtcggaaggtggtaatacgtccacaatgtttggctcatggtacctgctccatagacgtcagccattgttatttttatcatctcacctggagtcctggccttggtgcgagatgcccagcaaccagtcttcagactcttccaggaccccccgttcactccccccacccgaccagtacacacacacacacacacacacacacacacacactcacacaaagcactccccacagcctttcaacccacagtcctggtatttagtgtccctggaaatgacatcaaaggaactgcctttctttccagcctcagtttccccatctggaaactgggagggctgatctgctctaggggctcttgggaggatgggggaggagaccagaggcgcctgagccccatcgtgtgtgtgtggaaggagggagtgggagtcagtgtatttttacaaattgaagaaattccaaaacagggtcacaacatataacagtatattttaaacttttaatttaacaagttcatgttacttgcacataccccagaatacaaggcaattgacttgtgctactgacaagagaatgagaaacccttttaagaaatgttaatttattgtgcaatcctgtgctctggttggactccatgtttgtattttctgttgagcatctttttttagtcctgctgaggagctctgtcacgagagggccttgttggctctaaattagagatccttgggggatttgagatcccctctaaagggccaccccctcccccaggccttgagcttcccaagttggcctagggtctgacctgccaaatctcctttaattctacagttaaccaagactcccatcccccaagataattgtgtgtgtgtgtgtgtgtgtgtgtgtgtgtgtgtgtgtgtgtgtttggagctggagaggggacaggaaggcactaatatgaactgagtcctcttcctccataaaaggggaggagggtgaggtctggttgctatagaggaggaccaggaagggcccacctacctgcctatggccatgtggaggacagagaaaactccagagtctcccagaatggaaaggccaggtaggggatggagcaggcaggtttctgcatttgctgagggcttagtgtgtgccggttactttacaaacataaccttcaatagaacacggcagccctgcaaaacaagttaccctcattttatccatgaagaaactaaggctcagagaagctacaccagtaacttacccaaagtctctatgcagttgataaagtttggatttgaacccagactcactgcagcaaaccccattctcctctttccaccctatcactatttaccaaatgctaaccacactcaagctctaaattttgccatatccaccttccacctgaactggtattcacttaattgttttctttaaattaactccgttgattttaatatgtttatttgaaaaagaaagccctatattgctatggtaaacaggaaaccagtgccatctgccaaaagtagaagacaaacttatgaatataaacactattgaaataaaacagtgttagtaaattgtagcca

SEQ ID NO: 1242865 - DNA, 4001 bp, Homo sapiens
ccactgctgcgtgccctgtggtctgtgaggttccatcttttgggaatgttctcttctgctgtccctttgactaattgctacttgccctcaggatcagccccaccatcactacttctgagaagccccccagcctcgccctgcagcagagccagggtctcttagtcctctgttacctctgtgacttccctcccaccccagaactcagatcagggtacagttgcctgttggccaacaaaatggataatacttctggctccctgaagcaggtacctggagctgggccttgacccgggactccaccttgtcgtacttgggtgagcgccacagagctttcaggggcctgggctggccctgctcccggctgcgctcctgttctctgaagcgcttctgaatctccctgatccgcctcaggttctccttctcatggtccttagggtccttccctggagaaaagatgcccccaggttctgccctacatggggcccacacagtccaacttccactagttcacacacaggcctgccccctgcctcctacagaaagagctccctgacctctccaactaccttagaccctacacacactctccctcatcaccgtgttcccttcctcatgtagtaagtatcacaggatgattttctccattattattattattattattatttgagacagggtctcactctgtcacccaggctggagtacagtggcatgatcatagctcactgtagcctcaacctccccggctacctcagcctgccgagtagctgggattacagacacactccaccatgccagcctgatttttgtattttttgtagagatggggtttcaccatgttggccaggctggtcttcaactcctggactcaagtgatctgcccgcctgggcctcccaaagtgctgggattccaggagtgagccactgcgcccaggtgatttcctccattattatagtgaagtacaccattgaagtacaccatagatcatctcatatatgacattcatctcttgatctttgtatcccaccttgactcagtgatggctcatgcttatcttcagccctgtgttctagcatctatatggcctggcacacagtaggcactcaacaaacaaatttaatgggtaacaaatgcataaagcagagctagggcttcgtgggaactacctcattcagttcacctccttcgagaaggtagcatatttctcccccttttatagttggggaaactgagactcaagagatgcaaagcctgggcccacgtcagggtggaaagagcagctgcttttgatctctttccaccccgcactgcctctctgtcccttcttccattcctgggacttactcttgagagaggccccaggacctagggagatcccctcgagttgcaacagcacgtccccgacgccgcgctggccgcgctccaggatctctccggcaccgggaccgatgcaggggccacggggagcggtggtgtccagggcccggtcggaagtcagcaagtccagcttcagcgcgtttccctcgaggcgcccttgagctgtggggcggagccgggcggagtccggggctcagaggtggagccagggccgacccctgagcctcgcaccaccgccaagcccccggactcacccgaggtcggccgcctgtagttgtcaggacagagcgtcgggtctggggggatgggccccgagatgcgggacgggccctcgcacatgccgccggcgccgcccagcaacggtgccccgaggcctgcagggctgtttacctccctccccgggcccccttccccaaccccgggccccctccctcgcccggcaccctgaccctggcgtgcccgccactcccgggcccctgccggtccccgcctgggccccggcctcgctcgccacctccgcgacctctgctcccagcccacttctcggtcccgctcgcggcctctcccccgcggcactcgggcaggggctcactcgagaggttttgccgccagccgctgccacccgacgggacttgttgttgccgggcaaccgtggcttccgtccccggggtcagggcccactgaccccggcgcaaagcgtcctggggcttgtagtttcggccgagggtgggctccgcggtcgccggtttctcttcccagctctgccctcgcttgctggccggtctccggggtcagcgcggggccaccatccagccccttggggcccgccccaagcagctgtcgaggacgcactcagcctgcgcagccatggcctcggcaggggcggagaggcggccgggggtccaggaggcgacggtcgtggggcagggacagctcacggaggagcccggcagcgctcagacctccgaggtgaccgtcaggctgtttaaccttcaaacacagggccgcagcgctctgagaggtggaactgagcgccccgacccgctaactgccaggctgggccctccaggcggggaggggcacaggctggtgtccttattcccgtttcggtgtctaacgttaggtgttcagtgacggatccctatgtcctttgcccggccatggtgaccgatggcctgtgtgtcatctctagtgtccagtggcgggagaccagttcctggtgcctgcccatgaggcccgcggaacccagagtgaagaccagcgcccagcaggcgcagcttcggagtcggagctccaggaggaaggacccaagctgggggaggagcggcccaagccgcatgccggggcgctagaggagagaggccccaggcccgtggtctccattgtgaggccccgtcatggtccaaagagaaagcctgtcaagtgagggggctctcggggggaaggagctgcagccccggggttggggcacacaccacagtaggattcctaaatcctgcactcctgcagggaggattctcgtccccagccactaccatcactctcctcccgttcctcaagagcccccgtgtagggagcagcaggagagtgggagcttcagggcttgtaggggcctgggctcactggcctctaagcctcttgggcctggggtctcattgaccaggaacgggacaggcgtcgagccctggggctgtgggcaggctgggctattccctgggccagggaatgggagccagggctggagcctggctcaagtctcttgtccctggctcaggtctctcagcctcccgggccttcgtgcccatcttaaggctgaagctgagctgccacccaagctgccgctgcaggaggaggagccagaggacagccagagtgagccctcaccatctgccaaacagcacaaaaaagccaagaagcgcaagagcctgggggctcccgtgctccacgctgtggccagcatggtgtctgcacccttagagacattgaggctggagcgtgagtggcagtccctggactgttccttctccccctgcctgtggggcccgacatggcacaacctggcgctctagcctctgccctgccctgggtctttgcaggaaaggcccagcgcctgcggccgctgtaccagtacgtcaactattgcaaccctgagctgaaccaggcagggaagggggacggggaggctgaggtggaggcagaggcagagctggccccggttcccgaggagggaggtgtggagcaactgcaggccttgctgcccttggcaggtgagctgggcccaggcctcgctttgccctgtcccagtccactagtgacccccacccatgccctggctcccctcggagaggaggctggagaggagcctgggggcttgcccagcttgggggtgagtgaccacaaggccgaggtggataagtcaacccaggtggacatcgacaagatgctgagtgtctgcactgctccacttgtccccccgctctctcctcagtacaagtgactgtcccgccccactggtggctcccctccttccacgcctgaatttggcttcaggcttcctgtgggcctaggccctctggtggcgggggcaaatttggcacctgcccccacttgggactttggtctt

SEQ ID NO: 1242866 - DNA, 4001 bp, Homo sapiens
tacttgtcgcaaatataacaccaccttgtgtgtaaacttcatagcgactgttgcttgtgatttcatttgttacacggcgagggaggtgttcaactccttctatcttcagctgattgataaaatactcctaaatcaaatcaaacttgattagtaggctatttaatacagggcagtttttaataggtcacagatatttaaaataatgtgctgtctttctctgagataatgaacttaataatgaatatacacactaagttacttctttatagtaacttcagccaaccagtctacatttaatgaggttttcttgttttggggtttacactaaggaataattgcacttcagtcattatcagcactcaactacaataacatatgcacacacatacaaaacctcaaacttttaaaagcctggattaaaagatttctgctacctagaaaatacttcccaccaaagccaggtttgtagccaagcacattctatgagatgataacaagggaatcctttccccagacaatgttttagactatcagttctgtgctaatctatcctagagggacttcatgtcactgggtcccttggcttggtttatttatatccccagtttaaaaccatctttactaggccctgtgtgttgccttaggccctatgccaagcactggggatacctagatgaatcaaacaggatccctgccctcaaagagactgtggtcactcttctcagctgacatttttctcccggccacctgatatatctaggggatcatcagacttgtccgaccaagctgtgtcccctctcaacacccctcagacccatgtgtagccccattccatctttctcagtgttctccattgtccttaactgtagttaacctttgccaacatcctcagcgtcaagctccaatccctttctgaccctatggccctcttaacacagccttggtgaatgtcctatttcctggtccctccttttccctattggggtttttccagcgcctcagcatctcctttcatgtctccccatcaccctcagagatcttccatcctcatcactgttccctttcagggaccttccttctgcccccagaaactcccttaatggccaacttcaggactctcccgttattcctatccagatcctccttccgacatctccccctcccctgcagcgacctccgatcctctcctaccactcagagccccttcacctttcagtgcccttgcacccatgtcagggacctgcatccttctggggacccctcccatccctcttagtgttgtcagggaattgcatccttctcgggaccccttccatcattctcactgtgcctgcacagtgtcagggacccgcatcccctggggacccctcccatttctcttagtgttcttgaactctggtcaaagacttgcatccttcttgggacccctcccttccctctcagagtccccgcacagtgtcagggactggcattcctcttagtgttcttcaactcctgccagggacctgcagccttctcggggcccctccaattcttatcagtgtccccgcacggtgtgagcgaccggtatcctcctagcgaccccttacatacgtctgtgttcccgcagtgtgagggacctgcatccccctggggacccctgccatccttctctgtgtcatcgcgtagtgtcaggggcctgaatccccctcagagcccctccatccctgtcagaggcctcgcatccgctcaggaggccctcaacactctcggagtcccctcactcccgcgccagcgcggccgcacctcctcggccggctgcgtgttgagcaccagcaccaggcaggctgggtggcagtgcagctggagaaagtggtagaggagccggtccgcgccgagcccgcgggcgcacactactagcccgtcagtgtcgagcagttccagcaccagctgtcgctcgtactccagcagcggcgccatggcaatccgtcgagccggctgccctgactccatggaagctcttccgggtcgcagccgaacgcagccgaaggaagccgactcctagtggagagtaggccgaactcaaccgaagagagccgagtccgagaggacggcagccagccgaacgtagccgaggagagctgagactgagatgatcgtgggccgaacgcagccgaagaggagccgaggccacgacaggcgcgctctcagaaagccgaagagagccgagcctgagaaggcaagcgttggccgaactcagccgaagaagagccgagtggagccgaagattcatggagtcacctgtaggggctggcgccccctgtcggtgtagcttgcagatatcaggctccattcacgtctcttttgagtttccacatcccctggcaccctagcctcaagctgccaaaaagcaagggaaggggaagtaagcctaaggagcttaatcccccgacatcgacagttgaaaaagttactggtcaatattccaaatgcgccaagagttagtagcacctgtttcctagggtggtttttggcccttccttttgcgattactccccatccttcttttaattttttttttctttcccgagacaggatgttgatatgttgcccaggctggagtgcagtggctgtggaataagcagaatcatttactgacttcagacctctgtttgcctcccaaagacttcaatacaataaactatttttaaaaatccctccttccactagagggacacctcccgcagtgtttgttctatacctagaaatgcctgatagttgaactagtagaggaattgttttgtatagaaaccccccacctttgttattagaaaatagaaaatacaagtaaacaaaaatgaaaatcacttgtttccattacttggaaataaccactgttaacatcacgaaatctattttatttagtccttttttttctatctatatacacattctctcatcacacggagttcttttaccgacacgagataattaatatccctgatttaaatccccagctttgtcattaacatttggcaaacctctgaacatgatgtttcatattcttttacaaagtccttttatatggctgatgagatttccattatgtgggtgtacttacctaattgcttattagaggacatttagtctgtttctgctttttcccttccagtaatataaataatatttcactaaacatctttgtatgtaaattcagccgtggccttcagatacacgtctagaaatgaataatcactgggataaagagaaaaaaatttgtaaggcttttcattccattcacattgccacattgccctctagaaagcctataccaattcacattcacactagccgtttccaagaggatctgttcctctacctctttactgcttaatctggtattttgcttacattttgtcaagatgaaaatagcatataattcctgaatgctgtttaagtggaaagggttgccggcagacactttacatacagcgtttcctctgaggcagatattaatctcgtcagttctgccagtgagaaaaatggaggtgcagggaggttatataacttgggcaaggccacgggagctagttagtgtatttcttagatctatttcaggacgtgatatgggggtactcaacacatatttaggaaatgaagattgaaatgacaaagctgaaattcaaacctgactcccaagcggtggtaggcagaatatcggcttcccaaagatgttcatatcctaatccctggagcctgtaggttgttttatgtggcaaaggggggtttgcagatgtgagtatgttaaggttcttgagatggggggattatatggattatccaggtgggctcaatgtatcacaaatgtgcttataagagaaagagagaggtaggagggtcagattcagagatgtgacaggaggccgagttcagagtgatgtggaacgggcactgaaccaaggaatgcagcccttacaagctgaaaaaggcaaggaaatggattctcccctagggctcccggg

SEQ ID NO: 1242867 - DNA, 4001 bp, Homo sapiens
gagcaacatggtgaaaccccgtctctacaaaaattataaaacctagctggggcgtgatggtgcatacctgtagtcccaactactcaggaggctaaggtgggaggattgcttgagcccgggaggtggagactgcagtgagccgagatcatgccactgcactccagcatgggcaacagagcgagaccctgtctcaaaaaaataaataaataaaataaaataagaaaaaaagagaagagcttactgaggtcttaagtgcaagtaaaacaaactacttggtattagcaggtagagttttaactaggcagacacctcctgtagttttctgtgtttgctaagagtgggaagtgccaggatttgggaataataaatatcatttattgactgcttactacatagcaggtactaaaattaaactaagatgatggcctcctttaatcctcaacaagtgtagtagctagaaacttttcctacctatattttatggatgagaaaactgattcttaatttgccaaagaacatagctttggtatgtgaacccaagactgtccaattctgaagctcatgctatttgctattatattacatctttctagtaatcagaaatatgcacagcgcatccaggaatcagggaggacacaataattcatattgtgaattaaaaggatcactaggccaggcaccgtggctcacacctgtaaccccagcactttgggaggttgaggcgggtggatcacctgaggtcgggagttcgagaacagtctgaccaacatagagaaaccccatttctactaaaaatacaaaattagctgggtgtggtggtgcatgcctgtaatcccagctacttgggaggctgaggcaggagaatgacttgaacccgggaggcagaggttatggtaagccgagatcgcaccactgcactctagcctaggcaacaaaactccgtctcaaaaaaaaaaaaaaagatcactagaaaatgggtttgtaaaaagtagaggttcctcttcaaagacttccttccccgtctaattaggaataaatagtaacttctcttagagcaaaatttattcaaagacctgtgctaacattcttaaatatctgctagatataataaagaaatcaatgtactttatgttcttagctcccacaatttagcctaaatatttgccctggcatgcttatactggtccaatcaaacattaggtcatagcctgttcctcttccttacttaaaagtgtttttacctttctcagcattccacaagttacttccttcttcctttgttctcctctgcctttgcctcttttaaaaagttctatgttgctagtcagtcgggacaaatacagaatgtgaggtcccgttccagccaaaggaaaccggacacagcagtagggtggacgcgccacgttataaatgaccctgtctcctttgttcagtgtactctcctggcaaaactgctggcgagtgtaccctttctgcaggaagtaaaaatggccttactaaataaattaaatttaagtttaagttctatttctttacagcaccgaggaacgagcatttcgaacaggttgaacaccttgacagattcagtgtgtggcctgcctgagacctccaaccagtctgcagggcactgtcacgtccagtcgtttcccaaggcctaaaataggcaggcactggctcaaggccacacagtcaaggccccagggttcgtccgcctcgggctcctgtcaccctcgggtagaaggtggcccaaggctgaagaccgaggtccagggaggcgcctttccaaccgtgccagagagggcaggtcgcagacgccggggctgcggggaatagaggccctcaccgcagatgccacctgccgtgccctgctctgcggccaacgccagcgctggacccggagctacccgcccccgacccggaactccctcgagtaccgcgcgagccgcttggtcgccattcccgacactccttgcttttccaagtccagctgccggaagtcgctcgacttctacttccggtccgttcaaaaagcccgcgaggctgaggggcggttgttgttggcagctgtggctaaggaggggagaacctctgctccccgcccgtcttctcttctgcgtttcccgggctagggggcgtggggagtggttttaggcggcgaagccgctcggcagcaccttccttctttgccaggcagacgcccgttgtagccgttggggaaccgttgagaatccggtaaccgatgcggacggtaaagccgtttgggttagagcggcgcgggtgtccagtccgcggaacggggagatcgttggcaccttcgcttttttaggggaacggggatagttcggtaaactgaattgagaagcggatccgagggaggttgaaagctgtcaagcccgtgtagctctcccgctaggaggcggcacgcgggggaataggggcgctggagtttccccagctctacctcatctttctccacagccatggagccagagagggaagggaccgagagacaccccaggaaggtcagggaaagcaggcaggccccaaataagctggtcggggcagctgaggcgatgaaagccggttgggatctcgaggagagtcagcccgaggccaaggtgagcaacggggatcccgagcaggcggccctaggcggtttggagctcccggaccctcgcccaaccgccgtcgggggcactggattcgggcgggctctccgccctggcctctccgaacctgatccctgatcattaaaatgggaatgagtgtaataccaccttcctgcaacaaggctgtcattggctgtcactgggatagtgagtcggccgagtgcggtggctcatgcctgtaattccagcactttgggaggccgaggcgggcggatcacgaggtcaggagttcgagaccagccttgtcaacatggagaaatccccgtctctaccaaaaacacacacacaaaattagccaggcgtggtagtgggtgactgtaatcccacctacttgggaggctgaggcaggagaatcgctagaacccaggaaccagaggttgcaatgagccaagaccacgccattacactccaccctggacaacaagaaagaaatcacgtctcagaaaaaaaaaaaaaaaaaaaaaaactgggatggtgggccgggtgcagtggctcacgcctgtaatcccagcagtttgggaggccaaggcgggagcatcatttgaggccaggaattcaagaccagcctgggcaatatagcaaggaccccatctcttaaaaaaaaaaaacaaaaaacaaaacaaaaaaaaaactgcctgtacataataggaatgttcatcgatatcctggggcacaaaaatacaattccttgccctcgtgcagtttacattccagtagggcgggggtccccaaccccctgtgcacagactagtacctgcctgtccatggggtccccaacccactgtccacagctggcctgttaggaaccgggccacaaagcagcaggaggtgagcggtggccgatagaacgttaccccctgagctccacctaggcattagattctcataggaatgtgccaaacctattgtgagccctattgtgaactttgcatacgagggtcctaggtggcatgctgcttatgagactctaatgataaatgtaatgcacttgaatcaccccgaaaccatccccccagcccttctcccagtcagtggaaagattatctaacacgaaaccggtccctggtgccaacggttggggaccgctgcaataggggaataaaaaggctgattatccctatcatccttaccatttactgagaactaaatatacttcattcatcccttcagtcgttcattgggcttttttgtttgtttttgtgtttgagacagggtctctgctctgctggactcaggctggactacagtggtgtgacaaggatcctcctgtctctgcctcttacaggcatgagccactgcacccagctattcattggtttttattgtctgcca

SEQ ID NO: 1242868 - DNA, 4001 bp, Homo sapiens
tgtctgtcatcacacctggctaatttttgtatttttttgtagagatggggtcttgctatgttgtctaggctggtctggaactcctggcctcaagcgatcctcctgcctcagcctcccaaagtattgggattacaagcatgagccactgcacccattctaagactggtattattagttttcccattctacagaggagggagactgaggctcaggaaagttaggtcattggttaggtcattggcataaagccacagagataataagtggcaaaactaaggacttgagttgccatccctctgattcctatgcctggcctctttttcctctgccacaatgtctacctcttttgggatgcccctttctgcctccccaaaccagcccagctggttttggtgccaggctccagtgggtcccttgacccaaggctggggggtgcccttgggaggggggctggagccacccgtacttacatctggcgatcctgggctcactcacctgctccagtccctccttgagcaaacagggtgaggctgagctcccagcaggaggcctaacatccgggtggcccagccgcacccctacaaaggccacatcctgcttcaggaccctcaggtttggggctgggccactggtgttgagtggagggtcaggaaattatctgctagcccctctttctttctgggcttcaattttgtcatctgcagcatggcaggagggagaacggtttggagaagaggctgcagattggttgcccagaaatgaattttgtttgaccatctagtgcttaaaaatttttcaattagctgccaatttttttaaaaattggatgatttctacaaaaaaaccaagatttcaaatctttctcatttctaatttttccagagacatccgatctggccacactgggcttgcattcttagctggcaaccatgaggtggacccatgaggtggaagccgggaatgagaggtgcctaactctacctgatcgcttttgccccatgggggttctaggcgggacacctggattcttaggccaggcgacttttgcctcctggctgcatttctgtaagactctgctattcctggcaccgtgggagcagatactgacactcccagctcatttatcccataggttctgaacctggggtgcagccatgggtaaggggaccgtattgtaaagcctctgaaattgcaaaactgggcgtgcaggctcatttctcagcagagggccctgaagtcaatcatattttcaaaggaagccaggattcccagaagttttaagaggcctggctttcgtgcccaggtgcccccctaccccagactacacctctccctgctgaagaggcggggtgctctgtctactcttgcctttccacgctggcagatctccccagctaggtatttgttgggggcaactggcggctccccaaacccaggaggcttttactccgttggggccgagttgggaccacccaggcgtgagggagggagaggtgcccccgtggccccgccgcgccctcgccccaagtgcgacgccgccccctgcgccccgcgaccagactttggggacttggcgtcggtccctggctctcacctgtggactcagcgtcccgagcagcagcgccgcgaactggagctggagccccagccggggccacggcctcgaccccctgaccgcactcgccatagcgcctgggcagctgcacggctggccaggtccctgggtgcctccaagggagcgctctgtccccgcccgacccggagaaggctccgcccctggctgggcctgcaaccccagcctggagtcctcgccgatccccgcccttctcatcacactcccagccgcatcctcgcgtcccagtcaccccaccaaacacggtggggcgctttcccgggagagggattttactgagcccacttatggagaacttgccacgtgccgaggaccgtgccggttcatcatcagttcctggagtcctcactgcacagcaggtacaagcggaggctgagagccgcagtcccaatacagatccgcctgatctcaaagcctgcgctctttatcattgcaccagcggatcccggtgggctatcaggaaatagcgattaattggtgaattcagtcgttcgttcaataaatatttattatgggtcaggtaagtggctcacctctgtaatcccagcactttgggaggcctaggagggaggatcacttgaaaccaggagttggagaccagcaacatagtgagaccccatctctacaaaaaaaaatggccaggtgtggtgatgtccacctgtagttccagctactcgcgaggctgaggtgggaggattgcttgagccaggaagtcaaggctgcagtgagctataactgtgccattgcactccagcctgggcgacagagagagacacactctccaaaaataaaataaataaataaatatgcatgtatttattttttgagacagagtcgatcttgtcacccaggctggagtgcaatggcactatcttggctaactgcaacctttgcatcctgggtccaagcaatcctcctcccgagtagctgggattaaaaatgtgggccaacatgcccagctaatttctgtatttttagtagagatggggcttcaccactttggccaggctggtctcaaactcctgacctcagttgatccgctcacctcgtcctcccaaagtgctgggattacaggcataagccaccgcgcccagccaataaatatgcatttattataagctatgacatgcctgcctgatgaacaagatgatgaggtccctgtcttcgtagagcttagagattcctatgccttagatgtaagacaactccgcatggaagggcaccttctaatggccgtgaccacccttgctcctggtagatgtctccagttttgttcagagagggtctgccagggtccttgaaggtaaggtccaccctgtttgcaagtttcaactcattcatgtctccttcatccttgtgtaaaaataaaaaaaaaaaaatccctgctgatttgagggtcatgcagcccagctctgccaccttctccccgtcctctttgtcatccttggccctcctggtcatcccctcacagttactgaaaacttggtagcttggcccctagccttcatctccatcacaaatcctgccactctccttggtgtcttcaatgtccaaggtacagcttagccagcattgcagcctctcagtgggtgtacctctttggagaccttatcccccacgccacaactgcactgggcccttgtcacactcagaaccactttagttccaatgtccctttctctgattgcagcctcctctccatgcaacggtttcaccctttcattctccttatccctgtgccctgacctacacggtaccttcatccctcagtctctcttccactctgtcagccccttccttgtccttatcctgcttggacctcctagctgaccatctgaaggaactacaccactgtcttaggctgggttgaaacaggttgggatttttgtgaaagttatttcacactaagccataccaggttcagaagttcaagagcagcctgggcaacatagcaagacctcagtctctacaaaaaataaaaaataagccaggcacgctggtgtgcactagtagccccagctacttgggaggctgaggtaggaggatcccttgattccaggagatccaggctgcaggtagcaccactgctctccagcctgggcaacagagtgagaccctgtctctaaaaaacaaaacaggctgggcgcggtggctcatgcatgtaatctcagcactttgggaggtcgaggtgggtggatcacctgaggtcagcagtttgagaccagcctggccaacatggtgaaaccctgtctctactaaaaataccaaaattagccgggcgtgatggcgcatgcctgtaattccagctacttgggagactgaggcaggagaattgcttgaacccaggaggtggaggctgccgtgagcc

SEQ ID NO: 1242869 - DNA, 4001 bp, Homo sapiens
ggaataagaggccacgcctgttgagcctagccctatgtcccttcccctcaccccccaaccctgttccagtccactgtcacctcctccaggccaaatgagggcaatcacatataaccgaagccctcaacacacacactccaggagtttggagtggggccagagcaaacacctggagtgggacaagcaggtgggaaggggcggggcaaagcaggttaaacctgtctttgaccgggtaccaccctcagacaggtgggggaggcccaggcctgcctgaggcccagaaggctcatggtcaatggcagccccgcctccaggtctgaccaaccgaggggcagagaaactccaaggacagagctccacacttggacatcaggggcagcatgagctttgacccacatcctattgaccggctggcactgagctgtttgctcatagagggggtggcactcctgaggctgcccagccctcccccagcctccatccttgctggagaagtataaacactaatcagtgacccacgaaccctccctgccaattctgtgacactttacaacttggggctgacagagcaaggcaacccagctctcctccagcaaactccccaagtgaagggccgggagcccttctggaacagacaaggaatcatcatcgtggtgcctcctcatcaggaaccacaagagttgttggaagatgaaagaacgtgagtgtataaaaaggacttacactaattacactcaagagtcagacatagaatgagcgccgtagtgaagataaggaaaagaaaacagcaatggaaaccacctcccacttcagctagggcaggaggcaccccaggcctttgcactcagcaggcagatagtcccccaggccaggccgggacagcgcccacgcctggccagccggccgggacaggcctagacgagcagtttacacctggcggcgtctacctctagggccgacaccgccctacgcctccgctccagcagctcccaagcaggccgaagacgcgggccgcaaggacaggtgacctatatgggcccctcgacccctttcgcttccggctgcggctcagggagacctgacccagcaggtctcccaaaggcgtctcggcctcgctccccgggcgggaactggggatggatcccaaagcctgcgtcccgatcccttcggtaggagtaggttcctgcaatggttgaaaagtaaggagcccaggggaatggctggcacgcgcggatgaaaggggcacgcacacgcgagagtcgctcaaagtttcaaacaagagcccagtcctgccgcctggaccggttggttgcggcacgccaggcctagcctccggccgccaatcccgcccagaaatgtcctcacgtccaggccatgccgccacccaccccggcgctcacctgctgcagcaccttgtccagcggctctgcccgcgccaggctgtcggcgctcaggccgctcgcctcgcggcactgcgtactcagtgcggccgcctcggcacgaaccagcgatttgtgcagcgtccccacctgtgagcggcgggggaaaccgatcagccgcgcccctcgaccccggaagctccctggggacctcaccgcctcttttccaccctacctggcggctccgcggctcaaccacttgccaaactaggaggattaagtcggtctcgtccgagcccaggtcccgtcccagcgcacccgccgtagccccgaagaggacgaccagtgatccgggccaggggcaggggtccgcggcggggtcggccgcggggtcagggcccgggggagggggcggcggcggcggcggagtcatggccgcagaggaagggggctctcggccagacacgcggaccgacgaggcgcacgcacgcaccgaccgaccgcagacgcggatcagcttgggcgggacaccgtgtatcgggggcggcacctgcggcccggctggctcagtgggcgctgccaagacccgcccgtggcgccccgcggggcggggcggctaccggcccacgccctctccaggcgagttacctgccggccccgccggccacgtgaccggggcggctccgggaaccttgggggagggccgccagaactcaacccaggacgcaagagctcacgctcccggcctgggcgcacgcttaggatccggattcctacttccagggctggtcctgcctgattttgggggctaacccattcttccgctctccccccactcttccccaggggtcgtcaggcctctgcaaaggagcgtgcaagacagaggccttctccagtatggaagtcaccaggaggcagtctaggggctgtgggggtcaacacggcaggtctggggttgatggaagtcaaagggtcaagggggcggtgagagttgccgggtatcaccctgtagggggatcaccagaagtcacctgggaaaggggagggcggcgggaacatcagcgttgttagagctgtggggtggtcaccagggatcacagggaagggcttgtccacgcagatgctagggccgagcgctagcctggcactgagaagtgccagagcgcggtcgttgtgggttgggagtgggcaggcctcaatgctggggaaaggaaccccccaaatcgcagagagctgcaccctagacgaggctgagaggggtagaacgggcctggagcctcactcctaccccacgtgtgggggcctgcctgctttcgtccctttctggacggtggagaagctgcctggagattgcgagcgctctggccgatggggggctagcgttgagcgtgtgtgcgcgcatgcgggctgcagatcctcccttttccatcccgcacctacaacccaattgacagccccgcatttggggctcccattcctccctttgcccagtggagcttggtgaggctcctttatggcgcgtttcccggccgttccttactttcccaaactctcccagggaggtgactgagaaactgaataagtgactgagaaactgaataatccagcaggaaggagggggctccagcgtggcgggaactgagtcacgcggttgcctagcccgactcgagactgagacgggagccgcaccacgcgctttcggacaaggagggtgctgcggcccggcccctggacaatggagagagcggggcacccgggcgcatcaccagagctcatgcccgggaaaggggcgaggcccggggggagagagctcagcgtagctccacttggcagctaaagaaacaggcgcccgggacggaaatgactcgcgcccggacacggcgacagggagagcatgggaagtgcttccttcgcccggcgggttcgagcgagtagcactttactttccctacaggtggaggcgggccttggtgcgcggctgtccatctccggaccgcccacccgggcactggcccatgcgtctcctcccccggaagcggtaagcgaatcaggcgcgggggaagggagaacgttgctcctcgggcccctcctcccgataagcctggaatgtcaaatatttgttcgcggggcggggcgcaaccgcgagtaacgctcctccccctcccgcccggtagggcgcctgcgcttggtggaggcggcccttcctccggccacgcccttccagccaactcccctaaaccagtggccctaaccgccgcattcctaaagctccacagaagcacgtcgcttcctccttggctcctgtctgggttccactcttacagcacagggtcacagcgtccccgcccgaaggtctgggcgctactcggtctccttctcgcccctcctggcgacctcatctgtgcagcctctaggccctttttcctcttcagcctgagtctcgacgcccgctcttcccggaagccaccttcgcgaggtgactgctccattgtggcgtctctggcagtcctgagcgctttcccacggaagacgcgcttatgcgtgtccaagtcgccgctgggtcgtgaacctgaggcacgggctggtagcacagtgcggctcccctaaactaccccggatgcc

SEQ ID NO: 1242870 - DNA, 4001 bp, Homo sapiens
ctgcactccagcctgggtgacagagtgagactctgtttcaaaaacaaaacaaaacaaaaaatgaacaaaaaaccataaataaataaataaataaccagtagagtactggccaatctaagaggatcttggcaatgtcctaaagacctggtgggccagaggtcaacccatgaactcatggaatatgaggaagctgaggatcctggagggaaggcaggggaaatcggggggtcctgccagtactcgctcagccactctgttagggaagagtttgaatatactgataaccaggtggccagagtcacatgactgggtgtctgtcctgactcaagcatcccacacgtgggaatcccaggatgagctgcctcataggccatgggaagcccgggctactgtctgggaggtccctggtgtgctgctctatgcagttccccatctagtgccccagccccttgattagggatgggtgtttgtggactgactattggaggctgaggcccagggtccctgcatgctcacctgcccgcagccgaggcagcaggtgagacagggcctgcagttgcttgtgctgggcaacccgctcccgtaggggctctagagtctgtaaggcctgggacatgccctggagcaacccacgggcctggctcagggcctcccgggttccctgcaccacctcaatggcctgggccagctgccacacaccagtctgcacgccttccaggtatgactgcatcactgactgtggaaagatggagccatgaggctgggccagccctgcagcacagtcccagcacccgcaccccctgccccatgcccaccttgaggcgcgattccagggagcaggtacgctgcacctcgcggctgcggtactggcctagcctggccagctgctccggccggtagaagatgcctgaggcccacttgagcgctgcaccccgggccagctgctctgcccgctcctgctctggccactcaggtcctgggaaggaagagcctgggcagccgtgtagtcagggaggagggcccaacgaccccagtcccagctttcttatttatttatttatttatttatttgtttgtttatttgtttattgagatggagtctcgctctgttgcccaggctggagtgcagtggtgcaatctcgggtccctgtaacctccgcctcccgggttcaagcgattctcctgcctcagtctcccgaggagctgggattacaggcgcgtgccatcacgcccagctagtttttgtatttttagtagagacggggtttcactatgttggccaggttggtttggagctcctgacctcaggtcatctgcccatcttgacctcccaaagtgttgggattacaggcgtgagccactgcgcccagccagtcccatctttgttgccatcattcctcccctagtccacccaaaaggttcataccaggggacaacgccggctgcatctcatccttggctgctgagtccattgtgggcctggaggagccagagctgaggtgggcccggggcaagcaggcagagtagatgcccctgtgagctgctgcctctgtctaagcccttctgagaggaggaaggaggttcttcccggccccctcgggaagtgagagggagcgggtgtgatgcggagggcacctgggaggctttgcctgctaggtttcccagtcgtgcccctgcagatgtcaagcgagacagagtgggcacaggcctccactggaccctggtcctgctctgagctgcacaggacagtttggtacagaacttaccagatttgatcaggcgtccagttctccctccaaaaatgaccttggccttgagaacagccctctccccaatgcagctgggcacgcctgccacttgctcacagggcctgggcaactccagctgactccagcgtgcagctgaattcctctccccaaggaagtctctctcccactccccacccagaagccccttcttcccaccgaggctcctccctccccaaggccatcaacagaaaggaaggaagctgagtctctggcattttattcccaacaggaaagagtgtctgcacagagggtggggacagctgggcgacacttccctgaggggcgggggggtggggtgtacttgtactcaaccagtcttgaccagcctacccagaacctcttagtgctcaggagaggagatagggatttgctagacttggcctcaacctggggtggtgggcagagtgtgcagatatggatgcagacgacatcaacagcacaggatgaaaactgtgttggccagcctctgaggaggatgtgtacctctgcggaggagtgagaggtggcaggctcttgtgaagaggggtgtggtggggggtggtaggagagggtcatgaaagctgtgtttatcttttttgttttagacagggtcttgatctgtcaccaaggctggagtacagtggcaccaccatagctcactgcagccttctgggctcaagcgatctgcctgcctcagcctcccaaagtgttgggagattacaggcgtgagtcaccgcaactgggcagctgtgtttatcttgagagttatagggagccagggaagggactataaggtggtaattatttagtggatgttcagtccaccacccaaatccacccttcaggacagaagtgctcattctccagctgccaggagtgtaggctactgagatcacaccactgagtctctcagtcaatattggggtgcaaaagcatggtaccatcgtgtgaacatgaacccttcagaagtgctaccccaatttcagagatcctagtgggataggctgaggcctataatataattgcatctgctcaattctgcttgtcttaatcccttaaaggtgtggatcctgaccaggtgcggtggctcacaccggtcatcccagcattctgggaggctgaggtgggaggatctcttgagcccacgagttcaagactagcctgggcaatatagtgagacccacatctctaaaaaactaaaaataaatgagccgggcatggtggtgcatgcctgtggtcccagctacttgggaggctgaggtgggagaatcgcttgggcccaggaagctgagacggcattgatcttgccactgcactccggcctgggcaacagagtgagaccctgtctcaaaaaaaaaaagtgtggatccccaacaaacttgctgcaaaaccctatctcgagtcccatttcccagaggacctgatctaaaagaaacaataataaatagtaacaatgttaaaagttacaaaatgaccgtatcacacattcctgcatgccaggaatgactgagtgctttactgatatttacacataggtaaacacgtttgcattggctgaagtgttcataaccccatagtctctgagcactgtactgtgaggacaagacgagcgaaagatgaggctaggaccatgggtggaacaaggtggacaaggtagatatagttagtgcttgctgtttggcaggaagtgagggataggaatagatggggtgaccccaagacagtagggcagcctttaggaacaggtttgatgtggcagtaaaatgagtttgaaatatataaaagaataaataaagagaaaaaaatggaaaaggaacaggtttgagggagcagattggattagtcaggtagtgtggtctcctctcccaagatggggactaggcagagttagtgatgttggggcagattggcaaggaaagttccgatggcgtccccttctctactgccagggcggcccactgacgcccttctcattcctccccaacttcatcccaactccccggtctacccaggtagttttcgtcttattcggaggctggacatttgctactggtccctgaagttttgcggctgcacccacagacagcaatagcgccacgttccctggaaggcgcacgggacggaagcggaagcagtaacgctggctccggctgcccggcggccaggaacggaagcggaagtggcggcggcgccggcctggcctggcctggctga

SEQ ID NO: 1242871 - DNA, 4001 bp, Homo sapiens
acagagtgagactctgtctcaaaaaataaatataaaaaaataaaaagctgctattctccattaatacctgcaggcccgacaaaggcagcctaggaattctagatgaatggaatgaatacaacttgctggaagttcttaggaaacaaaatgactattcacagaaccaaataaaagccttccactagaaactaaaaataataataataataataatggttttatatatatgcatacacaagcaaagccagaagagaataaatagcaaatgaatgaaaactagaagcaaaaacaaacaggaaaccatctctacattttttttactcaatcgaccctgaatgctacagcattatccagggccgcagaaaacacacataatactttattcctgataaacaattcgatgtccttaagtccgccaatatcaccgtacattctgtgcaatcaagaaatttactcagctgggcacagtggctcacacctgtaattccagcactttgggaggccaaggcgggtggatcacctgaggtcaggcattcgagaacagcctggcccacatggcgaaaccccatctctactaaaaatacaaaaattagcccggtatggaggcatgtgcctgtaatcccagctacttgggaggctgaggcaggagaatggattgaacccaggaggcagaggttgcagtgagccaagattgcaccattgcactccagcctgggcaacagaacaagactccatcaaaaaaaaaaaaaaaaaaaaaagaaagaaagaagaaaagaaaattagccaggtgtggttgcatgcacctgtagtcccagcactttgggaggccaaggcaggaggatcaatcaaggctaggagtttgagactgcagaaagaaaccctgtctctaaaaaaaaggtccaggtaatttcagggtccagctccaccacaagcgcagctccaggggctgttgagttttgcctttatcattccaagtagtccctgctccagaccaagtcccaccatctggcagtcaggtcagtccaaccacagtcatatcagggcccttccaggaattctcgacgcaaactggaggccgatggcgcgggtcttttcgtggacggcggcagcacggtcctcggcttgcgtccgtagttgctcaggcttctggttcagggctgggcggcggcgcccctgcggcgggcggcccgcaccaggctctgctgcagcacggggtagaggcgctggcagccctcgaggcccaggcgtacggcctccgcccagctctctgtcaggccgccctcgccgctgcccagcagcccggccacctgattcagcacaggcatgagcgccacggtgaggccggcggcggcgcgctcttcctcgagccgcgtggggtccaggagccaggtgggcgcgggccccggcgcgaggctgaggccgcagcccaccaccaggtcgtacatctccacgcccgcgtcggccagggcgagcgcggcggcggtgagcgcggcggccagggccgagccaccgtcctccagcagcagcgccgacacctcgagctgcgcgcgcgggtagcggcccaggcgcacagccggctccagcgcctcctgcagcgccagcgccagctcacgctcctcgcagccgcccgggggagcgcggcgccggcggcccgcgaagggtgcgcggcggaagtcgcagagcaggcgaccgcgcagcgcggccggggcctcgccgcctgctccggccgggccgccgccgcgctcgccgccctcggcctgtcgcgggcccgacacggcacacagcaccttggtgcctcccgcctccaggtaggccgagcccttggcctggctcagcagcccggcgcgcgcgtacacgggccgtagccgcgttgggtcgcgggtgccgggcgcctcctcctcgtcggccgcgtacagctgcggcggctgcgattcttcagggccgcggatgcggcggtgatccccaggcatggcggttcttggcgtgcgaaccccttccgcccaacgccctgccgcatccactggttcttccgttgtttaaagacgcgcggctgcgcatgggctgtcgagagagcggcgggaggcactacagcgcccctggaggcccggagggagaacggcccggtcccagttgtgcagggtagccggatccatccatcttgctggaagggaggggggagagcagctccaagaaaggcttctctgcttccaactacctccacccctcatctactgaattatgaacgccttgctccaagtcaccccacctatttggcctccacctccacagacgtttgaggcagccctaggggctgttcccaaaattttgggttctggggctggactaggtgaacaccacagcagccagcaggagccacagcatttattctacagacgccaaaggctgtcaaaagagccagcccctattgggaagagggatagagatcatgcggcattaagtattgcacgtggtccttttattctctgcagcaaaaacgattcctacttgctgacgcggaaagctcaggtctggagagccgttatctatagatgcgagcgtgacgatcaacagcaatgcggggttagtggttctagaccgatggcactgacgtggagggctcagggcagaaatttaaggggcactgagacataggactgctcccaagtgtgttccagttactgctgggttaggaggggctctttaaaggtcccaagattcaaatgttcttgtagcagatgaagagctcttggctggacggatggatccagtgggagcctcctccttccccactcagttctttacatccccgaggcgcagctgggcgaaggaagtggccagctgcagcgcctcctgcaggcagccaacgttcttgcctgtggcctgtgcagacacatccttgccaccacctttaccgtccatcaagcctgacacctgctgcacccactcgctggcttttaagccccgattggctgcattctagaagacaggaagggaagggggagtcagcacagaagatgggattgagggaggaatgcagggaaagaaaggatggaggagccatcacccactccttgccctgggtgatactgctggaggccgagacagactttacggctggtacagggggcggccatggccactgccaggacaggacagagtggcaaagccaggtatcaaccagatgtcttcaccaataagaaggcctgggtaaggggtactggcaaaggtaaccaaccggtgggcagaaaggctgtttcgaatgcaggctgtacacacacaggcctcagccaacaaccttaagacctaacacttcccactggtgcgaggtggtgctgacctggggaacttgacacaggcacgtgatcttgccagcctcattgtccaccgtgaagagcatggcagaagtctgaggggagtgcatcttgaagagcttcaaggcttcattcagggcctgtggggaggacctggctcaggccacggtgctggagcagggaccctcactagtgtgagcatttgcagccctcagaaggcctgccacccacccctaccccttcccagagcaggggctgtgcccagggcctgtggggaggaccccagcgccgggccctgcccctaccctggcccaggtatgcctcccacatgcagggagctgctgctcctcccaatctcaatcccagaccgtgggcccttaggcaaccacttcgctcagagccacagaggccacatgtcagccaccagagagctgatgagccctaggggaggggaccctggcccctgggttgccttggctgaggcgccgctctccatctccaggatgacaagaggctggttggggttgctgtcgatgaactgcttcgtcttctctaacacctgcaagaaaaaagtccagaacagcagctcagaccaaaagcccaggccccgaacccctggctgttctgccagcctttgcctaggaaacactctggccactggtgctgccaggactcactcgtttctggaca

SEQ ID NO: 1242872 - DNA, 4001 bp, Homo sapiens
catcaccacacctgtcattcacctcactccaacccatcatgtaggcatcttattatctttttttttttgaggtgagctctcactctgttgctcaggctggagtgcagtggcatgatcatggctcactgcagcctccacctctcaggtgatcctcccaccttagcctcccaagtagctagaattatagccacatgccaccacacccggctaattttggtattttttgtagacacaaggtctccctatgttgcccaggctggtcttgaactcctgggctcgagcgatcctcttacctcggcctcccaaagtgctaggattacagatgtcagccactttgcctggcctcatgttatcatcttacattatcacaagaagagtgagtacagtactataagatgttttgagagaaagggaccacatacaaatagctcttattacagtatattgttgtaactattctattattgttgttgttaatctcttcctattgttcttaatttataaatttaactttatcatagatatgcatatatgggaaaaaacatagcatatataggattcggtactatctgtggttttaaggatccactgagggtcttgaaatgtatccccttggacaagggggaactactgtatatctaagcatgatggccccataccagtcccagagccaggcctggggaacatcaagagagtcgctttgcctctggcctgagcctacctggaatcctgtggactaggtctgtctcctccacccgaagacttttgggatggagccagcattgattttggagtcagatacatgtggctttcccactatttagctatttgaccttaggcgcattaatcagagcctccctgagcctcagattccatatcctgaaatgggaataacaaaacctgccccaggttgagttaaggacttaaataccatcgggagctggtactgcacagaagcgtgcagctcagcacacagtctggtccaaagtgctggtcccttttccttggcaaaactggctcatgcctttcatttcactcttttggagtcccaagccagcgtgtaggacaagaatataagggaaggtctgagaggttggaggacacagtccaccccagacatggcccaggcaaggccagggcggcaccaggaaacccaagctagtgagaagagttactgatctgtgcctctttgaagcagaagtgaggtgggatggggaggtgggaacaggttgagcccattatccaaacagaaacggagagtggttgcaaagagggagaggccgataagtgaagaggaaggaaagccgaggcgtatggggggctggggacagaaacgggaatccaggttgtcggagggcaggggctgcagaaggaacacgctggaaggaggggtgctggggaaatgggagagctggcacggaggcgggccaggcggtaagggtggaaaggaagagcaagttcctggagagaggaaggaggggttggaggggacgacagtgacctgttgcctggagagaagagagggaaagcgagggaagggagggcagaagctgtcaccttgggtcctgctagagggcaagtgaacggggctcgcccgggagtggaaggctgacggaggcctgggttggggtggggggccccggcccggctgtacctgctgctccccgcggagctctcccacgtagtactgctccagccagcggcgcgcgttggccgagtgcctgtgcggcggcccgtccaggtcggcgctgatgtcctggcccgccctggcccgcagcagctgctcgccccccgggtggtgccgcacgaagctggagaggtcgtagaggcgggccccgcggcggacccagcacgcgccggccgccaggcgccgctggacctcggagggcgagaaggaggcggcggggggcggagcgggggccatggccggagaccgcagctcccagcgcgcagcccggcgtctgctctgctgccaccctgagcgcctctaacatcccgggagccccgcggccgttccgggcgggccgccaccgcacctgctcatttgcataccgcgctcccattggccggccgggagccccggcagagccgcgaggggcgggcccggcgccgggagctgcgcgccaggtggccgcggacagggagtgccgcgcccgccaggtgtgtcccgcgcgggaggagggtgggcggacacaggcggagcgagtctccccgtcgcgggtggttgtctgggcggacatcctcggtggcctgatcgctgctggaataacttcaactgcttccacggaggagctggccgcatgggaccctctggctccaggaggtgcccgagagagcgagaggcgaatgaggtgctcgcctcgggtgcaaatatttgtttgtttttaaaatttcagtagcttttggggtaccagtggtttttggttacatggaggaattgtatagtggtaagtcctgagattttagtccacctgtcccccgagtagtgtacattatacccaatgtgtagggttttgtgtgtgtgtgtgtgttacaccccctcccattctccctattgtccattatatcactctgtatgcctttgcgtcctcatagcttagttcctacttatgagtgagaacatacagtgtttggttttccattcctgaatcactttcacttagaataatggcctccagctccatgcaagttgctgcaaaagacttcatttcgttcctttttatggctgagtagtattctatcgtgtatatcaactacattttctttatccactcattggttgatggttatttaagttggttccatatcttttcgattgtgaattgggctgcaaaaaacaaacattcgtgtgcaagtgtctttttcatataatgactcttttcctttgggtagatacccagtggtgggattgctggaccgaatggtgaatctactttttctctcctcccctcccctcccctccccttcccttcctttcccttcccttcccgtgacaaggtctcactctgtcacccaggctggagagtagtggtgcgatcttggttcactgcagcctcgacctcccgggctcaagcaatcctcttacctcagcctcccaagtagctggcactacaggcatgcaccactacgcctggctaatttttgtattttttgtagagacgaggtttcaccatgctgcccaggatggtctcaaactcctgggctcaagcgatttgcctgccatggcctcccatagtgcactttttttttttttttttgagacagagtctcactctgttgcccaggctgaagtgcagtggcacaatctcagctcactgctacctccgcctcccgggttcaagcgattctcctgcctcagcctccagagtagctatgactataggcgcgtgccaccacgcccggctaatttttttgtatttttagtagagacggggtttcaccatgttggccaggttggtctcgaactcctggcctctagtgatcctcccgccgcagcctcccaaaatgctgggattacaggcgtgagccaccgcgcccagccccaaagtgtacttttagtttgttaaagaatctctgtactgttttccaaacaagttgtactaatttacattcccaccagcagtgcatagcataagcatccccctttcactacatacacgcagacatctactgtttcttgactttttaataatgttcgagggcaaaatttaatggggcaccccaaaactcagtcatcactatatctaatacctgaacgtaatatttaaaaaattatattgttggctgggtgcggtaactcacacctgtaatcccagcactttgggaggccgaggtgggcgaatcacgaggtcaagagatcgagaccatcttggccaacatagtgaaaccccatctctactaaaaatacaaaaattagctggctgtggaggcacgcatctgtagtcctagctacttgggaggctgaggcaggggaatcgcttgaatctgggagttggaggttg

SEQ ID NO: 1242873 - DNA, 4001 bp, Homo sapiens
tgatgtgaacgcgaacaggaacccctgccgaagcccaaaggactcctccaggcattgacagctatgctgtgcatcttgcctggatgttttttcagaggagggtgcaggcaagagcaaaagcagcagtcccaggctattcaacttccacaaagcctccttatctccggttgggaagtacagttgctgattaactgtgttaacacagcacagtgctcagaaggccaaaggtcaaagactaaggtctgaagccccacaaggaggaaatatccctcctcgtcattactggggggaaaaaaattacccttgtaagccacttagaagggagcacctttatttggaaaacagtaatttcaaaatcatctcccgaactcagaatcgatgggtctgggtagataccctaagtaaacaggtgaaatcttcattacttgttcacttattaagtaaaattttaaattaaccgattatgtacaggagtgtttttcacatttcctgataagaatcacttggaatgccctgtaaacacagcttcactggagattaatcctatcaaattgattcagcaagtccgagatgggccagtaatttgtggagatttttatttttacaaatgcttcctgatgatgaccaaatctaagaaaatttggtaaacaacggaaagttatctggaacataactttcagttttctctgcagtttttaagtgctgaactactgatcatcctagagataacccactgaaaagtcttctctaatccagttttacaaaaggaaagtctttttaacatttggtttgataaaatgttttccgaagaaatactttacttgcctgttttcatttctggcccacccgttctacttcacgttttcttgaagggttcatcttctatgagttgaggcatagcaatctaatcatttttaaaataaatggtttctttttttttttttttttttgagacggagtctcgctgttgcccaggagtacagtggcgcaatctcagctcactgtaagctccgcctcccgggttcaattgattctcctgcctcagcctccagagtagctgggactacaggcgcccgccaccacgcccggctaattttttgtatttttagtagagacggggtttcaccctgttagccaagatggtctggatctcctgacgtcgtgagccgcccgcctcggcctcccaaagtgctgcgattacaggcgtgagccaccgcgtccggccaataaatggtttctaattaaaggattgtgacatttaatagccgttgcttgctcttgtcttgctcccttctctctcgaaacttgttaagaaataactcaatattctggcttttccactttaaatgtcatactgaccagcccgtgtatgccagcctcgatctcatcgttttctttaaccggtccaactccctttggcgtcccagtcaagataatatctccttcttccaaggttatgatcttagaaacatagctgatgatgtaggggatggaaaaaatcatggaggatgtctcaccctcctgtctgagttcgccgttgaccttgagccagagcttcagcttgtgagggtcagggatcttctccttgggcacgaacgcgctgaccgggcaggacgccgtgaagctcttcgccagagtccagggcagccccttcttcttgcactcgtcctgcacgtcccgggcggtcatatccaggcacagggcatagccgcccacgtagtccatggccgcagcctcggggactgcgcggcagcgcttgcccatcaccacgcccagctccagctcgtggtgcaggttgcgagtgtacgcgggcatgaggatgggcgagccctcgggcgcgtaggccgtggacggcttcaggaacagcacgggctcgctcaacaccgcgctgcgcatctccctgacgtggtccgcgtagttcctccccacgcagacgatgttctttccccactcccagaagcgggacaatggcctggatgctgccatgattcccatcaagtgcccctgtagtcacgtgggctgggccggtcagctgatgcctacggcatcccggagaggaccaactgcctcggaacgctgtcccccgcagcgacggcccgttccacctcgcgatctgccgggtacccgggcggcgtggcgctcggcctccagggatccactgtgcggtgccaaaaaagaggcggaggctcgcggcacagctctcccggcgcagctctcgggccgccgccgccgctcccaggcccgtctcccggcccgtggcagtcggggctcgcggacaaaacaagttgagcgcgagcgcgttgattggttggcggacggtgcgaggtggacgctgattggctgagggcagcgcgaggcgggcgctgattggctgcgacgcgccgacgccggtgttttgcagtcctgggcagctcggcagtccagcccggcccgggtcatggtggtgggccgagggctgctcggccgccgcagcctcgccgcgctgggagccgcctgcgcccgccgaggcctcggtgggtgcggcggggcggtgcgggccgggggacgcgggcctggcggggcgggcagcgggcggcgccgggccgtcgtttggcgaccgctgacgcggtgtctgttgcgcaggtgcctaaggccgcgctgccgggctcgagcggaggcggcgcaggcgctgaggctggcgcggagcgggcgcggggccgcgggtgcggaaagcgctaggtaagcagggccaggcctgcgtccgccgcggcctccacgctcgggctgggccggccgcgcccctgacgcctccagggcatcgcgtcctgcccgggccggcgccgaggagagcctggggcgcggctctgaggcgcagcgggcagggccccgggacgcctggcccaccccgcacctgctgccccgctgcaaggaccgcggtctcgcggcgccgcctgcggtggtggagctgcccgcccggcgccggagcccccgtctggggacccggcgtgtcattcgcccgaggtggtcgcgcggccgggccaggccagcgccccgggcgggtgcgcagcgcagggcactgggcgggcggaggcgcagacagggaggcgtccctggcggtttccagatctcgccgaaagctgtcaaggctctgcagggggtagaatgtcgccattgctaaggaaaggacatggattttgaggtcctcagaattacagttttagggacattcataagggtccaggcagagagttccagcgggactgtgtgcatcggcagggcgtgcgtaccccattctaagggaggccccagcccccgtatttggtgccgcccagttcaagggaagcaagatgctgtgaaacttcctgatttaaaaaagaagtgcagtgacgcacgcctgtcatcccagcactttgggaggccgaggcgggaggatcgcttgagtccaggagttccagaccagcctggcaacatgttgagacctcatcgctacaaaaactaaacaaaatcagccgggcgtggtggcacacaactgtagtctcagtcactttggaggctgaggtgggaggatcgcttgagtccaggaggtcgaggctgcagtgacccttgatcgcaccactgcactgtagcctaggggacagagtgagaccatatctcaatttttttttgtttttggggccaaaccgaacatgtttctggacttggtccaggccccaggctgcaggtccttgacctgtttgtacaaagtattacagttacaaaacagcaagccgggaacatttgccaggcagtgctgggctgagtgatatggaaagggaatacggtttctgctggtgttggcaccagctgcgtctttcctcagaaataaaggcacctccctgggttgtcagcttcttcaggaggctgtgatggtctccaggggaggctgagcaccagttgtaaatgacattttcttcgcctgggcagtgcagtggccaatctcggctcactgcaacctctgcctcccgggctcaagcgagtctcct

SEQ ID NO: 1242874 - DNA, 4001 bp, Homo sapiens
tgggcccagatccaccagaagctccgggacttctcccgcagcacccaggtaggaggcaagggctggcccaggcccatcctcacgccatgccccagctcatggcttacatccccatgccaggcagagctggaacgggagcgggcacagctgctggtccgggccacgatggctgaagagcaactttctgagctacaggagtacgtggaccagcacctgggcaggtgggcagagggagctgggtgtgaccccagggccctggtctggttggaatgaaggatgatggctgcctcaggcgctaaaagcagacctgtccacagctgggcaagtcacttaagcatggttcctctgagcaggtacaagcacgaaatcctgaggctgaggaagctggcaggtgcaggggacccctggaaagtgggggctgtgcctccagccaagccccagcatccaaggaccggcagccactaggccgtctcccaaggagcagagcagagcagagctcctcagccagcacagaaccctcccacccagccccccataaaacatgagtcaggatagaacccacagagtctttatcgtgtctaatactcagctggcctgagaaataaggccccccgggatgggggcagaactaggtccgggggcagcctggatgggtatccgcgaggaggcggcctccccagcctgcccaccctcaggaacatcataagcccatactcggtccaggccctcgccaaccgcggtcacaggctgccaggtggggagtgggaagcgcccagacaccacgcgggccccagcaggcagctctgtccgcagcttgtcctccagcagcgggagctgagggagagaacagcagagtagagggggcgggggcggggccggtagaaaacagccgcgctcacccccctagccccaagcctagcacccaccaggcaggcccaggcctcagagcagcaaacaccctggggtgtggctggggcttcccagcggggctggcaaccccgcacctaccacgctaggggccaggaacacagacacgttgcggcagtccctcaggctcacctgccggaagagaagtcgccccggccggggagaggcctggtgggcaccgggtcatcgcagcttccgagtcccggcccccagccctcgcaggtgtcagccgcaccttgggctgtcagcgggtggccagggatccccaggttaccttccagagatccttgcggcgatagcagacgctgccggcacagccggccctccaggcgtgcagccgcgccagcgccaccagccaggggttcagctcgtagcccacggccgggcggaggccgcacctgtgggccgccagcacctgtgggcaccgagagtgtgggaaccaggatgtgggcaggggcgcccgccagcaggtgggcggtgtggggcggcgaagacccagacgcaggcacttacgatcctgccgtcgccagagcccagatccaccgtttttccggggcgtcctcgcagcagcgacaacacgtgctccacctgccgcgcgctcgcgccgacgtagggcacctggaccgggtggcggcgagagtccactggccgctcccgccccgcccgcagcccggcccgaactaccacacggcggggcggagctcaccccggccacgcccagaccttgagaccctgagcggcagccgagctcccctgcccggcctggccccgccccgcacctgcagccgcagcggcacgcgccggaagccgggctggagcagcagcgcccacaccgcgtaggctgccaagcccgagccggccgccgcctgcagcagctccagcgcgcccagccgccgctcgcgcagctccgtcagcgcctcgaccgggtcgtcctgctccatggctgcgggacgcgcggctcgtccgcccaaggtccttcccggctcgggtccgcggccctcgcagcctggcctggggctggcggtgtgccctctgcctcctgccgggagccgccgcgcgacaccggaagtggccggcagagcctgcgcggtcggtccgtggcgctgtgcgctccgcccagcccggctgccctcccgcgggttccggcgagctgcagcctcgggggctctgccccgccgcgtccggctccaagcctgcgagggtcggctccgttggtccgctctgcggaccgccgtttgcggcctgtgctggctgctggcgacccgcggaaggggacaggcaggccctgccctgggggagcgcacgtgccggcgggagtcgggatacacccggcgatctcacgggctagagccccagggaaacggggctgcgcgtctttgtcgtggaatgaagggaagtctgccttggagaggggcggtcctggccccagaaccagccgggggctcgcgtggggcggctggagcccagggagccggtgggaaagcggctccccgggatgagacagcgtccaggcgccagcacccccatgactctgcctcggggagactgctgggggcgctccgctgactcggacacccagcgccagccagagcccgggaggacatccttccatttccctcctacagcctgagcgatgagccccagtgggcggtgaagggatggggggtggggtctgagggagaagggcatggaggaggggctgacacggaggagagcttgagcaggcccaagaagacagatgctggctctcaggcgagtgtggtgggaggaaagccggatgtcacaggcgggggcctctggcacctgccagctacagggaaggcagacagccccgggagtggggagatcaccttccttctccagaaaacaacacacaaaaagactgagttcctggaggtgaccttgtgaagctgggggtgggaagcgcaagtggaagagccgagctctgggtcaggcagctgggccacgacctccacacccagggtagggctgaacacccgtgaatgtcgggggttgtctatgcgtgccctggcctagctcctccttagccatccgtggctggggtctagagcccctgcagggacagaggctgcttccagacatgggtatgccgcagaccacagcccccagctcccaagtgcagagtctcacaggcctgcccacgttggccccagccccacccagctcagcgtgtcctgtctcctgggggcctggaacggccctcccaggaaaggaagggtgtatgtacactgagctctagggggagctgacagcgcccattcctgtcctgctgcctgcattattccctgcacctagagcagttacctaggaggcttactggatgaatgcacctaattggactctagcgtgcactctccactcttcttttttttttttttttttttttttttttttttttgagacttgagtctcgctctttcgcccaggttggagtgcagtggcgcagtcttggctcactgcaacctctgccttccaggttcaagtgattcctctgcctcagccttttgagtagctgggattacagatgcatgccaccatgtctggctaattttttgtgttttattagagacggtttcaccatgttggccaggatggtctccatctcctgacctcatgatctgcttgcctgggcctcccaaagtgttgggattacaggcgtgagccactgcgcccaacctccccactcctctcccgtccacaccaggcactctgctgcttggcctttgggcactctgcagccacctgtacctgtgtgaactggcacttgcctggcggtgtctgtgatccacaggccccaggctcctgtagctcctgcccacctgctcacccacactgtctccctatctcccatgccactttggccacctgtccccagggcaggcatgaagcccctggtctaatgctccaagacccatttgggcaccgtggtgctcctgtggccctgtgtctcatgagaagacagctggttgcaaagccagggctttctctgggagggtctgtaggtgcaaggctcaggcacttcctgagacaggtaggtagaagccagggttcgg

SEQ ID NO: 1242875 - DNA, 4001 bp, Homo sapiens
aaagtgtcacaaaccaaacagaacttcagaaactaaaaattgcaatatatgatttaagatttcagaggccgagtttaataacaatggaaataacttgagaataaattatccagaatgtactacgaaagaacagagtaaaagacatagagaaaagagtgaaaaggtttagttaaatcgataaaaaaaaaaagagaaacaatgggaagaagcaatatatgcatataaaatggctgagaattttacagaattaatgaaagacactaatccacagattcaagaagtctaataaataccaaacaaattgaacaaaaacaaacccatagttccatagagcatagtggaaatacagaaaaccaaacacaaaacaatcttttttttaaacttgtcgatacttgattttagacaaaacaatcttaacaacatattctatagtaaagagtgaaacataatatttaagaatgaagacaaagtatgttcaaaaggtgactaatggtgaacacgttgaaaatgcttaatttagctgccataaaggcataattacactatgactgaccctgtacgtacatcgcacttgttacttgatttaccacatacgtggttttcaatagctaaagcagcagcttgattctaaccaagcatcaccattcttggaagatgaaagtgaagactgataatcaactaaatggttttgacacaattattcctttcttatatcatgaagcacttccccacagggtaaggacatgaagacttcagttgagaaagataatcgggcagcctctactttcagatccttacaaattgttcgcaggtcatctaactaaaagactgtaaaagctgctgtcggctcaatactttgtatcaaaaaggagtctacccactgattcccttcaaatatttcagaagggtgccttccattttatggtgtccctgtggacacatgaatacaccaaataactgatgaatcgacaaatcttatgtcacaggtggtaggcaagaggtcatcgggaattccgatcaccaggctcgcatctggcttcttgggtcccactcctgaactaaccagtcgggctacccgagcgtgcgggagtctgagaaactgcattttaaaagggccccaggagatcttgttttccactaacattaaagaaccacgactacgaacaaacaggtctccccctttcctctgtgtggactgacagtcacaaggaccaccaactctcaagcatgacgcttcaactctctttgtttcttaagttttctgcaaaacgggccagctggcttgttttccgtaatagaaaattcgcttggcacagcaactggtacatggcacacaataaatgtgcttcccatcctgcactgccattctgggattcaaccatttccaaccagacgccgcacatccgagtgagtaacctggacctgttccaagacctctggaacggagcctgctactcacttgaaacctgggtggccctacctagcagaaaattggggaaaccccattaaacgcccggcagtgttgggcccgcctgaaagggtcctcgccgcgacccagatgccttcccgcgggcaccctcagctcccctcaggctgggcccgcaagccccaggcttcggctactccggacaaggagcgggtgcgcggactgagaacaggcctggccctaaccctaacagcagccgcagctcatctcttccgtaaggaagctggaacccaggtgtcgccgccaggccaggaccgaggccgcactcacctaccggcgcgcgggaggcgagacgacctcacctcggcggcgcccaccccaaaccgccaccgcagagccgctcgctcttaaaaaagaaaaaaaaatgaaaggaagaaagaaagaaacagaggaaggaatgaatgaaagaaagaaaaaaaaaaagaaaatagcctttgcttttgtatttcttttgacccttcagggcttcctgttcctcaccgccacaatagagtcccgccccacttccggcgacgtaacccaatccgcggagctcttcctccccgggagcccgatggaaatccggtaccctgaaaacgagccggagagacttgattgggccattcacgcctcaggatgaggactggccagtctgcgcctggagggcgggccggtcccgctgatcacgtgacacgatttttgaaaggtgattggctgtcaaggagagggcttgccaccgaggaaggggcgtttcctaggggactgagggagggctggggcggtacgaagcgggggtgggctctgcgcgtaatggcagcgccgtggcctcgcgtccatctttgccgttctctcggacctgtcacaaaggagtcgcgccgccgccgccgccccctccctccggtgggcccgggaggtagagaaagtcagtgccacagcccgaccgcgctgctctgagccctgggcacgcggaacgggagggagtctgagggttggggacgtctgtgagggaggggaacagccgctcgagcctggggcgggcggaccggactggggccggggtaggctctggaaagggcccgggagagaggtggcgttggtcagaacctgagaaacagccgagaggttttccaccgaggcccgcgcttgagggatctgaagaggttcctagaagagggtgttccctctttcgggggtcctcaccagaagaggttcttgggggtcgcccttctgaggaggctgcggctaacagggcccaggtgagaggcagctatctatctcctggggtggctcctggtaccgatggggtcctgacctactcaggggtgcccgggatagaaagggtagatgaagggacgctttaggagggttctttttgtggagtttacggtctaggtggcacggatgaggcatacctccccggggagatttagaaacgccttgggatagagagagaatggggctaggaagcaggagctagaactagcggaatgtcctactacggaagccggagctgaaaattgggtaaggaccttggggagaggggatttctgggcggtgatgggaagaagacacctccatccacaggaaagccagagtggggagtagtgaaagggaaacgggaattattccctctctctgtagatcgaccaggtgtcccagacacaggatccaactgcttccgggcttattgcccgagtggggtggggagagtctatcccaccaacaccccttgcgtgagtccaaattaggcatttgtctctcctgctgcctcactttccccgtctttggggagggaaaccgactgagaccgaggcggtcggctgagactccgaggtcctgtcttgtatagttctctgagagaggttgctccccctggagtgttgtactttgaactttgaagggttagaagtgtctgttatcgactgagtagaatcccgcagttttccaggccctttacctaccatctgttcttgcttagtggagtgacttaacctccttaagtctctactgtaaaataaccagcgcagtatgtgaaagtacaaattacaagctgcgtgaacgtaagttagtgtgattctaccaccaaacgggttgctgttgaggaataaaagtgaaggcactttctaaaatgtaaagtagtatgtagaggtaaggggtgggattaatacagtcgttgtctgtcacctgcggagtgctgggagccatattgtactgaaagcttcaaggttcacagcttcttaggtcatattaagatctaaacccatggtttcaaaccctgcttagatggggatggtgggatttccagcttttgctctcagagttttcatttactttgaacttcttatggtgctggcaggagttaccactgtaatatcttttccttcaggaattattttcccctaacagctgaaattttcctctaagtaatttgatctcaacattgtaaacctcctcccccttttgcatatatatatgcatggcttttggatgtctacaggcagtgaatatcatactttctccctcagttgtgatttgt

SEQ ID NO: 1242876 - DNA, 4001 bp, Homo sapiens
ggggactttaagaaaacaggccgggcgcggtagctcacacttgtaatcccagcactttggggggctgaggcgggtggatcatgaggtcaggagatcgagcccatcctggccaacatggtgaaatacaaaaatataaaattagccgggcatggtggcacgcacctgtagtcccagctactgaagagactgaggcaggagaatcgcttgaacccgggaggcagaggttgcagtgagctgagattgcgccactgcactccagcctgggcgacagatggagactctgtctccaaaaaaaaaaaaaaaaaaaaagagacaacagccagtgggcctggtgttgcccactgggacccttggggtcccatggagaactctgggaagcatttccatcttcttccctaactcctcctaactgtgccacagccttacccctgccctccctagcagtggggtcttggagagagaagaaaggtggtttccccaggttaagagagacggcgtcaccctgggccactccagcctcatgctccctgcctggggaccaggtggtggctacaggtgtgcctcggtttcctcccctgggaagtagagcggccacgaggaccaagggtgatgtccgcggagcgtcccagcagagctgggatgctggaagcacctaggggcccactcacctcccgccagaaggcgcctctggtagagggcacttacctcactaggatggagccccagagagcccccgccccgctggaacctccacacctttctgagaggtaggcagggggcaggctgagggtggctcggcacccccccacctgtagctgccctgaactcctggcccgagctctcctccccagcaccgcctcaggccatgaccctaccacctccaggagccttcgggccggcttggggccacagcaaaatccacaggcctgggagaggcacaggataaatgaagggaacggtggaggaactgagccaaagtcaaacgtccagccctgcggggctgtccaacctctgggtcatggtcacggggaggccacagtggccggactgaggctcctgtggtctcggagtttcctaactgggttaggaaaagcagaagcaaccggatggggggaggccccactgccccagggtgtctggggtgaagggcggaggagggcagcggccctgcccgagggaagcgcacgcacgtctcccccactgagctctgcaagggcagagccgggagatcttgaggaccagcgcccgacgctctccgcgaaccgtggcctgggcctgctgcacgtcagggttccagcagcaacccaaggtcgcccgaagcaccgacctcggacgctggaggcccctgcgacccaggaactggccggctttctccccgctgggggcccgggcccggccaggtgaggcggaagtgcgaggcgcaggcccgcgggcgcgtagtgggcaggacccgcgcaccccccgcgcccggagcgcccgccccgcctgcagcacgtggccggacctcactaacatttccccaaggtcaccctccgctctagggcggccggcgggggaggggaagccgggccgggccgggccggggccgcgcgcgtctcacctcgacaggggccagggtcccggcggctgcgcaaagggctgcgcccgcgggggctgcgaggtcggcggcgcgggctgccggcatttcaggagctcgccgagccggccctccacctgctgctgcgtgggacctgcgggcaccggggggcggtcagccgccgccgcgccccgccccgtccccgttcccgttccccggcccgtgcgcacctgtgcggcgctgcgcgaccagcttgctgggccccttggtgatggtgtacatgacgcgccgctcccacaccgccgccggcccccggccagatccggcccctgcgccggggctcgcacttaacggactgcgggcgccgcggggagggggcgggcccgctacacgcccccggcccttaaagggcccgcacgggctcgggctgaccccggacacgcggcggaggcggcgcttgcgccctttgggaaactggcaggcgggggcggagccgccagcaaccccgccccagcccccggaggcccgaggccaaggcggacgaggcgccctgctgcccgggaaggccgttgctgcctggaggccatgtcagtgtcggggcaccgcactcagactgctggcggcgaggacccaggggccctgcggggtcagcggcgatgtgcgagcagggtcctcggagccccagggcccacctttgacaagcgctggaggagaacctgtgctgggggtccctgtgctgggggcatccctgtgctggaggtctctgtgctggcgggatccctgtactgtgggggggtccctgtgcctgtgctggggggctctgtgctgcgggccctgtgccgggggcatccctgtgctggggggatccctgtgctggggggccctgtgctgggggcatccctgtgctggaggtctctctgctggggggatccctgtactgggggggggtccctgtgcctgtgctggggggctctgtgctgcgggccctgtgctgggggcatccctgtgctggggggatccctgtattggggggccctgtgctggggggatccctgtgctggaggtctctgtgcttggggggatccctgtactggggaggagtccctgtgctggatccctgtgctgcgggccctgtgctggggggatccctgtgctgggggccctgtgctggggggccctgtgctggggggatccctgggctgggggggtccctgtgctggggggccctgtgctgaggggccctgtgctggggggatccctgtgctgggggggtccctgtgcttggggatccctgtgccggggggccctgtgctggggggctactctgtgctgtgggtctctgttctgggggctctgtgctatggggggtatctgcgctgggggctctgtactgggggactctgtgctgggggtgtctgtgcaggggggctgtgtgcaggggagctctgtgttgggggctgtgtgctgggggactctgtgctgggggcgtctgtgctgggctcctctgtgccgaggctggaggcaaggatttaccattcatacttggggagcctcagccaaggtgcctgcagaggcctgggccagtgtgaagggtcacccttggcttgggtcttgggactgggtctaagaagagaaaaagcggctcatccccctggacttgggtagagacatgatgccctgggagtctcccttccaccccaggagtcagaaccctggctgcactctgccccacgtcctggcccccaggctgaggtgcacccagaggcccgacgtgtgcctcttcggcccctggggctcctgtacccgccccacagatgtgagagtgtggcaggccaggtctcactaacgcaggcctccataacaattatttcagtgcagagtggttagttcaatattaaaagcttaaaaagctgtccaggatcggtggtttacacctgtaatcccagcactttgggaggcccaggcaggtggatgacctaaggtcaggagttcgagaccagcccagccaatttagtgaaaccccatctctactaaaaatacaaaaaaaaaaaaaaaaaaaaaattagccaggcatggtggcaggtgcctataatcccagctactccagaggctgaggcaggagaatcacttgaacctgggagacagaggttgcagtgagccaagatcgtgccactacactccagcctgggcaaaagagtgagactccgtctcaaaaaaaaaaaaaaaaaaatgccgggtgtggtggcacacacctgtagtcccagctactcgggaggctgagacaggagaatcacttgaacccaggaggtggaggttgcagtgagctgagatcacatcactgcactccagcctgggcgacagagcaggactctaaagaagaaaagccagtgcccttcttcaaaggctggaatgtaacaaaagccca

SEQ ID NO: 1242877 - DNA, 4001 bp, Homo sapiens
gcctgcacacctctgggcctttttggcaaccaccagacactgcagcagctgcctggccacattttggcctcttcaccctcatcccctcccgcactgcctggccgtgtgtggccttgtgcgtgtcatctctcccttgtcctctccctcaggcatggagtggatgccggatgcctggattatgggaagggctgaggggtgagcctggcatgaggagggggcaccccatctgggtgctggctggaaatggggtctgcctcctggggtggaaggcagggaggaggtggggaaccacgacaacacgggagacctggaagccgactagaaagcgctttgaggatcctctctgatccccgctccttctccccctggttctgacctttaaggacaggacaggataaatttatccctgggtgttgagttgcggttattgcagttaacttgctcaggcccaagttaagggcttggggaccacagacagagttccctccaagatgtggggtcttccgggattacccgtacacgccaaccactggcacctgggcaggggggtgtctcgcagcacttactggtcatcaatgatgtgcttgcaggaggtggagacgatgtagccggcagtggaggccatgatggcctggacagaggacaccagcctgggggagagagggaggcgtgctagaaaggcagaagggaagaggcgtgtgccttgatttctcctcgttgctagtctaacgactgcgctttgcgttcagccacttctcgggccagtccttgcctgccttcgcccaaggctgggctgcctgaggtgtgccccaccacaggtacctcacggctctccggcccgctcggctgctgttcctcagtccaccccactccttgccaccttcttccttccccatttgtggaaactgagtctccctcttctcaagcccgcagggtgtctgtcctgaggtgagactgagagtgaactgctggcctggacctctccccacgaggggagcctgggccggttcttgccccgcttagctgtccagtcatgacgcaggcctcactctggaccctttgtgaccccgagttccccagtcactttcccactgtctcctgactgccaccagcctccactctgcactctggccctgttctaggggtgtagagttgtaccatccactcctccatccctggcccccaaacactcaccctgaatgacacctagctgtctggccctggcctcagtccctaatgtcttataggaatgtcttcgccgcatgctggccctgttttggagggtgggagggtgtacggggaagaagagagaggcgggctgaacactagtagaccagatggccgggctggatgaggtctcccagaacagtgagcaaggcaggcagtgaggagagaggaagcctgggggtaaagccccggacccccacaggagctcccagtcccccaccgctgagggtccagagaagtgccaggtcccttccattccctgagaagcccaagaagcagacaggggctgaggggaaagaaagtggtttacctggctgagacaatgactgcgtcggcctcctcccagcgtagctggggcagccgctggagcgtgttcttggagaggaggaagagtccggggaacaccacccccccggccaccatcggggtcagcatggtggctcaggacttgggcagggaggcaggcgggccgtgaaggggcagggaggccgagtggaaggagttaggggtggagaagggacgccaagcccgggaaggagggagaaaacgatgagaaggggcacaaaggggccagggcggggacgggatggggccagggagtccgatgaaactggggagtcgggagggggctggctgggcagagacgggggaggggaggatgggagaaggggagcaggagcaggccagcgagggatggggagaggcaaagaggggatggcttggtgagggacagagaggaagaggggacaggaggaggaggatgcggatgggggaggggagggagccaccaggcaggtggggaggggaggcttacgtgagaggctgggagggcccgaggaggcggggagggggtgggggtgggtctgagtaccagccccaaaggaaggaggtgggcgggagggagcggaggagcagccgggcaagcggtcagcggtcaccaccgctctcctggctccactgcctcctctcgctgccgccccagtccctgccgcccggcacagacaccgcacatggcatcatcatagagactccgtgcccagccccctgccccctcggtggggagggggagggggaggggaagtggccagcttggggaggacgggggaggggcaggaaaatgatggcaccgaccagacaccgagaaaccggacctgcagcggcgtctccccatgcagctctgagccacagccgcggctgcgacagagatggggggagcagagaaagagggagggggaggcccttaaaggaacagcagctgcggtggcacagggggctgctggggacaggggacaggggccagctcttctcttggggaggaagggggcccagggctccttggccagctgggagggggccctgagcccccacaggggcctgaccctgcttcccatcagcactttgcaaatgcctggcatctcctccctcaccaagccatccctctgtggcctgccccgggtccgagctttgggtggccattccagcggaagagagcgttccctgggagagggagtaagtggtgctttctcagaaggaagagctgaaggaggggataggagcaaaaacatctcaacacagcatcctcagagccagaggccccctcacccgatggcggggaaggaagctgacattggccagagggggcacctgactgtgctgcagggctgcccatgtcctgtctgctgcaggagctccgaggtcactgcgtctgtccttcccacagggccatcaacgatcctgaggctccctgaggtcacccagttcagaagtggcacagccctctcattgcaggcgttggaggggcaaggagtggaagaaggggaaacggtggcgagagcgcggggcagctgcctctcaggaagtcccagggagccctaggatgcccaggccctgttcttcagactgccagcccctcctggccttctctaaattcccacccctcactttttcctcagtttccttaatgctactagctcccctttctctgcaacttccacatacagcctagtttcagagtgggaaaggactgcggggtgggctggtgcaagctcctcactggcccataaggaaagtgaggcctggggactgggcccgggtggagctgtgggacctgagccagagacactgccccctttgacttctggcctcccatcctgctcccaactgtcctgtggacttcagcatgacaagggcctgttatgcaaactcctttggtctccaagttcaatagtcaaccctatggtttgcctttctctgccagagcccactcctcgcctcccccaaagaaaggccagggactgggatttgctgttttgtgctgccctctagcggcaatctgtaggaaagcacccaagaagtctcacgctgatttagagacggttgtagagacaatagcggacctagctcctgtcctcagcccttcacgggagggggaaaggggatccagctccctgagtttttactacatgctgggcacagtaccaggtgatttctactggttcttacttggtatccctgttttacagaagaaacaggtttagaaattttgtggggttttttttttttttttttttttgagatagggtctcattctgtcccccaggctggagtacagtggcgcgatcatggctcactgcaacctcaacctccccgggctgaaatgatccttatacctcagtatccccagtagctgggactacaggcgcacaccaccatgctcagctaatttttgtattttttgtagagatgaagtttcaccacgttagccaggctggtct

SEQ ID NO: 1242878 - DNA, 4001 bp, Homo sapiens
tagtctgttcccaggatgggaaataacccagatccaaggttccaaaggttatggggcttgcagcacagccaggtcaggatggccgtgagtggaggagccctgacctgtccgcatggccccagatcttgcagccccgctatacttcctacacaccaagactggcacacccgggtgcggcggaatatcccaccacctgggctgcccatctcagcactgtgccaggccagctgcctctctgggagtccccgggtctagccccgccccaccccggggccgccccgaccgaggtaaacagaggctaaaaataacctgggcaaggggcggctgcaagggagaagggggtcccttctgagcctgtccttgtctccatggcaactgcccccaaacccggcggctgacgtcatctcgcagctgcccaagcgtataggagggagggggagcggcacagccccggaccccccaccccggaaccgggcggaggctgtcgggtggcctcacttcctgccggccccctccctggtcagctggttacattccctggccgcgcgctgggagccaggcggcctcccccgggccgggcctggccagggctgagtccgagcggcgacgcagaggggccgccgtgactcacccgcgccctccccgcccgcttctctcaagcgggacccagcccagagtcctgagtcctcccctcacccgcacccaaacccagacccctggggcggctcaccttgctcctctctcccgccgcagtcacaggacccaagccggagagggcggtggaagaaggagctatgccagtcctccttgtcccgctggagtattttgtacctcagcccccaattatcattcctctcctccctccaataccacggaggtgggtgtcgcaggggcaaggactcagatctaatcctcgcttctcccaaaccagctgtgtgaccttgagaatactactaacctctctgggcctgtttctgcatctgccagatggtcataaccctcctcagatgctgtgcgttggccgaatgcggcaggcccagggcgcggccccgcagactgcagccagggcacaagtattgttacacgaggctgcgcacagtaggtgctggggcggccagcctggacacacgttagaactggctggggagggtctgtaggggaggccggactcagggctcaccctggagaggaggacaaagggtgctgaatctggactgaatccgacctctagccctggtgagcagccccttgcccaaaccagttctgcagagagcccaggcccggctgttgcaggaaccttgcgccaacctccatttccagggaaaagctccgttccccgacaaggacgatcctctccggcttcggctacgccaggtttgggcggagagcccggctccagcccaggctcggtcacctcggggccggccacaaagccgcttaggccggcccctagagctaggaggattagctcagctcctaggccggcccgcacccttcgtcgccccctccccatttccagcccagcctcccctgcggcgaaggcagcaagggctcccagggagcgcgcgtgccagggcccaggctggcgccttgagcccgctctctggcctggcccatcccagcgccccggggcaccggccgccagggccttgccgtgggaggaaggcagcagcgccaggctctgcaggcccggaggcggcggcttttgtgggagaagctgcgttctccacgcccggggggaggggaggaaagacaaggcgcggccggggtccgggagatggggtgaggcgggacagagccgcagatcccggacccaccgggcggcgccggcgggggggcaccagaacctccgcgcctgctccccgcccggcctgcagccccggaaacggcgcgggacactcacatggctgcgctgggctgcgcggacctcgcgctgtccttgcgctcggaggtgcccggcctggtcgcgccgcagctgccgctgtcgccgccgcaggcgccggcccctccctccgcccgccgccccgccgcccctcccctggcccgccgggccccaccccctgcgctcccgcggctcccgcacccctagaggcgcccacggctcgctccgccctctcggataacggggcaggccggtggcccacgcagcccaccagcttgcagggagggcagaccctgggggatgtgagggaggctttctcacgcagaccctaaaacggtgagcgccagggagccccgcctgcttgtcccctccccagatccctcgggctctggagaccttgcgggccccctgtccgtgaccacctgaaacaggtcctggagctgctactgctggcttaggctggttggtggaaaggatccagggctgttgtgaaggccttggggagtccagaagccgcctggcaccttctgggtccagacgctgcccttcagccctgccatttcagccagcctcagcgtcgctgtagaggcaggccgccctttctgccactgtctggctggtaagtccaggctcatagccgggtcatgcattccccactcattgggtactggttttcgggcagtcttggggtggggacgctggcagggtccgggtacagggccatgtgttgggcaacccagtcctttccaaagccggggctagaatgctggccctccacacagtcggtaaaggtggggctgagagtcgaccccatgttggggtcaaagggccagttccactcccccgctcctcccatcaatcagacacccctggcccttccaacctggacacccctgaggcttctccaggccttgcactcccgcagccctcatgtatgtcagacctacccaggaatggtttcagggacagtaagaggtccctgaatatctgtaccccgcccccaccagtcctgagggctgtttttttgtgtgttttgcttgtttgcttggttttgtttggtcgggttttttttttttttttttgagacagagtgtcactgtcgcccaggctggaatgcagtgcaagctccacctcccaggttcatgccattctcctgcctcagcctcccgagtagctgggactacaggcgcccacaccacgcccggctaattttttgtatttttggtagagatggggtttcaccatgttagccaggatggtctcgatctcctgacctcgtgatctgcccgccttggcctcccaaagtgctgggattacaggcatgagccaccgcgcccagcctgtttggtcggttttttagagatgggctttcttcatgttgctcagactggtctctaactgggctcaagcgatcctcccaccttggcctcccaaagtactgggattacaggcttgagccacctctgcctcacagttctccactctccagcccctcctcttgggcttcctttgtagtgcccttttctttctttcttttttgtttttttttgggggacggagtctccctctgttgcccaggctggagtatagtggcgtgatctcggctcactgcaacctccgccttctaatttctatatttttggtagagatgtcccggctaatttttatatttttggtagagatggggtttcaccatgttggccaggctggcctccacctcctggcctcaagcgatccacccaccttggcctctcaaagtgctgggattacaggcatgagccactgggccggtcagtgcccttttctctgaagtccttaaacctgggcatgacttccaggggctgagttcttctctttattcaccctaccctaaaatatcatccagtctcagggctcccatccattcactgctgaccatcccaaacttccctctgtgcccagagccctctcctgtttcagagcccctggctgctttctggttgactcaccagtcctcagcattgtccccatccctacaaagcaccactgtctacccaggcatccacctgagctagagactggggttttctggagttctcaaagctggcaccaattggcctctgcccacccctaaagtcac

SEQ ID NO: 1242879 - DNA, 4001 bp, Homo sapiens
tcaatacctgcaaggttcttcagaatctgaccggcagcccccatcgctcctattccttcttcccactactcagccccaagtccctctccttcctcaagtctaccctatgacttcttcctccaggaagcaggccctgggttggttccccctttttgacttcctccctctgaaccccgagaccacataacccagttgtcagttctcctttagggcctgtcttcccaccagactgaaccttgtgagacctggggcatatctgcttggctcaccacagcgctctgggggtcctgtagcacctgggagatgaagggggggaacagtgggggaagctgggctgcctagacacaggaacagcaggtcctgagctgtttgttggtggggaggattttaagtctatgtccaccccaactcccctacccgacatgcaatcctccctctcccttcccactggctgatggtatcgtataccatcagcaagtggggctctgctccctgggatggtgcagggtggggatcccctgggattctggacttggaaaccgctgactgttccatcacttttctctctctggttggccctctgctgccaccatcccccgagtcccataggaactaggatgtctaactgttggtacaaatgaccatcataatgtccatctgagtgaccgcttcgggagatgggcgggcaagattgcccttgctgggtgagagcaggtagggaaagagctgaaccccttgagctaaggcagaagggccacctcaactggtgggggactggctgataagaaccaggggactctctgggctcatgtcagccctatagtctgttcccaggatgggaaataacccagatccaaggttccaaaggttatggggcttgcagcacagccaggtcaggatggccgtgagtggaggagccctgacctgtccgcatggccccagatcttgcagccccgctatacttcctacacaccaagactggcacacccgggtgcggcggaatatcccaccacctgggctgcccatctcagcactgtgccaggccagctgcctctctgggagtccccgggtctagccccgccccaccccggggccgccccgaccgaggtaaacagaggctaaaaataacctgggcaaggggcggctgcaagggagaagggggtcccttctgagcctgtccttgtctccatggcaactgcccccaaacccggcggctgacgtcatctcgcagctgcccaagcgtataggagggagggggagcggcacagccccggaccccccaccccggaaccgggcggaggctgtcgggtggcctcacttcctgccggccccctccctggtcagctggttacattccctggccgcgcgctgggagccaggcggcctcccccgggccgggcctggccagggctgagtccgagcggcgacgcagaggggccgccgtgactcacccgcgccctccccgcccgcttctctcaagcgggacccagcccagagtcctgagtcctcccctcacccgcacccaaacccagacccctggggcggctcaccttgctcctctctcccgccgcagtcacaggacccaagccggagagggcggtggaagaaggagctatgccagtcctccttgtcccgctggagtattttgtacctcagcccccaattatcattcctctcctccctccaataccacggaggtgggtgtcgcaggggcaaggactcagatctaatcctcgcttctcccaaaccagctgtgtgaccttgagaatactactaacctctctgggcctgtttctgcatctgccagatggtcataaccctcctcagatgctgtgcgttggccgaatgcggcaggcccagggcgcggccccgcagactgcagccagggcacaagtattgttacacgaggctgcgcacagtaggtgctggggcggccagcctggacacacgttagaactggctggggagggtctgtaggggaggccggactcagggctcaccctggagaggaggacaaagggtgctgaatctggactgaatccgacctctagccctggtgagcagccccttgcccaaaccagttctgcagagagcccaggcccggctgttgcaggaaccttgcgccaacctccatttccagggaaaagctccgttccccgacaaggacgatcctctccggcttcggctacgccaggtttgggcggagagcccggctccagcccaggctcggtcacctcggggccggccacaaagccgcttaggccggcccctagagctaggaggattagctcagctcctaggccggcccgcacccttcgtcgccccctccccatttccagcccagcctcccctgcggcgaaggcagcaagggctcccagggagcgcgcgtgccagggcccaggctggcgccttgagcccgctctctggcctggcccatcccagcgccccggggcaccggccgccagggccttgccgtgggaggaaggcagcagcgccaggctctgcaggcccggaggcggcggcttttgtgggagaagctgcgttctccacgcccggggggaggggaggaaagacaaggcgcggccggggtccgggagatggggtgaggcgggacagagccgcagatcccggacccaccgggcggcgccggcgggggggcaccagaacctccgcgcctgctccccgcccggcctgcagccccggaaacggcgcgggacactcacatggctgcgctgggctgcgcggacctcgcgctgtccttgcgctcggaggtgcccggcctggtcgcgccgcagctgccgctgtcgccgccgcaggcgccggcccctccctccgcccgccgccccgccgcccctcccctggcccgccgggccccaccccctgcgctcccgcggctcccgcacccctagaggcgcccacggctcgctccgccctctcggataacggggcaggccggtggcccacgcagcccaccagcttgcagggagggcagaccctgggggatgtgagggaggctttctcacgcagaccctaaaacggtgagcgccagggagccccgcctgcttgtcccctccccagatccctcgggctctggagaccttgcgggccccctgtccgtgaccacctgaaacaggtcctggagctgctactgctggcttaggctggttggtggaaaggatccagggctgttgtgaaggccttggggagtccagaagccgcctggcaccttctgggtccagacgctgcccttcagccctgccatttcagccagcctcagcgtcgctgtagaggcaggccgccctttctgccactgtctggctggtaagtccaggctcatagccgggtcatgcattccccactcattgggtactggttttcgggcagtcttggggtggggacgctggcagggtccgggtacagggccatgtgttgggcaacccagtcctttccaaagccggggctagaatgctggccctccacacagtcggtaaaggtggggctgagagtcgaccccatgttggggtcaaagggccagttccactcccccgctcctcccatcaatcagacacccctggcccttccaacctggacacccctgaggcttctccaggccttgcactcccgcagccctcatgtatgtcagacctacccaggaatggtttcagggacagtaagaggtccctgaatatctgtaccccgcccccaccagtcctgagggctgtttttttgtgtgttttgcttgtttgcttggttttgtttggtcgggttttttttttttttttttgagacagagtgtcactgtcgcccaggctggaatgcagtgcaagctccacctcccaggttcatgccattctcctgcctcagcctcccgagtagctgggactacaggcgcccacaccacgcccggctaattttttgtatttttggtagagatggggtttcaccatgttagccaggatggtctcgatctcctgacctcgtgatctgcccgccttggcctc

SEQ ID NO: 1242880 - DNA, 4001 bp, Homo sapiens
gcttccttgtgcaaggttccctctgcaggggaactcccatcaagccccggcagaagtgttccctcctccaggaagccctaacctcttcccaagaagcaccatgcagcagtaccactgctcagtaccactgcagcagaatctcctgctgtccatgtctgtaggggtcccacctaccccactggaagctcctggagcaggtactgagtcccaagcagaaagtatgcacagcaaagtttggggatagaaaagcccctcagcctttcctgatatccccttttctactcacacctgaaccagatcacttcagaaaatagcccagatatcacccagggctgcccttgcccagccctccacaccaaagaggcaaagggcatccgtacctcccgccactcaccaagcgggaattcctcttggactcccttatctgcccctggagtttctcttgctcctgctggtgcacttccaagtaggccctgaggaaaggggcgaccacaagaatgaactcggctctccagcctcatgctgcccagggtgcagacagcagggagagggcatggggctggagaaggttcctgctagcaggatgcgggcttggggagggatcccgggacagggctgggaacagaggagctgctcacgtcaggccccgcttcagcgccgtgtacaccaggtccagccgctcgggctgcggcaccttggcggctgggtgagccacggaaaacatcctggacactcgggagagcgcggggggcttccgtgggggccccggcgggctgaagaccgggaaactcctgaaggagaggctgtcctcagaaagaggagagcaggagtcccccagactctcactacgcacccccagacccagccccatctgacgccctttgaccccaccaaccctgcgcggccgcgtacctgggcccccgctcgtggctgccgaggacgcctgcgaaggactggctcctattgacccgggcgctgagcagacggcgctgcggccgcaccgacagggacatcatagagtgagtccgcgcggggctccctgcgggtgatcgggggggtgtccagtaccagtcggatccccgaagccctctcccacgcagcgggatccagggctggcgcaggtctttcctgtcgctaggcacagctgccccagcgggctccggccgggtccgcctagtcccgccgacccgggcactaatgacaggacagccgcaggcgactcggcctcggactcagcgtggcctcggctcggcccccacttcctgccgaggtgcgggctccgcctgccgcggggcaggaaggggggtcgcgcggggaccctcctccggctgggaaggggcaggaaaggggcggcgcgcgcgaagaatgtgcggaagcgcctgtttacccgggggcggggcagcctccccagccctgcccccgatttccccccccagggcacccggagctcggggccccccaccccgggagcccaaggaggtcacggggcggggcggggccacgctcggagccctgcggagctgcccgacaggcccagccggtgcgggtttgtcgcccgccccccgcctgccagcgtgacctgctgcccccagcccccaccggcccgggcgtcccggcgccctccaggcagggggattcccagagctgggcgcgatgccgagaagggccccgccccctcctctttcctgaggctcccacctggaaactgagtcacggacgtgcgcctccaccccggcatcggcggggagagctcctcggcagacccccaccccgcttcggcgaaacacacactcctggcccccaaacccggcctgcttcccctggggccagtccctgagctttcgcagccccgagctgggtcctacctctcttcttggtgttcatggtgggtccgggacggcccccgacccgcgctcgccccccgcggaccttccggccctggccacttcgagccgcccggctgggctccgggctcgctcccagcggctctggctcggcttcggctcctcccggcgccgccccccgcccagttcctgccgcctgactcagcccgcctggatggggcgggaccggtgactggggttcccctcggggaggggaccgacggggggcgaggggtctgctcagctggggtcagcaatgtgcgtaaagggatttgagcatggggatgaatatgaagggatagaatggagacgctaagtggaggaagtatcagacattagagtagggggcttaaagagtcgctattgaggccgggcacagtggctcacgcctgtaatctcagcactttgggaggccgaggcgggcggatcacgaggtcaggaattcgagatcagcctgaccaacaaggtgaaaccccgtctctactaaaaatacaaaaattagccggacatggtgacgcgcgcctgtaatcccagctactcaggaggctgagacaggagaatcgcttgaacccgggaggtggcgccactgcactccagcctgggcgacagagcgagactccgtctcccccaaaaaagagtggctgttgagcagtgctaaggctgaacacacagagggctgagagctggggttctaagtgtgagaaggtggatagtagggggctgaagagtggaaagatgggctaagggtgctgattggaggggctgtgccaatggagggcggagagttagggcactgatcaccaggggactgaggctgagaagagaggctgaaagtgtgaggctagatccaccccatagtgtgtgctgctgcgccaagagagatgcagagaaggaactggatgcagagtcccacagccccatgcaccaccccatccctactcccacagagggagtgctcagcctgagcactcccctcttcccaggacccaggggaaaggatcaggtctggctgccagccagggcctcctccctagtcaagctgcatcctaggctaatgccccatccttcctgcccccagctcacatgggcctctcaggttctgcgttcccatcctgatccccatccccagtacctctctttttttttctgtgtctcccaagctgtagtgcagtggcacgatcttggctcactgcaacctctgcctctcagattcaagcgattctcctgcctcaggctcccaaatagctggtattacaaacacccgccactatgcctggctaatgtttgtatttttaatagagacggggtttcaccatgttggccaggctggtcttgaacccctgacctcaagtgatcagcctgcctcattctcccaaagtgctgggattacaggcatgagccaccgcgcccagcctatctcttctttgaatatcccatgtccacctctagcctggatagatgccaccatgcccatccctcccttgaccttggaggggctggatgctcccccatcccataaacactcttgctccttgaggctcagttctcccatactgtgcttactttctccccaaaaggctgggttgggcccaggggtctgcatttccacaagttccccctccccccgacagattcagatgcaagaggtccagggacctcagtttgagatatgttattctcccctcctccttgaaggcgaagcctgggtaccctgcaccctacactggtgacctgtgcattcccatggattgcctgcctatcgctggcctctctggtcccttcagccatccccagccttatcacctgcctttggaatgcccccctcctaaaccacaaccacactgatgcaaccctcaggctttccatcacccccacctcacctgccttttacctgagacctctggccccttgagccctcacccatttattcacctattcactgagtggcaaccttgtgccaagcatgtgccagtcactggagatacagcccagaatttcacagacaccaccctgtgcagagctcacagtccgcctctgctttctttttttctgctagctccctcctaccttctcttctgtaccttccctgcacagcctcctccccagcctggatccaca

SEQ ID NO: 1242881 - DNA, 4001 bp, Homo sapiens
tctgttcccaggatgggaaataacccagatccaaggttccaaaggttatggggcttgcagcacagccaggtcaggatggccgtgagtggaggagccctgacctgtccgcatggccccagatcttgcagccccgctatacttcctacacaccaagactggcacacccgggtgcggcggaatatcccaccacctgggctgcccatctcagcactgtgccaggccagctgcctctctgggagtccccgggtctagccccgccccaccccggggccgccccgaccgaggtaaacagaggctaaaaataacctgggcaaggggcggctgcaagggagaagggggtcccttctgagcctgtccttgtctccatggcaactgcccccaaacccggcggctgacgtcatctcgcagctgcccaagcgtataggagggagggggagcggcacagccccggaccccccaccccggaaccgggcggaggctgtcgggtggcctcacttcctgccggccccctccctggtcagctggttacattccctggccgcgcgctgggagccaggcggcctcccccgggccgggcctggccagggctgagtccgagcggcgacgcagaggggccgccgtgactcacccgcgccctccccgcccgcttctctcaagcgggacccagcccagagtcctgagtcctcccctcacccgcacccaaacccagacccctggggcggctcaccttgctcctctctcccgccgcagtcacaggacccaagccggagagggcggtggaagaaggagctatgccagtcctccttgtcccgctggagtattttgtacctcagcccccaattatcattcctctcctccctccaataccacggaggtgggtgtcgcaggggcaaggactcagatctaatcctcgcttctcccaaaccagctgtgtgaccttgagaatactactaacctctctgggcctgtttctgcatctgccagatggtcataaccctcctcagatgctgtgcgttggccgaatgcggcaggcccagggcgcggccccgcagactgcagccagggcacaagtattgttacacgaggctgcgcacagtaggtgctggggcggccagcctggacacacgttagaactggctggggagggtctgtaggggaggccggactcagggctcaccctggagaggaggacaaagggtgctgaatctggactgaatccgacctctagccctggtgagcagccccttgcccaaaccagttctgcagagagcccaggcccggctgttgcaggaaccttgcgccaacctccatttccagggaaaagctccgttccccgacaaggacgatcctctccggcttcggctacgccaggtttgggcggagagcccggctccagcccaggctcggtcacctcggggccggccacaaagccgcttaggccggcccctagagctaggaggattagctcagctcctaggccggcccgcacccttcgtcgccccctccccatttccagcccagcctcccctgcggcgaaggcagcaagggctcccagggagcgcgcgtgccagggcccaggctggcgccttgagcccgctctctggcctggcccatcccagcgccccggggcaccggccgccagggccttgccgtgggaggaaggcagcagcgccaggctctgcaggcccggaggcggcggcttttgtgggagaagctgcgttctccacgcccggggggaggggaggaaagacaaggcgcggccggggtccgggagatggggtgaggcgggacagagccgcagatcccggacccaccgggcggcgccggcgggggggcaccagaacctccgcgcctgctccccgcccggcctgcagccccggaaacggcgcgggacactcacatggctgcgctgggctgcgcggacctcgcgctgtccttgcgctcggaggtgcccggcctggtcgcgccgcagctgccgctgtcgccgccgcaggcgccggcccctccctccgcccgccgccccgccgcccctcccctggcccgccgggccccaccccctgcgctcccgcggctcccgcacccctagaggcgcccacggctcgctccgccctctcggataacggggcaggccggtggcccacgcagcccaccagcttgcagggagggcagaccctgggggatgtgagggaggctttctcacgcagaccctaaaacggtgagcgccagggagccccgcctgcttgtcccctccccagatccctcgggctctggagaccttgcgggccccctgtccgtgaccacctgaaacaggtcctggagctgctactgctggcttaggctggttggtggaaaggatccagggctgttgtgaaggccttggggagtccagaagccgcctggcaccttctgggtccagacgctgcccttcagccctgccatttcagccagcctcagcgtcgctgtagaggcaggccgccctttctgccactgtctggctggtaagtccaggctcatagccgggtcatgcattccccactcattgggtactggttttcgggcagtcttggggtggggacgctggcagggtccgggtacagggccatgtgttgggcaacccagtcctttccaaagccggggctagaatgctggccctccacacagtcggtaaaggtggggctgagagtcgaccccatgttggggtcaaagggccagttccactcccccgctcctcccatcaatcagacacccctggcccttccaacctggacacccctgaggcttctccaggccttgcactcccgcagccctcatgtatgtcagacctacccaggaatggtttcagggacagtaagaggtccctgaatatctgtaccccgcccccaccagtcctgagggctgtttttttgtgtgttttgcttgtttgcttggttttgtttggtcgggttttttttttttttttttgagacagagtgtcactgtcgcccaggctggaatgcagtgcaagctccacctcccaggttcatgccattctcctgcctcagcctcccgagtagctgggactacaggcgcccacaccacgcccggctaattttttgtatttttggtagagatggggtttcaccatgttagccaggatggtctcgatctcctgacctcgtgatctgcccgccttggcctcccaaagtgctgggattacaggcatgagccaccgcgcccagcctgtttggtcggttttttagagatgggctttcttcatgttgctcagactggtctctaactgggctcaagcgatcctcccaccttggcctcccaaagtactgggattacaggcttgagccacctctgcctcacagttctccactctccagcccctcctcttgggcttcctttgtagtgcccttttctttctttcttttttgtttttttttgggggacggagtctccctctgttgcccaggctggagtatagtggcgtgatctcggctcactgcaacctccgccttctaatttctatatttttggtagagatgtcccggctaatttttatatttttggtagagatggggtttcaccatgttggccaggctggcctccacctcctggcctcaagcgatccacccaccttggcctctcaaagtgctgggattacaggcatgagccactgggccggtcagtgcccttttctctgaagtccttaaacctgggcatgacttccaggggctgagttcttctctttattcaccctaccctaaaatatcatccagtctcagggctcccatccattcactgctgaccatcccaaacttccctctgtgcccagagccctctcctgtttcagagcccctggctgctttctggttgactcaccagtcctcagcattgtccccatccctacaaagcaccactgtctacccaggcatccacctgagctagagactggggttttctggagttctcaaagctggcaccaattggcctctgcccacccctaaagtcacctc

SEQ ID NO: 1242882 - DNA, 4001 bp, Homo sapiens
cccggtcatgccaagagcagacaatagctatgaaaacaggagctgccaccagccggcctctggtgtggcacgcacatgccacaggctgtcactcaaggtggcagcatcacggccattgaggctgatgagggggatctgcctgggctggtcagtagtgggcaggaatataaatgcgggcttggctgcagacctggcctttttttttttttttttggagacagagtcttgctctgtcacccaggctggagtgcagtggtatgatcttggcttactgcaacctctgcctcctggtttcaagtaattctcctgcctcagcctcctgagtaggtgggattacaggcgcctgccaccatgcctggctaatttttgtatttttagtagagacagggtttcaccatgttggccaggctggtcttgaactcctgacctcaggtgatctgcctgccttggcctcccaaagtgctgggatgacaggcatgagccaccacgttcggccccaactcacctttaagggctcccaatccggcgcccccctgcagcaggtgcgcgatgactgatccaccgcattcaggcttctacgacagccagggaggcctggcctctcctgggcctcctcacgccctctcctttccctcatccccagcgtgtaactgtccctgcctctctccctgtgaccaaagtcccccgtgcaaccctctcatcaaatccctgactcgagaaacgccctgaggagcagccctctgtcccgacagaccctaactctcttgccaccctcactgcaaaacactccacatgcaccgccctataagcaaggtgctgctggtatcaccatgtgaaaatgcagtgaactgaggcccagagaggtgaagcatcttgctaccggtcacacagccagacacagcctctgttcccgcaggtagggtcctcacagcccctgattcagcagcacaggggtcagaagtcagacactggggctcctaggcccccgaccccaggcatgtgcaccagaatccctgggagggggcctgagaagctgcgttttaaaaacacatccaggctgggcacagtggctcacgcctgtcatcccagctctttggggggccgaggtgtgcagattgcctgagctcaggagttcaagaccaccctgggcaacatggtgaaaccccgtctctactaaaatacaaaaaattaaccgggcgtaatagcacgcctgtagtcccagctacttgggaggctgaggcatgagaatcgcttgagcccaggcgatggaggttgcagtgagccgagatcgagatggcaccactgcactccagcttgggctacagagtgagagtccatctcaaaaaaataaaagataaaaacacattggttgcttgagaggttgcctggaattcgaacctcagaggaaccaggcgtggaaatgaacggggcagggcaggcaggttgtgagagcagggatggcatgggccggggcagtgtggactgggtccccacagaagggggaggcctggttggggttgaggtgtgatgggggttttccaggtggaggcgagaaaggaaaggggatgaatttgactcctccagatacacaggcagcgatgctggagaagcagacggaggccagattctggaagcttctgtagtcccaagccctgtcttccctgagctggatggaggtggaggcaccgtgggagggagagctcccctcacccccaacccccaccccaagcagcaggccctgctgccctcatctttgttggtgccccgggcctcaaaacccgacttccacctccctcacagccaggctggcgctggcccactcacctggagaagacgatgttcattgtgaccagagctttggctgtcccggtgctggggaataaggacagggccccaggggtcctgcaggcctgggaggagccgggcagggctgggtgcagctgtgtggcctgggctcaagggacgctgccacccggttgctaggcgatggggccgcccacggcaggccctaggaggagccggtcgcccgggcaatgcctccctgaggccggcctccccagcctcgcgttggctcaggagctgctgagagaagagggcaccccacagaggcccacactctccctttgaagatggaggctcttgtggaatggggctagtggctggggctccccaggaggtagcagggagagatttagggggctcaggcctgcgtgcggccacatgtgtgggtcctgcccactgggctcctccctcccttcagggaagctgcctgccccgagcctgccactggcctttctggggtctagtctcaggtgggcgggacatggaaaagctcaggtggggggtgcagacacacagagtaaactcgggctccccagggtggggcaaggaaccagctcaaaggagcgtctttcacgtttttatcataattgcattgttttttcccttattataaaagcattatctgctcactgttagtaaagtaagataattaagataccacagaaagaaaatataaatgcacatgtcagattgactagctcaagtccaatacattccactaatggtatgatttctatgtctcaatgtatagacactttaccttcagaaaagaaacataaaaatcacgacagtaaggaacggggatgggaggcgggcagaggaagcggcccaggccttactctgccgttctgttactttgtatgtttggaggctttcattatggaaatggaaagggttttttgttttgttttgtttttaaagcatatataaaagcaaggacttcagggtcagctaaatacaggttcaaatcccagaccccgctctgctgtgtgaccttgggcaagtcccctgacctctctgggcttcagtcccctcccctgcagaatgggctcatgacagtactcagttaggagaagtaagtccctggcatgggggcgaagggacagacacagaggctggggcggggacccagaactcattgaaattcccagtgcacaggcccaggctggtggcggcttccctctgtgaccgatccccaggtgcccactgggctgtgccggctggctggcccctcctcacgcttctccagtgatctcatcgtcacactctctccaatcgtccctttgcagatgccctgccctgtgttccccggagtccccgaacaacgcatggaccaccccagctctgtccctgctgggtccccattctctgtctggggcatgaacccccacaacctcccacgggatggctctaagtagccccctggggttccacagtcagcgtggctcctccctttctgtgccaagctgtggggtggtggggtcctgtgtcccctttgtgccgtgcagccgtcgctgagcgccagtcaagtccctctcctgctctctgcttccttcactcttgggggctgtgctgggtgggagagtgtccccccaaatgtatgtctccctggggacctcagagtgtggccttatttggaaacagggtggctgcagatgtgattggctgagtcgcaccggaggagggtgggccctgatcccaccaccggggtcctcatgggaagaggagacagagacacacccgggggagatggccatgcggccatggggcagggacgggagcggcgcagtgtgagccaggagcacggagagctgccaggagccggagacagccccggagcctccggagggactgcagcagcctccgtagatccttgatttcggactctgtggccccagaactaggagagaagaaactactgtcattttaagcccccagtttggggtaattttgctatgggagccccaggacactcacacagggtccaaagagagcaagccgtcctatggtctaccccacagggtctctccagagccccctgacctcacccctgccctttcccctcctccaacacactcctccaccccatcacctccccccacgtccacctcacgtaaatgctctgctctgttgcaattttgggttgtcggtcctaaggg

SEQ ID NO: 1242883 - DNA, 4001 bp, Homo sapiens
cacctccttcccaggaccccacatattgatcaggctacttcaaccacctgagcccacctaatctgccttcttaggatccctccccctggctgcctcctgcgctgctgaagcctgacacactctggtcctgtatatttggtgagaggggatttgggagaagaggacatggtaagcaaaggagagtcttctcaggccagcttcggtctaggctataacccatactgaggagtctctggcaatttcactcacacagttacccatctccagtcttgcccatagactcctgtgcaagggggaagcctcagactgcttagggggtgcccgggccaacaccctcaccaccagtccacacttacctgcatgctctgaggcatgggtccccggagtaatgtgcacgtccatctgggagggagataaccagggcctgaacacccacccaccgacccacacttttccctgcagcccccagaccctcaggcaccatctccagctgatccttcctcctaatcatgcctttggactctggcccttccgttacaccccaaacccatccacaggtattccaattctttttttttttccaagactgagtcttgctctgttgcccaggctggagtgcagcagcgcaatctcggctcactgcaacctctgtctcccaggttcaatttgattctccttcctcagccacccgtgtagctgggaccacaggcacacaccaccacgccccactaatttttgtatttttagtagagatgagatttcaccatgttggccaggctggtctccaactcctaacctcagatgatccacccgcctcagcctcccaaagtgctgggattacaggcgtgagccaccgcgcccggccctagctattccaattctatccaaagaactggcccactactgttgatttaaaggcctgcctgtgccccacccctggtccaaacccatctgccgctccctactgcccttcctgccacactcttcaatacttttctccactttccagctcagatctttattcttgtcacatcgacttggaaagcttcctcccagtttcctctctgctaatggggatccttccaggccccactctgatgtcctatccatgttcatgctctcccagtccccatcctcagcagtagaccctcaatgcctggtctcactcccggggctcagctccaactgaccttgaaacgctgaggaagggagcgcagaagcttgaccttgatggacagaccaataagggtggccatgctgcagtgcggaatggttggtgtgaaagccacagccactgtactctcggggtcgctaacctggttgtggaggagagatgtcaagagtcaaccaccctcagcccaaggtccctcttcttagtttgttgttttgggcaaatcatccaacttctatgggcctcagtttcaacacccataaaataggcacaacaatctccctccccaaagatacccttcggtgttcgtgagcatagagcacgccagctcctgctgcacagaaacctttctgactctctggaacaactcgctcccctcggaagtgactcacctgaacccgcacctgctctactacgttcaactcctctagcgtcagtggatgctccgggtcattgatggagcgaatcagatgtgggaagtgaaggaaaagggactctgcgcccttgcccacttagaaccctctgccaggaacgccctgctgggatgcggctccaccagctgctcgatatcactgctccccccaccgcaagcccccggaacccgcccgcgcccagcagcggcggatatcgaagatctcgcgtgcgtcgatgctgtcgggaacctgctcgtcctcctcgcctgccgtcacaggccgctccccagagcgctggtagatgagggggttggcattctccaggaggccgccgccgaccccgccgccgcctaccatcgcggaaccaccaccgctgatcctagcaggcgtgcgcttccgctccaacccgcgcacttccggagaacgggaagggggcgtggcgtggcgacggagtcgcgcgagggacacgccgcgttgtgggttctcggcctgaggtgcgagagaagcggtgaccgcggccctggctgctcggacccgggaacatgatggtcgctggagcagaaggcgctgagaagggaccacggcggcgctgggtcgtgcgagccagtagcgggctgaaacgtagaggccagaaccaggtctcagggggcactaaaggcggtcggaggtaatccccacaccgcttcctcctggaagtcaggctggccgggagctcccgtatccaggacggttggtcgcctctggcctggcagggatcctagtgtctcgggacctcccggtgacgcgcctgcctcccctgctgcaccataggcccgggagtacggcgtccccacagcttggaccggcaggggctcgtgaaatgtttgtcaagtggataaatgaccatggccgtggtctccgcgggaggtgaggaaactgaaagccaccgaggaaaaggggggcgctccttaagaagtgccgcggtcacgtgtacgtttcaaaagaatggcgtgactgagtagggaggggaccgcggagaccctcagaccctggactgtaaggagatgaggggccgtgaaggggaacccaggaaactgagtcctgaaagcaaggaggaacttccagaatgaagggcgccgacactccttcctgcctttgctcaagcggttccttcaccccgatcaagttccttcccatttctccatctgggggatcctgaacgtgcacatcctcagagaagccctcctggggtctccaattctagtttattgccccctcctatcgatcccccagcgcgctcatcgggcctgtggacaaggacaggtttgaagagaggattccctggatcgcggaagggctgcaggaatggcacagccccttccgaggatgccaaaggagcccgggcaaaggaaagtggccgtgcccgggcctgcctaccactagatccccacccacctatgactgctcagtcccgctctcctaccacacccacctttcccggcccaagccagcgcaccccgctgactccctgcccagtccaaactccaaggctgggcaaggcactgatccactgctggacagacccggggcagcctctgggtgaacagcagcgtgtccgccggcagcgaaccgagaccagcgagccgaccatgcggctgcacagacttcgtgcgcggctgagcgcggtggcctgtgggcttctgctgcttcttgtccggggccagggtgaggctccctcggaggggcgacagggaccgggctcagatctgccaaatgctgcggaggcagaacctgacagtgcgggagggcaggcgcctgggaggtaggagctggtggagatgacagcgtggaactcgtgagccccacgcaacgcctccccgccgcccaaggtgggctcctagaagcacagaaagggtcgggctgggggacaccacggcaaggaaccagcggagtacaggggccccaggagcgccgggacatgccaggccgggtaggcagcctggggtcggagtgggtgagggattggggtgtggggattcagtccatttccctcttatgattgtggctgtagcgggtgctgccggccggtaataacagtaatagcttctggcagcatctggctctcagtgtgtggcgtccttggccaggggggatgccctgagccctccaaaggggcctcagacaaggatagtggtccttggggaacagaagcccccaggcgccaaatcctaaagcagatctaagaggccacagtggctgggtgcgattggctcactcctttaatcccaccactttagaaggccaagggagagtatcgcttgtgcccaggagttggaggccagcctggacaacatagtgagactcggagtgtacaaaaaattgaaagaaattagtgggctgtggtggtctgtgacctgtagtcccagctacttgggagg

SEQ ID NO: 1242884 - DNA, 4001 bp, Homo sapiens
ccaggccaggcgtagtggctcacgcctgtaatcccagtactttgggaggccgagatgggcagatcacgaggtcaagagttcgagaccagcctggccaacatagtgaaaccctgtctctactaaaaatacaaaaattaggagggcatggtggcgcgtgcctgtagtcccagccactcgggaggctgagacgggagaatcacttaaacccgggaggtggaggctgcagtgagccgagatcaccccactgcataccagcccaggctacagtgtgagactttgtctcaaaaaaaataaatgaaaataaaaaataaaaataaaaaaaattcaagatctgtgcataaacacaacctgtgtgtaagtaatgcttccctactgggctattttcctttttttcttttttgagagggagtctcactgtcgtccaggctggagtgcaatggcgggatctcactcacggcgacctccacctcccaggttcaagcgattctcctgcctcagcctcctgagcagctgggattacagacacctgctaccatacccggctaatttttgtattttaagtagtgacggggtttcaccatgttggtcaggctggtctcgaactcctaacctcaagtgatctacccacttcggcctcccaaagggctaggattacaggcgtgagccaccacgcccggctttttttttttttttttttttttttttttttgtgagacagtctcactctgtaatccagactggattgcaaggggcgtgatctcggctcactgcaatttctgcctcccgggtccaggttcaagcaattctcctgcctcaggctcccgagtagctgggattaaaggcgtgcgccaccacacccagctaatttttgtattttcagtagagaccgggtttcactatgttggccaggctggtctcgaactcctgaccctgagtgatccacccgccttggcctccccaaaagctgggattacagccctgagccacggcgcccggcctgtttttttgttgttgttgttttgtttttaataaaagaggcggggtctcaccccgttgcccaggttggtccagaactcccgggctcaggcgaccctcccctctgcgggccaggccaccgcgcccgccgcctcgggtgttttcttaggaaagctgtgcggtggctggactcaaaaaccccgaacctaaatctgcccgcagacggacaccagcttcctcttacctcaagcaaaagggcattcaggtcctgatggcttcgcaggaggcgcacagctgattcctttaatttctgtgccctttcaggattatatttttccctcttgacccttcccgctacggagagaagtcggttcgaaaccatcacagcacaattcacacacggggtccccggcccgacgcgcaggtggacgccgcggagaaacccaccagcgacaccctcccgaagaggggccggggctcctccccagggcgcaggtctcgggaaactaacggagacggccccaccgcggacgccggggaagacggcccaggagggcccgaggcaggggagcccggggacggctggcgaggggcggcctctgcgctgaggggagccccaggccgcgcaccccaggcccgcctgacagggcggccggcgggggcggcgttcgggaaagaagggagcgccccgcgggcggcggctgggggcgtccgcccaggcgcaggaggggccgggtccgaggcagccgcgccgccccagccgggcgcccaccccgcacagccccccgggcgcggcgtccggggatccgaccggcggaggctctggcgggaagggatcggggaaccggcgaaaccgtcccgggccggacgccgcccactcccgcggcctgccgcgcccacctacccagcagctcggcccaggccctccggcggccccctgggtcctggcccgaggcggagttcgggacccacgagtcggacatggccttggcgcctacagccccggcggcggctccctgcgcccgagcccgcgctgccttcctattggctgcggccaggcgcgcacacccgttggctggcggcggccaggccacgcccctcaggtcgaggccttgcgtcgtggccatgttggtcctgggggaggcgcctgcgcgcggtgaggtagtttttgcgtttggctttgccgccgcggtgtagtccgcgggggcgtctcgcgcgggcagactgccgcccctcaagcgtggttcctgccgggaatgactggggttggtcctgaagagaccacctggccaaccaagccgaggcaggctcagagcgccgcggggagcgcaaagccgcgcgcgcctctgagctccgggcagccgctgttcctcccggcggccgaacggtccgcgcgcagggcggtgtttcggcagccggagaccgcgcggtagccgcgcctgtattcccagcgctttgggaggccgaggctggagggtcgcttgagcccaggaattccagactagcctgggcaacagagcgagaccccatcacttttgtttcttttcttttttttttttttcctttttttgagacggagtctccctctgtcgcccaggctggagtgcagtggcgcgatctcggctcactgcaacgtctgcctcctgggttcaggtgattctcctgcctcagcctcccgagtagctgggattgcaggtgcgcgccaccacgcctggatgatttttgttatttttagtagagacagcgtttcgccatgttggcccaggctagtctcgaactccggacctcaggtgatccgcccgcctcggcctcccaaagtgctgggattacaggcgtgagccaccgcacccggctgagaccctatcttttaaccagcctgggcggcagagcgagactctgtctcaaaacaaaaccaaacataagaattcgtaaaagcgagtgcctaggcgaagctaatgtgcctcaaagtcctgggtaagtagaggccctggagacccgtccgcatcctctggcagtggccttggaaccaccgaagggattcagccgaagggccgcgttcccggcaggcgtctttattgtgttgattacgtagatggcgtagatgacgtagatgacgttcagcaccacaaacgaagagccgaggcacagagtggggccttggattcatgagatggggatggagcagaaatgagaattcggagtccatgaaacccccacaaagactcctgcacggcccgactcggacactttgcaatctgctggttgagggggatggtgtgaactcagggaacagcctgagatcgcgccgctgcactccagcctgggcaacagagcaagaccctgtttcaaaaacaaaaaataacactaagcaattaacaggactagactcagaggtgatcgagaaattgaaacaggctggaaatttaaattaactgtgattaatatgtggaggtctcttgtacgaaaggtgaacaatatgcatgaggaggaaactcatcaaattataagaaaggaagaacgctgataacaggtaatttttctgatggggcagcagtaggatcaacacagctgagaaaaataggaattacccacgttggaaaataaagaagaaaaaaagtttttttttaaaaaaagcatccaagaactgtgggaaaatatcaaatgatatcatatgcatgtaataggactcccaaaagaagaagaaagaacaaatcataaaaaatgtttgaagagaaaattaccaataattttcccaaaataatgaaagacctgagctcagagcacacacaaaacttgataaatatgagcccctgcctgacacatgcagtgtattcaaactgtggaaatcagagagaaaaccatgaagatggccggaggaaaaagatacgttaaatacagtaacaaaggtaagaattccagcctgggcaatatggcaagacctcgtctctacaaaaaatacaaaattttttttttgtattttttgtattgcccagtgtggtgacacgagcctgtagtcctgtgggcgg

SEQ ID NO: 1242885 - DNA, 4001 bp, Homo sapiens
gcgcctcgcatctccacagcatccactcacccccaacatgcctgagacactgggactccctcaaacccttcctgctcaggcccaaactcctttccccatctctcccagtctaggcatctctcctccagcacaaggtttctgaaccaagccccagggagctgccctgctggaaggctgcgggtggtgagggggcaggcaggacaggtttctcagagaagctctcctattaccaactttagagtatagcggtctgtttaagatttatttagggaaaatgcctttgaaggaagttggaaaacctctggcctagtcttccctgtaggaaactggtcctgtgcgtttcacaacgttcccgcagccctggggtctacactgctgcaagtgctaaggggagggaggctctggctctcctcacttcaccaaggggcagcttatcttttgttttccgaacagggcttcctggtatgatgtcatttggaaaaaaagtgttttgtaactttattaaaaagtttgaaaaccactacaaaaaccattgtcctaatcatcctatttctgggacaagctcatgaaactctcattcctcatgcctgggaaagccagctatttacagaaattccctctctattagacacccaggaacacccgattgtgaattcaagggaggaatcagcagttcactctcctcaagtcagttctgttctccccgcaacacaccttccagctcccccaggacctgccctggccccctcacctgtgtccccttctgggagagcccgctcggcaccggccccagtcgtggtggcagctcagggttcgtgctctgggaaaggggagtggagggatcagacaggagagctggcaccaagcacaaagggatccagaaccaagctgggacactgggcagggagggatcatggctttggagaaaactgggtgcagcagggcagggcaggaggatgggcacgactttggggaatgggagaagggtgcttggacccggcgtgtctgggtttgtcaagatggtaggcggtggtggtgtctggattgggagctcaccttgggctggaaggccccctgcagggagccaaaggagacggccggcgggaggcccggaggcagcccgggcactgcgggagggaaggccgtgtacggctgtggagagaagggggactagtacaggtgggggtggaggcgcagcccaagtccagcctgcccgtcagtccacgggcctccaccctaaagccccccagggagctgtcccaggctcaaggctcttgcttttgtgctgaagactggaccccagcagtcagggtcacaagcatggatgcatccacgcccacaccacacaccccatacgcacacgcacacacacactcacattatgtcggaaaaggccttccatctttcctggatatttctcaaactagggaagagaagggaagagtaagctgccagccagggacccgggccttcccccagaagccatgccctccccagaggcctccgagcctcatcgccagcccaatgaggagctcaccatgtgggggccgtggggtggcagcaggcccgggggataaggggtgaagtgctggtgggtgtgctggtgggtgtgctggtgctggtggttgtgctggtggaactggaaggccaggggccgggccgagccccctgcccccaccacctcagggccaccctgggcattcaggtagcgagagttcaggtcctggccgatcaggtcctgctctgtgggaggggacgggagaaggctttaatgctgtcgccacatcagcctccttgggcccaggtgactgccttccctctggcctcgagccactccctcctcaagccctgctgtctgctgaggctcaggtgccccaaagccaactgggcccgagcccggggtgatggccccccaccccccggccaggaccccaaactcaccagaaagggcgttagcggctgaggccccagggtgccctggcacctgcagcaggggtgggggtgggggcagggtggggccaggggagaacaaggaggggtggtggggtggtggggggggccgcagcccgggagggggaaagctgtgggtggacaaaggcaggggcagtgagggcgtcgggggccggtgggtgagctgcgcggacgaggaggaggcagatgaggaggaggaggacgaagaggatgatgaggggggaggctgagccacgggaggggccggggccttggggggcggccgtgaagagctggggagagaagtggggagatgagtgaggggttgggaggtgccagctctgacgggagggggtcagaagcctgggtgataccgtgaccctggttctccaacacgggaggtggcagaacccagccccaggaccgccccccaccgagggaatccgttctcagactgaggcgcctcccacacccagcaacccctatttctccctgtctaggtctctgcatccacgcagctgcctctgccatctctggccagatgactttccctttctgactcaaccacagcacagaacagatcattcatgttgacgcttaattagaacaagccacctggggtcccaccctacaacagtggaagcagcaccacactggcctggcctgggagtcaggagacctgaattctaggcccatcttgccatgaatgcccggggtgaccttgagcaagtcactgcccctctctgagccttagttttctcaataataacaatgacaatgacggtgacaaaatagagcatcaatagtaagtgtcaatagttcttaccctgtggcaagcacctgctgtaggccaagtgctggcacctgctttaaaagctaatccaagtctccaacattccacgccaccttccccactgctgcccagcaaagtaaccatctgaactgcatcaatggcttcttttaagaactcaatttccttttttttttttttaacttagcctccccctaagcaatcgcgtgtgaaatcaaggggctgaggcatgacactcagctttctaaagttcacaaaagctaactcaggactattttttaaagtttactcacgtaagacctgaaatcatcccatatatcactgacgctgaatgtacacactttgggaaacactgcattcactcgtagttaatcctcacaacagctttaagatgaaagtactatgatcattccatttgacagaaagaggaaatcgaggctcagaggggttaagtgacttgtcaaaaatcacacagccaggaagcgtcagagcaagaatttgaatctgggtctgacaccaaagccagcgctcttaaccatcatgtcagcatttcccaaagtatgttccaaagaacactattccgagcagacttgcctgcctgaaaaaacgttctcaccagcaaacacaactgggaaacagcacagcctggattcccctgcatgggaatgtgtaacggactcaaataagtcctgcagtcatctctttccatttgtttttctcaaacttttcagtctcagaatcctttttcaagtcataccccacaggtaccatcctgtgtccccgccaccaaactgaccaggcccttccggaccgcatcaatcccccaagaccactcacctgccagtgctgaggtccaggctgctgccatatggagaagtgcggaggccgaagggtgagacccgaagctgcagctggggctggggtgggggtggcagactgggagtggccggcaggggtgcagggggtgagacaggaggccgagggaccggtggaggcggtggttcctttggggggaaaggcactagcagcgggtcgggccccgggggctgttcttggctccgctccaggcccgacactttagggaccacggagagttttgcttcacagttcccattgaaggcgccgtgggggcccgaggctgtggggcaggatggcagacatgctcagttgaggctcatgctcaccccactgccctcccgtgcctccagccccagaccttgggaccaacctttgctggttg

SEQ ID NO: 1242886 - DNA, 4001 bp, Homo sapiens
ggggagtgggtgctgggatccaggcctcatctcagcccctgctcggaagagcatgagcaccctcagaggcgaggcctgggcccctagtgcctactgctccaggcagctgccactaaccatcacccctctttcctgcccagtgaaggaatgaggcctgaacccacacattgcagccagtttggccgttgactcctcctgcaccactggtggggaaggctcagtcacctgctcacccacagagctcccttcactgccaatccagtcatgggaggcacagcagtgggtgcccacatgcaaggagatggggtcttcgggtggctgaacagtgccacctgggtgggagatccctaactctcagcaacacaaggcttcctgggtccatgtccagctggttcaagggccccgtgcctcccacacaggaagctgtttgtgtccttctcatcagtgggaggtaggactcgtccagccgccccggaagtgggtgtgagctggaggcagtgagtctgtcgatggaggggctgaactcaagggtctggccccagatgaggggcagttggggtggcagggggcagggagtggggcaagtgagtcctagggttcccccacacagcgatgtttgcagctgggccttgaatttccctcccctccaggcggctccaggtccagccctgtgtccacctctggccagaccagccaggttccactaggcctctgccctggtccgggagacagaaaacccttcagtctcctggcctgacccaggcctatctgctccaaggctgctgtccagcaccccacagagggggtgggctgggagacggccctgtgtccagggaggcctgagctgcccctggccattgggccctcggatgcacgggtgtgggggaagggcctgaaggaagaggcaggtgaggtggcctccgccatctgctcctcctgcggagggcaggctgcccgaacagagcctggagcctgggaagggcctggagtggccgctgggccgtcagttcctgaagctgccaccgcagccctctctcctgaggtgatgggtggggaacgctctccacccacctaatccccaggaggacaccggacccctcccgagcaggtctgaaggtgccgtttcccttctgaggccctccaaccttggccaaggcccggtcccgcctccagaaccaggaaggtgccagcctccccccaccctcctcctcccgcgggcagtagctcagcgcaggccccgggtccagaagccgcccgcccggggagggccgcccctcaggccgcacatccacgcgacccccatgcagtttaacggtctctggcctgtcacttcggtccgggggcgccctctgagccgaccaggcgcccggggtggaggccgggggcctacaattcctcctttcggcgtcccaggaggcacggacccccagccccggccgagtggccagtggggagcggccctcttccgggccaggggccggggcgcggggctgcgggaaggccaggcagggaccgaggcccagcggccgcgggggaggtggggaaggggctgccgttacgtaagcccttcccgggcggcggcggcgcggcccccacccccaccccgccccctcctcattgtggccgccgcggaggtgcggcctggccccctcccggccccgcagcccggccgcacgcgcaccttacctcggcccgggctcctggctcatgccacgctgtccgccgggcgacctcccgtcatggggagcccggcatgggcgtcggcgcgcgggggccgccggggtgctggactggccggcagggcccggccgcgccctgcgccccgcgtcccgtcctggccgggccccctcggcagcgcacggaaaggagctccccggtgggagaggatcggccgccccaagcctcccaccggggaggctgaggctgtgcccagataaataaggccgctttgcagggaaccaggcgggcgcctcctcctcccctcgccctccccgcgctcctccgtggccgccgccggcgccgcgcgcgccccccgcccggcaccaaacgccgcgccctcgcgcgctcccggcgtggcgagccaatccgggttcgcgagcccgggcgggggcgccgagaatgccgagccccgcccccgccccgccccggcccccgcgcgcggcgcgctcccggcacggcgtccacgagcacgcgccaggcccggcacgcgcccccgccccgctcgccgcgggcacccgcacaataacaaaccccggcgcgcggcgggcggggagggcgcgggaggcagaagggagggcgaggggaggcgggagagcaggcgccggcgggtggcccaggggtccggggtcctatggggaccggggcggcaccgcgcgtcccggcccttggccaccacttggggaggcgaggaaggcgagacccggcccagaggagacagggtggtcagacccccgtctctggaccctcccgcccagcccacggcaaggacccttcacagccctcacaccccccgcgcacctgctgcgtgcccggccggaagcccctcattggagaccctggcacacccgcagagcgcgaaaacaagtgactgcacggatcagttcagacagtgacagtgaaagcacccgagggcttgcggtggtgacttctggcgggggcttcctgagggtgccccactggagctgagacccccccacggcgcgagggagggatggctcgggaatgggggtgcaaagatccgaggagcctggcaagttccctcgggaataaactggaggctggaggcggcggcggctgctgcagcccggggcaggggtggggcgtgctaggttaggtggaggactcggtggggaccgctggagaccccagacgccccagcaggctcagggcaggagaatggaggccaatggcgccctatcctggggtctcctgggagcagggccgggggagggagcaggtgtggggagagcagaggggttctttgcaccgggaaagagctacagggctgaatggggctcctgagagtatctcaataggagtgaaaccagctgctgttcccagcgtcctgatgggaagcctggccgaaggggccggtgtgaggcctggggtcagcgggaaggagggtcagactgacggcaccctggctgggtcccggggtggggtggttctgtgcttgctgtgggggcgccactgggtctacctggggtgagcgcagcagctcttctgcgtaagtcttgcccggtacctggatactgaccaaagaaggtgcccggagtggggcagacaggacgagccccgtgaagacagttggggcaacaggggagcggcggtccaacctatctgggtgtctccggtgcatggtctggcaggctggccctctggcagcagcttccaccccaggcgtggactgctcccggtaggagggtttcacctcgtgcctggggctctcaccacagcaggtgccagggcctcaggcagagaacaagctgtgcttgtgttgagtcccagctggggctggagccggacacaccccaagcgcacagggcaggctggacacaccccaagtgcatagggtgggctggacacaccccaagtgcatagggtgagcgtgggagtcaggcatttgggtcatgcaaccctggcgaggcccaagaagctagccctgcctgtggggaatctgagcagggaagagtgtgtggaagatcatcacagaaaggccaaccgtgctcctccaaagcggtgacccacctgccctccacctctgtgaccagctgtgacccacctaccccccacctctgtcaccagctgtgacccacctaccctccacctctgtcaccagctgtgacccacctaccctccacctctgtcaccagctgtgacccacctaccctccacctctgtcaccagctgtgacccacctaccctccacctctgtcaccagctgtgacccacctaccctccacctctgtcaccagctgtgacccacctaccctccacctctg

SEQ ID NO: 1242887 - DNA, 4001 bp, Homo sapiens
tgcagctggctcctcgcggctgctggggaggggccgtgctctggagcccagggaggctcaaaggatgaggaaggcagggcggaaacccatgcttccccgatccctactgtgtgctgggccttgtggtagacacactcgcatccatgccattgtttaatctttacaactcagcaaaggaaacattttacagagaaggaacctgaggttcattcagcatgatttgctcaaggtcacataaagggtgagcttagcctcaaatccaagaccaccctgggtgaggaagaggccagagaagggcaagacctgttggaagggggccatctctggggatgggccccctcctgcacagagacatcttggggggtgatagagcaggggctgggcattctgcgggggtgtgactctgagagctgggaagagcctgaaagtggggactgggtcagatccttctgtgcacctggacactgcccccagcttggagctgaggacaaaaatggatactgacacaaactagtgaatgaagggaagaaatgaacgagtgaacaaacagccactccacagtacaggctgggaggcagtcaccagccattccaagaaggtattgggaagggtgggcagagcccaaaggtgggggcagaactcacggcagtgcactgccggagcaggcacgactgcttcatgcgcccgggccccccgaacttcttcatgtctcggcagaagtggcaatccccgcactcagttcgcacacaggcccggcagcggcggcagcgggttcggcgtcggcgcgctccggcccccggcccccggctgctcgacgacattgggggcgtcagcaacgccgagggctgtaggtggatggtggcagggtcagatgggcccactggggccctggcctgggagacccctgacaggtccctccacctacaggcagctagagcctgccctcttcctcagggggacaaggaggtcacccccttctgtgtatctgggggccaatcctctactcaaggcctgtctccctgcagcagctcaagaggagcccaagaactgcttcctggcctcgctcctctaccgcctcctcagggtcccttccctagcccagggagcaggaggggacaccgaggccctctcctctgccatccccacaccggagctccttggaaaggccaggcactccttgtccgtggtgttagcttggagagatcccaactcttcccctgttatccgagtgtagaatatcccaggctctccccaacctcaatctggggtaaactgcccagattcacctcccagatacccagagattcctagacggaagctccggacttttcctcccccccgccccaccaaccttttcatccacagcagccatccaatctctcttcccctcaacccagttatcctcaccagatccagcgagatccttgcccccaagtccctaacgatctcctctgcccactaactccccagagctctgacagccctggagatgcttcttcagagacccttctcagcccaagatctcagcccctcttgttccccacagggttccctcctccaggacaccctcctcttggatccctcaggtccacctgggcaatctcccaaattccttgggattctagaatccagcctgacatcttcccagaactgaggatgggctcagtcctaggacccccagcttcccgggctgctttcatccctaatcatctagaatcccttgggctccccctcccatggaaaccagatcctccaagatcccatgtggaattagaagcctggagggtctcttcccagtcagtcttaccccagattccccctttccggggactttcatacccatccatggggctaaggggccctccagcgctccaggggaggggcctggagggcggcgactgcaggcgggggtgggggctttcaaggggaagcagggtctaggaaggagggccagttccccagggtggagaggtcataggaaggagggctggagatgagtttggagtagagagagggtgaggctgggggcggggaaggtagagagaggccgggctgaggatgaatgggagtgggcgctgcccaggtctgggggtgaggaggagccgcatgaacccacctcacacgtgtcccgggagccatctctcccttctcggcagctcccggcgggtcggcggccatcggcggcgggggggccgggcggcgcggggcgcggaacgctcagaacgccggggtccacggccccccgagggcgctcggcccctccctccggcggaggccgggacggcggcgagtggagatggggggcgccgggggcgaggccctcccacgggctgcggcgcggcccttccagggggaggtcctgctctgggaggctcagtccctcagcccccccaggccaacgggggctccttgggcgcagggtgctcagcttctgcccggggcccactcagtcccgggtccgagtcccagctcccctccccccaccccgccccgcctctccccagcgcccctggccctttaactggccccttcccggaccccactgcccaggggtccagtgccaggcctgggccccccccaccgtttccggggttcaagcccgcccaccgccggttcccggggaggggggggtcgctgtaacctgcccccctcccctgggcccgcccctggactgcgaccccctgccctacggctgcgaggcgagcggagggggaggtgaaggaagctgctccggccccgccccccccagcccgcgcgcacccccgacctctccccctcccccaagcgcgcgaccctcgggagatagggatttaaataaaatttgaataaatccccctcctcaagcgggagggtggaaggaaaggatagagggggagagggaaaggggaagggggcagttggggtgtctcagcccccctggtcccccagccccgcgctgctacggcccggggccctggccgcctctctcatccctcctcagctccttcctccttcctcctctcttcccccctcccctcccctccctcctccttccctcctcctcctcctcctccccctctttactccctccttctcccagaggaaccccgcccccttccccctccttcctccaccacctccactttccaggacgaacgcacgcagggctcgacgggagttgtagtcctgcggccactgatgctacgggggaacaataggacgctggggacagcgggaactacaaacaggacggcggagggcgtgcccagccgggagccgaggatgccgggagttagagtcccgttgccccgaggctcccagttgcagaacatcgagaaggagagggaacgatgactacaaacaagatggccttctcccccgacccgacctccttcccaggcactcacacgccctcctgtccacaaccctccgcgtgtgtggtacctgacgggagtcgcagtccatctgctgccttcccgctgccatttctactcgtcaggaacaatggaaaggtgaaaaggaaagaggactacaagcaagatggcggaagagggacatacacctgactagtagtcgatcttacgaggtgcgatgggattagtagttttatagccttccagtgttccttaagaatggcggaaccaggaggacgaggagactaccgtaaagatggcaggctacctagcctctcccggtctccgctttccaccaccttgggcacctcgcccgcctgtggtctcgaaatcccccccaccagtggcgcacggcctgacgggagttgcagtctcccggctcccgtctatcatctcaagtcgagacaatggaaggggatggggcggggccaccggcaaagatggcggctgcagggccggggcgactgcgacatgggatgtgtagtccaggcgtctggcctcttccctgcggaaatgagggagaggactacgaaaaagatggcgacctcgcccctcgacctctgcgccggtgcctgctgggaaatgtagttccttgccgagtccaacaga

SEQ ID NO: 1242888 - DNA, 4001 bp, Homo sapiens
atctcagcccctcttgttccccacagggttccctcctccaggacaccctcctcttggatccctcaggtccacctgggcaatctcccaaattccttgggattctagaatccagcctgacatcttcccagaactgaggatgggctcagtcctaggacccccagcttcccgggctgctttcatccctaatcatctagaatcccttgggctccccctcccatggaaaccagatcctccaagatcccatgtggaattagaagcctggagggtctcttcccagtcagtcttaccccagattccccctttccggggactttcatacccatccatggggctaaggggccctccagcgctccaggggaggggcctggagggcggcgactgcaggcgggggtgggggctttcaaggggaagcagggtctaggaaggagggccagttccccagggtggagaggtcataggaaggagggctggagatgagtttggagtagagagagggtgaggctgggggcggggaaggtagagagaggccgggctgaggatgaatgggagtgggcgctgcccaggtctgggggtgaggaggagccgcatgaacccacctcacacgtgtcccgggagccatctctcccttctcggcagctcccggcgggtcggcggccatcggcggcgggggggccgggcggcgcggggcgcggaacgctcagaacgccggggtccacggccccccgagggcgctcggcccctccctccggcggaggccgggacggcggcgagtggagatggggggcgccgggggcgaggccctcccacgggctgcggcgcggcccttccagggggaggtcctgctctgggaggctcagtccctcagcccccccaggccaacgggggctccttgggcgcagggtgctcagcttctgcccggggcccactcagtcccgggtccgagtcccagctcccctccccccaccccgccccgcctctccccagcgcccctggccctttaactggccccttcccggaccccactgcccaggggtccagtgccaggcctgggccccccccaccgtttccggggttcaagcccgcccaccgccggttcccggggaggggggggtcgctgtaacctgcccccctcccctgggcccgcccctggactgcgaccccctgccctacggctgcgaggcgagcggagggggaggtgaaggaagctgctccggccccgccccccccagcccgcgcgcacccccgacctctccccctcccccaagcgcgcgaccctcgggagatagggatttaaataaaatttgaataaatccccctcctcaagcgggagggtggaaggaaaggatagagggggagagggaaaggggaagggggcagttggggtgtctcagcccccctggtcccccagccccgcgctgctacggcccggggccctggccgcctctctcatccctcctcagctccttcctccttcctcctctcttcccccctcccctcccctccctcctccttccctcctcctcctcctcctccccctctttactccctccttctcccagaggaaccccgcccccttccccctccttcctccaccacctccactttccaggacgaacgcacgcagggctcgacgggagttgtagtcctgcggccactgatgctacgggggaacaataggacgctggggacagcgggaactacaaacaggacggcggagggcgtgcccagccgggagccgaggatgccgggagttagagtcccgttgccccgaggctcccagttgcagaacatcgagaaggagagggaacgatgactacaaacaagatggccttctcccccgacccgacctccttcccaggcactcacacgccctcctgtccacaaccctccgcgtgtgtggtacctgacgggagtcgcagtccatctgctgccttcccgctgccatttctactcgtcaggaacaatggaaaggtgaaaaggaaagaggactacaagcaagatggcggaagagggacatacacctgactagtagtcgatcttacgaggtgcgatgggattagtagttttatagccttccagtgttccttaagaatggcggaaccaggaggacgaggagactaccgtaaagatggcaggctacctagcctctcccggtctccgctttccaccaccttgggcacctcgcccgcctgtggtctcgaaatcccccccaccagtggcgcacggcctgacgggagttgcagtctcccggctcccgtctatcatctcaagtcgagacaatggaaggggatggggcggggccaccggcaaagatggcggctgcagggccggggcgactgcgacatgggatgtgtagtccaggcgtctggcctcttccctgcggaaatgagggagaggactacgaaaaagatggcgacctcgcccctcgacctctgcgccggtgcctgctgggaaatgtagttccttgccgagtccaacagagaaaggacgtcgctgttgaaatgtgaatcccggcggacacgccaaattgcgaggcgacggaaacggaaagactcttttctcctctctccgccaccggcttctgaacagcctggcgggaaatgtagtcccaagctttcactcgcgagtggaggggaaggatttatgtcaccagtggggatcagtgcgggtgggggagaaaaacgtcgggcgatccgggaataaagaatgtccgcctctccatggggcgaggacttcgcgtttcaggggagggcccttaaaggaaggcagcaggaatcagtcttgtcgaacaggggggcgtggttctcgtcgagagtgcattcacactcttgttccctagaaagcctgggcacctcccactcgattcctgctcctcagacctccgggaatcagtgtcttacaagacgtgcgggctccggggaaaaggacctggagtcacagcgaatccccgccccgccccgggaagccaccaaaccttgctttttctcatctgcaaaatggggacaatggggataatgatccccacctcgaagcacagttgtgagtgttaaacaagccaatgttcttgtcaccaaagtgcccaactctggcacggggcacgcggtggtagatccctttctaaggtcccttccagcccagccgttctgggagcccaggaatccatgatgccggacagagttcgctcctgtgagaagaaaactgacccgcaggctcctcccagattgaaccgacccccgcccctcctcatcggggtcctccagcgtctgttaccgagcactgctcccagggggcgctcaatctccattcgactgaggtactacaaacacgatttccgcaacctggagttggaggcattgcaggctgtccagcctcatcccctgcctgatatccagtcagccttggaggcctctgcctagacacttcaactgcctatgcaaatggaacggcttctcatctttctgccgttttttggttttttttgtgtgtgttttaaggtcttgctctgtcacttgggttggagtgcagttgcaggatcatagtttgctgcagcctcgacctcctgggcttaagcgatcctcctccctcagccttgtgaatacctgggacttcaggcacgcgccactacacccagctaatttttaaactataatttttttttgttcagacgaagtctcgctatgttgcccaggctggtctcgaactcctggccacaagtgtgcctcccgccttggcctccctaagtgttgggattataggtgtgagccagcagccatacccctcttctcaatcttccttctcccctggaaaacctgctcacttctgaccccaagacagccccctccccttccctctgtcttctgtgtttggcagaccagccccagcgaggacttgttggttgtggtttttctatcagggaagtcaatggctggccagtgtagtgtgaagtcccagcttggcagagacttgcccaaggctggataggaggcttctttgccgctcag

SEQ ID NO: 1242889 - DNA, 4001 bp, Homo sapiens
cggagaaggtgagtgggcggtggggagaggagtgtggaggagcaggctcacctgatttttgtgtcgtgccacacggcgctgcaggtagcagcggcggcccaggccctgcagaccctggcggcggcagcacggtctctcagggacaggtggcggaagatgagtgccagcacctcctctggcagtccctctccaggctcggccatggcccagatccggctggggtgggaggatccgccactcccaatagctccggcctggagagagacggacgtctctgaggtcgggaaggcgcaaagtgttgcaggaagaccgagcttaggtgtacaaatgcttgtggcctgaggaactgagggcctctcagacagcgtggggcatcagataaccccgaaacttgttcacaaagcagatttcaccgcctcacctactaaatcaggctctccggaaagggtaaggcccaggaatctgcatttcaacaagcccctgtgactccacaggttccacgttgagaactcccctcccacttttttttttttttttctttttttttgagacagggtctcgctctttacccaggctggagtgcagtggcgcaatcacaactcactgcaccctcagtctcccgggctcaagcaatcctcccacctcagcctcccgagtagctgggactacaggggcacgccaccacgcctggctaatttttgtaattttgttgcagagacgaggtctcgctttgttgcccagactgacctcgaactcctaggctcaagcgatcggcccgcctgggcctcccaaagtgctgggattacgggcatgagccaccgcgcccggcctgagaaaccccatcttaaccccgccggttagtagaaagtgactacagggttaataaggcgggagcgttaatgtaggcttttctttgtcagggaccatgagccaatcaggaagcgaggcgtgggcggggcaaagctggatccacccctggaggggaggctccttccccgcctccgcctcgccggggagatgtcccgggtgcttcctaagacagccccactggatgaaaaaaaacttgggtctctgggacctgacggttctggggcctgaggggctcaagatttaagttccgacccctgagcagccctggctcccgctgagcaatttgggttcggctggaactccgcagacccaccctggagcgcagcctttagagggggatgggttactggaaagtgtgcgtcctctttgaagttgccaatcctgtttgtttttgttttgttttgttttgagacggaatctagctgtgtcgcccaggctggagtgcagtggcgagatctcggctcactgcaaactccgcctcgcgggttcaagcgattcttctgcctcagcctcccgagtagctgggactccaggcgcgcgccacctcgccgggctaatttttgtatttttagtagagacggggtttcaccatattggccaggctggtctcaaactcctgacctcaggtgatccacctgcctcggccttccaaagtgctgggattacaggcgtgagccaccgcgcccggccgccaatcttgttttaaggttcttaaaggtttgtgtacacaaggcttcacactactcgccagttaatgttcccatatcttccgggctaacagtttctcccggaatttgtgccacgtgtttcctggggcttcagatacgttcggccgggcttgtacctgggacccatgggcaccccgttttgagtgcccactggtagcagcgatcttgaagccggatccccaggggtaccagaaaattctggtctccagggggcgcccccttgatttaccgaagtctggcagctgtagctcttacgagccccccgcctcgtaagaatcgcaaacccccaaagtcgggtcttcctgccgtctaaccttgggcgctggtgtcttacctgctcggcggaccagatgggctttgcccggggcaggggactggcagcagaggacagcggacgggaagcagccaccgggagcccgcggggcgggacgcgcgggcggacggggcggctcgggctagggcaccgccccagcgcctccgcgcacacccggaagcggcggagtagagcggagcctggcgggcgtgggaacccaggccccgccgaggcggccaggttagtgcagcaggtgggtgggtgggctccccggtgcgggcgggagaggaggtggatcttggctccgaagcgtgggcgcggcgcagatgtcaccggcggctgctccagccagctggtggcggcggtctactgagctgttcgaacaccgtgggaggcgggggacggtacggaatttggcccccgcaggctcctcgtccctgccagcactttcgaggtgcagtagggccctgcaggagagagggtgggggagaaggggctggttctgaatactttccttgagcggagacccccttgcccaccccagccgatcgcacgtgcgaaaccccagcttgagggtgggctagtgggagcctgggaagctcccctcaagcgctcgggagctgcgtagctgagtagggggtgtgcccggcgggtcgcaaggagtcacaggctttcagttctgggccacgcccacaggctgtctctgtccacccagccagaggtggggctgcccccgggactgttaggtgttcagggggcaccgtgcgtggctcgtccctggaaacaggcgcagaagttgttaggtcggtacctaagcgccccacagtctccggccaccaaactttctcaggacccagcctggaagcctcagccccgcccaaaaagggacgactcctggtgggtggggcgcggggcttcccaaggaggggcttccgtgaaagaacacgtaagaagagctgccagtcggcggatgcgaaactagggccctggcctctttaccctgttaactcgacctccagcctggttcaccttccccatcttctagtactagtgagtgtgagaaagcatccccagtctccaggttcccagtactccccacctccccctcgacccccacagacctgatgggcagacaatggtcctgttcggtccccacttccaccccttggggtgggaccataaccaagtcaagcactctcaagtcaaggggccagaaagacatgaaagagggaatgtttccaggggaagttcccactctctcctactccccaggccactttcgaaggactccccccttatctcacctccgtggctggctccctattatggacccacttgtcacctgcagagtttcctgttttttcttgttttgcttttaaagaaaacaaatttattttgctcttttaatacaaagaaaatatgtctacttcacataaagcagaaaatattgctaaatacaaagaaaataaaaatcacccacaatccttccccacccccacctaccttccttcatcctgcccagagataaacaaaatgcaaacttcctgttactatccagactgtggtttggcgtaagtacacaagtattaatgttttctatgaaaagattagaaggctgggtgtggtgcctcacacctgtaacccagcactttgggaagctgaggtgggcagatcgcttgagcccaggagtttgagaccagcctgggcaacatggtgaaactccatctctactaaaaatacaaaaactagccaggcatggcggcgtgtgcctaaagtcccagctacttgaaaggttgaggtgagagggttgcttgagctgggaaggtcaaggctgcagtgagctgcgatagtgccactgcactccagcctgggtgacagagcaagaccctgtctcaaaaacaagacaattgaaaaaacaaaggtcgagagtagtgccttactcctgtaatcgcagcactttgggaggccagggcaggaggacagcttcctgttcctcatgtaaacagatggcagctgggccaccccatctgtcctgccccatagctaacactcaacactcctcttagcccaccatatataaaccctgatga

SEQ ID NO: 1242890 - DNA, 4001 bp, Homo sapiens
ctctctctactacaaatacaaaaattagctgggcgtggtggcaggcacctgtattcccagctactggggaggctgaggcaggagaatcacctgaacccgggaggtggaggttgcagtgagctgagatcacgccactgcactccagcctgggcaacagtgcaaggctctgtctcaaaaaacaaataaataaaataaacagtggtgtaataaagaactacaactaacgtcattcttctgatggtgggagtaaattaattatacaaggatctatgacagtagttggcttctctagaagaaatcccaactgtataaaagcactttgagaaatatattttctttctttttttttttgagatggagtttcgctctttcccccaggctggagtgcagtggcaggatcttggctcgctgcaacctctgccttccggtttcaagcgattctcctgcctcagcctcccgagtagctgggattacaggcgcctgccaccacacccggctaatttttgtatttttagtagagatgggggtttcgccatgttgaccaggctggtctcgaactcttgacctcgtgatcctcctgccttgacctcccaaagtgctggaattacaggcatgagtcgccgcacctggcgcgagaaatatattttcatactttttttcttcttttttgtggaggacggggtcttgctatgttgcccagtcaggtctcaaactcctgggctcaagcgatcctcccagcctctgcctccctgagagctgggtttacaggcttggagccaccgccccccgctattttcatgttttgtatgattcaagcttacagtgtagagtgtattagcctaatccaattactttatccaattgggatagaagaaaggcttttacaaagtcaaaaggagaaatcctggaactatggggctctttcaaagtattagatgttaaagaacaaaaacagccaaatagccgggagcagtggctcacgcctgtaatcccaactcttaaggaggccgaggcgggagggttgcttgaggccaggagttcaagaccagcccgggcaacacagcgagatcccggctctactcccagcttctcgggaggctgaggcaggaggatcccttgagcccaggcgaccgaggccgccgcgagctatgatcgtgccactgcattccaggctgggcaacagagcaagaccctgtctcaaaaaaaccccaaagaatctagtgctgttcctacagagacacattggccacaggctgaggtgggcaatagcaaccaaatatcgcatggtggtttacgcactgcagcccatttggagtcctcaaatatgactgccctttcacagatgagtctgagactcaaaaactgtcactagcgtaaggttgtccagcgagtttagtggctgggaggctgaggggtagacagggcggctagcgatgtggggcaggcctggcagtcgccacagacgacctaacggtaggaaaatcttacagccaccaggagagttccaggcgccgcggcagggggactgggagaggggactgcgcccagaatgaaggctcgggacaaaagcagttgcgcaaacgcgccaaggctgggcgtcgagtgaccgcgggcggaggtcaccagcggccactccccggaagccacccacggaccacgcgcgcccctgcacgcagagggggccagggctccacgggcgagcggcgaccctgcctcccggagacggcgcggcctgccctgcgcgcctcagccccgggtgccggcgtctcgggcagcaccaccaagtctctctggaggggaaaggatggtcggatttgccccatgtcccttcctctgacccctccctcaagagtgccccgggacaccccgcctgtggctcagcctcccccgccccgcgctgccatctcctcagggccgggcagcaggctcccgagcgcccacagacccggggtgcggcccagcccacaaccgtcacctcaggggcctcaggcgcccagcggtgctgggcggggctggggcacgaccgggagcatgcgcagagcgcgcgtttcgcccatcgcgcacgcgcacacacctgctccgcccccacgctgcgtgccgctgctgggttccgccacgcccgtcatggcggcggccccggccggctctggccccgcccctcggtgacgcgtcgcgagtcacctgaccaggctgcgggctgaggagatacaagggaagtggctatcgccagagtcggattcgccgccgcagcagccgccgcccccgggagccgccgggaccctcgcgtcgtcgccgccgccgccgcccagatccctgcaccatgccgtcggagaagaccttcaagcagcgccgcaccttcggtgagtgtcgccgcgagggcggcgggtgcggcggggccggggtccgagctgtggagggcggcagggcctgggacgccgtgaggggtcggggccgagccgggaggccgagcggggccggtggctgccggccggcggggccgagggatgcggggcccggggccccgtgagggacccaggccgggaccgagccgggagggccaggggctggtctgggccggggcggcctgcggacctctcggaggcctgggaggaggcagccggcggagggcgggcgggggccggtgcgctcggggccccgggcctgctgaatcaccccgcgccctccgcggcggggtgcctgccgtaccccggccaccgccgcccccgcaagcgcgctgcgggcgagggtcgcgcttctggggcccaacagcccccggggccgcgctgggccgttcggctctgaagcggggctgcgccgggacccagcgcgtcaccttcagggctggttttcccgtcgagggagcccgcccgggtgcgagtgcctcttacagacctcagtgcctcggtcgagaggaggggaatgtgctgggccccggcctcgccgcgcccgggacggcccacagcggtgttgccagttcctgtctgtagcccaggagctggggtgggagacttctcttgggtttgcgattacgttctcaccttggcaccaggaataccgaatacatcccttttctgccggttcagactggaaacccagcttaggtgtgctggcatttggttaaacgtgcaggtgtcaccatcacaatatttactccacgcagatgatgcgaagtgattatttcccgcttgagcaagagaacgccgcagatccaggtatctgttgttgcctaagttccagacaccggtttggaagggaagcaccgtgttcatcgcggtggactgcgaatgcctgccgccatcctcgtcaggagcccacacagtggtgctgtttgtctgcttttgcctagtttcccggagtctagaaagagtttagcattcatttgagtttggatatagttttgcaggtctcattgaccattattttttttcttatgcctgagaaacttaagcaaattaaaatggaccttagcttgccaagcatatcttttcagacagcctcttgaggcagtccgttggttagcaagacttacacgtgccttttttgttagtagttttcttgttagtcaccttaatgaactctttactgtagtgtctaggcttattgagccctgagagcagcattaaagacagattttcttttcttttttattttgagacagggtctcactctgtcacctgggctggagtgcagtggtgcaatcacagcccactgcagcctcgacctcccgggctaaagcgatccagcggcccccctcagacctggcttctgttttcaccaatgaaaagttaactgggaacatttatgtaggagagatgccctttttctcataacagaaactatagttattttcttttttgcttagtacttttgggttattctggaaaagtctctgcgaagagtgggtagtaagggtaggaaatgtgagactaacacatccgaacaaggaatttcctggaacctaaaagtggccctgagggtagaccagcaataatgccccattt

SEQ ID NO: 1242891 - DNA, 4001 bp, Homo sapiens
gcgggtgaatcacaaggtcaggagttccagagcatcctggccaacatagtgaaacccccgtctctactaaaaatacaaaaattagccgggcacggtggcacgcatctgtagtcccagctacttggaggctgatgcgggagaatcacttgaacctgggagacggaggttgcagtgagccaagaccgcgccactgcactccacagcctgggtgacagagtgagactccgtctcaaaaaaaaaaaagaaggaagtgcatcccaccgagacaatctcagaagttcccaaggatacatgtcaatctcctaaatttctataaaatgcacaaagcagtcttcaaagcactgtttatgcatggaaaaaatgcagacttcaaagcttatcagtgagggacgagtctgtgctacatgcagggagtgaaatactatgtagcattgtttacactacactgtctctaagagaatatatattgcattatatcctttagggaagaaggtacacacgactcagaggttttttaaaatgttaagagtggtttatttttgactgctggggtctctgatggtatttactttgttccttttgctgttctgcatcgcttggatgttttctaacctgtcctttttacctaaatatgagctgcttgaacatcaaagagctgtcaacctttaaacagagagagccttgaactccagattaaataaacatctcctcctgtgatctgttacatccaatattgctgaaggcaaaagtccagcccgcaccgctgtgatccatccgtctctctacgcccccaccatcaggagcccccgacactgggcttcccctactcccgtaattttttttgttgctgttgtttgagaccaagtcgcactctgtcgcctagggtggagtgcaatggcccagatgttggctcagtgcaacctccgcctcccgggttcaagccattcttctgcctcaccctcccgagtagctgggattacaggcgcccgctaccacgcccggctaatttttgtatttttgtaagtagagacggggttttaccatcttcaccaggctggtctcgaactcctgacctcaggtgacccgcccgcctcggcctccctaagtgctgagattacaggcgtgaaaccgcgcccggcctgctcccatttcttcaagttcacctcgtctctggtcagggccagcggggcaccctcggctcgccttcaagacaggggcagaggaggcggcccccaggcgtcagcttaggccccgcgcagacctcgagggatcccagccccagctcccggcacggcctcggccccgtggtgtcccgtgccccgcgtcagggcctcttcgatgcctccctgacgccctcaacccctccctaccccgtctgcctctcttggacccctcggaccctccctaaccgcctcaaatacctccctggccccctcaacgtggtgtcaccgcggccgctccccacccacacccaaaacaccacatcgccgggccccgcgcccaactggtggcccccggccggggccaccgcccccgccactcccagctccgaggcctccacctggcagggaccccccgcccctcccggccccgccacccccgcgcgctcaccctcacggcaacgcctcctccagatggtgtcggtgtggaggatgcgccggaacttcgtgcagacctgggccaagctgggtaggtccgtgcccggcagcgacgcgaagatctccaccagcagctcgggcggcagctccagcagcgagcagcgcgggggcggcggcgaggggcccgcgcacaagccgcccccgaccccggcgctagcctcgatgcgctcctcctcggggtctgtgtccggctcgctgtcggccgccgccgtctcggccgggccccggcgctgctggcggcgccgacatccgcgcgacgggcccacgccgcaaaggcgagcacacaccgccatgccgcccagtgacggccactgctgccgcctgtgcgcacgctccagcgcggccccgccccgccagcgccgagccacgcccccgccgcagagctcgccacgccccctggagagcctagccccgcccctacgtagagctccgccccggccgcgccaccccctccccgcggggcggcgacctcagagaccccgcactgctgccctcccctccagcgtgagggcgccgcccgtgacgggcatgagaaaagaaagtggtgatgccgagtgcaaaacgttagactgccccgtgtgaggctcgaactcacgaccttcagattatgagactgacgcgctgcctactgcgctaacgaggctgctcggcgaccacttcgcgccgcggcttttgtggagataggggtcgcccctcgcgcccgtgcgtcccgcttccggcgcccgaaactgtgccgcgccggccggtgagtagaaagatgcgccttacagcctccaaatacagaggcagcagccagaaccccaaagggcgcctagaagcccttttgtccattgaaacaacgcgcgttccatcgtctccgccttatggtaaccaaaaggcccgagctgcggagctctgcagggaccttcggggatcccgagctccctgcggaagccccggggagggcttggaggggcggcggccggcgcggcccaagagatccggggatgcgcgcccggtctggaaagggaggccctgccatgcggcgccgcccaaagggcgcctgttcctgcagctgctgggagccgcgcacgcctgctccagctgggctccgccgaggccgctgagcggggtcgtctcccaggtccgcgggtggtgaccgcgaaggcgtcctctcacctgagcagccgcgcacgtcgccgtgggctcgcctcggaccccatctcttggaggcccaggcgggagtatcaatcgaggccaggagctcgagaccggcctgggcaatacagcgagaccctgtctacaaaacaaaattttagaaagagaagctgagacgggaggatcgcttgatcccaggaggccgaggctgtagtgacccgtgatggtgccactgcacttcagcctgggcaacacagcgtgaccctgtctccaaaacaaacaaaaaacaaaaatagccacaaatggctgggcgcggtggctcacgtctgtaatcccagcactttgggaggcggagaagggtgcatcacctgaggtcaggagtttgagacccgcctgaccaacatggtgaaaccctgtctcttcaaacaaacaaacaaacaaaccacacaggccaggcgcagtggctcacgcctgtaattctagcactttgggaggccgaggcgggtagatcggttaagcccaggagtcggagaccagcctacccacatagtgagacgcccccatctctacaaataatttaaaaaattaggccgggcgcggtggctcacgcctgtaatcccagcactttgggaggccgaggcgggcagatcatgaggtcaggagattgagaccatcctggctaacacggtgaaaccccgtctctactaaaaatacaaaaaattagccaggtgtggtggcaggtgcctgtagtcccagctactcgggaggctgaggcaggagaatggtgtgaacccgggaggcagagcttgcagtgagccaagatcgtgccactgcactccagcctgggcgacagagcaagactctgtctcaaaaaaaaaaaaaaatggtttcaactaataacatcctgctatctaccagggagatcagccattaaacaagtaaccacatagataaatacataaattataaattgtaatgctctaacaataagtaaaactaacaagatcttatagcagagaccagactttggatgatcaaaggttctttgaggaaatgacatttataaatcaaaggaaaatttggagttagccaggaggagaacacttgatgggagaatgttctagaaaaaaaggatagcggccaggcctggtggctcacacctgtaatcccagaactttgggaggccaaggcgggcagatcacctga

SEQ ID NO: 1242892 - DNA, 4001 bp, Homo sapiens
tcacctgaggtcaggagtttgagaccaggctggccaacacggagaaaccctgtccctactaaaaatacaaaaattacctgagtatggtggcgcacacctgtaatcccagctatttggaaggctgaggcacgagaattgctagaacccgggaggtggaggttgcagtgagccaagatagccccactgtactccagcctgggagacagagccagaatccgtcttaaaaaaaaaaaaatcgggggggtggtgtcagggctaggtccaatccttgagttgcaggatgagaggaatacaatatattctctagtgccccacccttatttcaggatccggactttaggagcctggaagcgggaaccagtcttagttcagcactcctgtcttcccagcccccatcctgaatgggaggtggcctccagctgcacacgcttcttccaggcacacctcaatttgcccctctgaatagggcaagagaagcgggggctgagtcaaaactggcggtgagcagtgtcctgcatccttccagccatggccttgaagccggggttctggcctggacacgtgccactctccaggccaatagtctcaccacccctcccgccagcgctcagaggcggggctggccgcagcgcgaggaatgcgggctgggggcccggggcacattccagggaagaccccaggcccaaggggcaagtttacgcaactcgccgcccagctgaggctgggagcaggggagggcacccaccccgactctctctcctcttctccagcactggaggcggccgggctggtggggagcttgtggaggtggtagtgcgcctcccagagtcctggcccggaaacagcgcgccggaaagggctgcctgcggggggctgacggcggcgagagggaggggagaggaggtaggctggccatctggaaaagggcctctttccgcactgtgcacaagtccgcttcggggcggcagcaaagtagggcaggccggctgtttaaaattagtccggccctccctctcactttcaggcgcgggccgatgggcggcgagtgtccgggggtgggggcgggagcggtgactcaaagggcttttacacccgtgcagcctcctgcgctctgcggatcccgggccagaccgcttcgcggggactcccctcaccccgtgaagtctctcctcggccggcactcccatactcccattgacctacagggtcaagccccaatccagcttcctgacaccgcaggaaacctctgccacctctagtagtccgcctcgggcccgcccctcctcgtggtcccgcccccacctcacctgaagcaggtggaagctggtccctccccagctccgcctccagggtccgctacagcccaagcggctaccgtcactctgaccagggaagccaccctggcagaccgacggcgagtggaactcgagcacctccccaggtgcgcctaattcgaagggcagtcagaatggcggagccaagttcctggcacccctcttcagtttcccctcaacttgagaggggactcccccgcaggcggggcagagtggaccctgggaccccagcccaagacttttccggagaagaacactcgctccagcctcttcccgcggagcacctcccaccagttttcatggcgcccaccctgaacccccgatcgccccaacctttctccggcctccctcaccttgagcggcgctcccagcaggcggtgcaccgcgggtatctgcgcgcccaagggcagcgccccgtccaggctgcaggtgggggcccggcgcggctccggaaagttggcacatgcgaaggggtcggtgtcttccaggtactgcaccctcacggtcaccactgataccggctctccgtccccgcggtcttccccgcccgccatggctctgcggccggctcacgcagcgcgcctccgagtcccggccccagtgcagcttctactcaaagcacactgtagctccgcggttcgggcccggccggaccggacgcggctggaggggcggggccagacggaggcggggccgaggaagggggtggagccaagattagtccccgagtgcgcgccaggaggtaaccactgccggaggcggggccgccgctagccactcacagggcccaatgggaatcccgttagttcactggctaggagggcgggaaaaaccgagctcgcgccccaccttcgagaacgcgcagaaggcggggaggctttctttggtctggggatagtgaggctgcgttctctttgaggggtgttagggcagatggggcagaagtttctttagatagtggccggccaggtctctctcagttgagggacaagatagccctcattccttccatttgaggggtgagtccctgtggtttcctcatttagggaaagcagtgagagggggtcccttcaatttggagcaagaagtgagaataaattccacccagtttgaaggaagaggtgggatcagttccctttagttgtgggaggaagagggaaggatgcccttcagttttctgggaaaagattgggaggagtcagtttgagggggcagatagaacacgttcccctcagttttggagaaaaagtgggatgggtgcccctcagcctgaatgaaaagtggagacggtcctcctctgtttggggcgctatgagccgaatgcccctcagatttggaaaaagttgggtgcatctcgcctagtttgaagggaatcagtaggctgggttttccataggttcctgtcagcttcatcaaagagatgagacagttctctgtagtgtgactgaaagggagggccaggtgccccttggtttgggagatgaagaacagcctccctcttcgcctggcacgagctgggccagtctgggccttagggtttctgggacgttgggggcagcgttgtccgtcactgctttggggagcgtccagtgcgcgtgcgcagctcaggtccgggtgggggccggcagggggtcctgggcttggcaacgtgggcggagggcggccaagcacggtcccctgcgttttgcacccggccgcgccttggtcccaggggggtgctgctcgccgcacagcagcgctggccgaggaggagccgtgcccctcccgtcctgaccgcgccccccgcagacccccgcccttcccgctgcgggctgccccaggggggccgtggccgcgcaccgctctggatctggtgggggcggttttggggaggtttgggggcgcggactcgaaggagtaggttgtggaacttgggggagagctgcactggggaatttccggagctgggactgatttagggaggaaagaggagagagtccccgactacgagagtccgaggcagggtctcggagcctggacctggcttgggggtatcggagccgggattggggggagcgggccccacgtgcctgtgacgcgggggcgcccggtaggtggcggcggcgacgcggggccggcggccgtgcggtgccgggagggcggctgggcaggcggcaggatgctgcgcgccgccctgtccctgctcgcgctgcccctggcgggggcggccgaagagcccacccagaagccagagtccccgggcgagcctcccccaggcttagagctcttccgctggcagtggcacgaggtggaggcgccctacctggtggccctgtggatcctggtggccagtctggccaaaatcggtgagtgcgtgtgtgcgtgcgccaggccgaccgccagcggcggacccgcccccaacacccccacctcctcggtcctcagattggggctggcttcttgcacggtgctgggacttaggtttggattccacaaatccgggctctcgcccagttcctgcatcgcttcttgtgggtcccaggtccctgtcttctcccctgggagctctgaggatttgcctttctgaagggctgtcccccgctctccccaactccatctgtaggctcctttgccctctccgctcccctcttccccttgcagtaggccctcttcagtctggtctctccc

SEQ ID NO: 1242893 - DNA, 4001 bp, Homo sapiens
tcagcagtttgggaggctcaggtgagagaattgtttgagcccaggagttcgagaccagcctaggcaacatagtgagacctgcccctcgcccccaccatttctactaaaaaaatttttttttaaagctcctggatgactccagtgtctacccacctcccacctacccgcaactgaaccatgagcgttggaggtgcacttgcctcagacatgaaccactatggtgacatcacaggctcagtgggtgcacacagacattcctcctgaagaggttgaaggtggcagagatgcccagataattaaaatttactctaaaaatgaacttcacaatctcagcaccgttggcattttgggccggatgattctgctgtgggaggctgtcctgttcagcgtggggtgttcagcagcaaccccggtctctacctgccagatcccactgtcatgccctaccacacgttgtgaccaccaacactgcagaacgttccctggggtgcagaattgcccaagagccacagctccaaagcaacttagaaattagagcgcacagaaagggagagcttggccaatgagacccccccagcccggtattccccagtcaccctccatcataatataagtttatttactccttcccacagcctaatgcatcctcaaatctctctccctctatgcctgatatacccatcttccctctccttcccactcccaccaactcaggacatgatcccttaccacgacctctttagcccaagccaaagcctctgaacgatcttgccagctttggcaagcagccactccaattctccacatagggtgctgacaggtcactcttcctaaagcttaactttcagcatgtctctccccaattaaatcatctccatctccagccttagtgcatcatcagctgggcgtcataaacactccgcaatctagccccaacctcagccttgttccttccacacgtcccgccagtagcacttgggaaaggaacaagagaaacatgatataatcacacgagaaaatctagatcaagccctggaaatcatattggcccttggaaagcagaaatatgcaaataaaaataagccatttcgttggaattggagtttgcacatgattatctgactatgggagttcagcttccagtacaaggaataaaggaacaacaggcagggtttagagcgagggtttcaactacgtcagacccgttatgtgcaggctccatgggttagcagcagccttttggaacggggtggaagagaatggaacggaatttaatccgaacagatccagctgcgtcatgtgagcttaaacaagcgtctccctttaaacttgtgcttcagtcatccagacccacaggcacagagtacacgcgtaaaaggcatttctcagtgtcggctgtgggtcaacaaagttcgaaagccgtcaccggagatctatagggtcagaagcgggagcggggtgcgtcccgacccgcaaaagtgcaaggtcactgggaccgcccgagctgcaaccgtgggacggggctgatgctgcgggtccaggaaggcagcgctgggcggggcagacaccgccaggaaacggcggacgagtgcggggatccttgatgtgggggtgtcgggcttaggccaggggacgggggggtggggatggaggggcgaggagcaaggagggaatcgcgggagaccccacaggaggcggcctgagcgccgggacgcagacccctccccagcacccgcaaccctcgggacccccgggagagccgggctgcgggcgcgtccacgccggggacgcgggacattccccgcccgcaggggcctgtcctcaccgacggcagcggggccctccctctcccgcgacagcgccgcggcggatccttcagcctctgccgctgcagcagcgagcgtcgaccccgcgacccaggccgccgccgccaccccgacccgggcaccagctcccagccccgacctgcccctcgggagcgagccccgtgaccgcgcgcgcgaccccgccggggagccggccttgcggaacgctcaggcgcgctacttcagagcatgcgcagcaagaccgcgcggcccgttccttaggtaaaccgctgctccgggtcttccctgcgcggcgccgagccgcaggcctggcctgtcagcgcatgggggcggggacgtaactcacggaaaaggcggggccatcccgagattggacggcggcgtccaggggcggagctaggatgggggagctgaacaggacgctcttggcgtaaaggggctggggtagggggcgcttaattgagaccccaggacggtccccagtatctgaggctgcccgcaggaaacggagcgtttgctgagatgcactcttgggcctgtcagtttcctgaccccgtgggaaggcgattctcatgcatctcattgacgcccccagtgaccctaccccagagcggaaccagtgtgagattcaaataaacagcgatagcaacggattataaccttgactacgatatgagtccaaactgaaggaaataagtcaacgggggagaagggacagttgtttcttacatcagaaagccaacaacgacaaaaaaatacctgggccgggcgcggtggctcacgcctgtaatcccagcactttgggaggccgaggcgggtggatcacctgaggtcaggagttcgagaacagcgtggccaacatggtgaaaccccgtttctactaaaaatacgaacattagtcgggcgtggtactgggcgcctgtaatcccagctactcgggaggctgaggcaggagaataacttgaacccgggaggcggaggttgcagtgagccgagacggcgccactgcactccagcctgggcgacagagtgagactgtgtctaaaaaaaaaaaagcagaaatattacatagtattacaaagtctgcatgacgtgtgatgtaacacattgaatgtagaagcaggtatgagagccagtagtcttcttttaagcccgcaacaaagatatttgcaaaaatgtataactatgtcactcgtctcactaaatttctttgggaaaatattgtactttttcataaaactatgttaacacaatcagcttactattttttggtaagatctttattgaaatataattcacataccatgcatttctcccatttaaagtgtacaattaaatgatatgtagtatagtcagagagttgtgcaaacagcaccatagtcagttttaaaacctttcatcactccaagaagaaacctttagccaccaccctccaatttgctaatcaccccagccctaagtaatatgatctattttctgtctttatagatttgcgtattctgcatatttcatataaatgaaatcatgcaacaaatatgtggtctcttgtgactgacttctttcgcctagccttagcatagcactttcaaagttcatccatgttggccgggtacagtgactcttgcttgtaatcccagcactttgggaggctgagacaggagcatcgtttgagcccaggagtttgagatcagcctaggcaacatagtgagactctttctctacagaaaaaaagaaaagaggaacaagagaaaattagctggatgtggtgatgcgctgtagtcccagctactcaggaggctgaggtggaaggatcacttgagcttgggagctggaggctgcagtgagctgcgctcatgccactgcactccaggctgggcgacagagcaagaccctgttcaaaaataaaatagtagcagaacttaattactttttttttttcttgagatggagtcttgctctgtcgcccaggctggagtgcagtggcacgacctcagctcactgcaacctccatctcccgggttcaagtgattctcctgcctcagcctcctgagcagctgggattgggattattacagacagttgccaccacgcccggctttttttttttttttttcttttttgagacggagtctcgctctgtcgcccaggctggagtgcagtggcgccatctcggct

SEQ ID NO: 1242894 - DNA, 4001 bp, Homo sapiens
cgcctgccaccacgcctggctaattttttgtatttttagtagagacggggtttcaccgtgttagccaggatggtctcgatctcctgacctcgtgatccgccctccttggcctcccaaagtgctgggataacaggcgtgagccaccgcgcccggccgaaatgtacactttaaatgggtaaattgcacggtatgtgaattatctcaataaagttgttaaatattcagaaaaaggtaaattgagtctatgaacatatgaacagcagttccccaatgtcactatccctaagaatcacccggagttttttttttgtttttgttttttagacggagtatcgctcttgtcggccaggctggagtgcagtggcgcgaccttgggtcactgcaacctctgcctcccgggttcaagcctttctcctgtctcagcctcccaagtagctgggattacaagcgtgcaccaccacacccggctaattttgtatttttagttgagacggggtttctccatgttggtcaggctggtctcgaactcccgacctcaggtgatccaccctccttggcctcccaaagtgctgggattacaggcgtgagccaccgcgccggccccgactaatttttgtatttttttttttttttttttagtagagacggggtttcaccatgttagtcagaatggtctctatctcctgaccttgtgatctgcctgcctcggcctcccaaagtgctaggattacaggcgtgaaccaccgcgcccggcctgtgttgctttaagccaccttatttgttaggacagcaacaggaaactaatacaaggttcaatccctcactgacgatgttctggacgacaggacccctgcctggtgcctcatggtggacccacagaatcatcttcatacgcacgggggagaaacatcactaatgtccaccagcaccggcatcctcagccgcgaggacaaatcccttaccctcccagcaggtttcatctgcgtaacggaaatagtggtgaatttatcaggggctgttaatagatgacaggcaagggtgaagtcatcgcaaaagttcccagacgatatggacagctgctccccaataattactgctccacgcagtccacagcggggctgttattgaccccgacaggatgacgggacactaaggtgtgcagtacacgtcctcacagggagatttaaaaaaccggcagtgacccctgccccaagaaggccaagaactgctactctaaggtgtgcagcgcggagcttccccaccatggcaatttcagccatggcagctccttcccctaatcaccagggctcagaatctttatttcactcctttacccaatgcaattggcatcaaacgcgggctgggctgcgcccaaatggtcccagctccccggctctctcctctctcaagaatacccacaccctgaggccccgagtgtctcccccgccccagtatctcacgcctccaactcgctgccgtccctgcagggacctcccgagctgcaaccgtgggacgaggccggcgggggttggggggtgccgggaaggcagcgctgggcgcggcggacacggccagggaccggcgggcgagtgcggacctccttcgtgtgggggtgttgaggctttggacaagggactggagggggtggggaaggaggggcgagaggcaaagagggaatcgcgggagaccccacaggaggcggcctgagcaccaggacgcggacccctcctcagcacccgcagccctcgggacccccgagagagccgggccggggactcgtccatgccgaggacgcaggaccctccccgcccgccagggcccgtcctcaccgacgacagcggtgccctccctctccggcgacagcgccgcggcgggtccctcagcctccgcgccaagggccccagcctcagctcgcgctgttacctcaagccggggtcacagcgcgagcatgcgcagcaaggccgcgggtgccctgtcttctggctggggccgctcctccgcgtcttgcccgtgcggcgtagagctggcgtccggccaatcggagggcggaggcggggccaaaattcagtaagggggcggggacacccgggattgagtgtcgccgtcaggggcggagcctcgggggacctgcggcctggatccgggttgcgggcgaggttatcccagcaccagtgggttgggcttcactgcgacccccgggcttcctcacggatttgactccggctctctgcggggaaaactggagcatttgtttaaaggttttgctctcccccgtcgcgataccgagcgtgcggagggaaggtgtttaggctcatggaagccactgccttgctttaagctctgcatccttgacgacgcagcagcctcatccgcgccattggtccagccctcgtctattagtttagcccctgcccattggtccagccctcgcccaatagtcccgccctctctctgtagttcagcccctgtccattcatcctttctcgttattggtccagccctggcccattgggcccacccgtgcccacgggccccgccctctccgtgcccaaccacgttcacccggcccaaggggtgcccgggacactcgccatcctccagccacccactgcagtgggactgggctgggtccgggcacagggagctgtggggccctgggcgctgctttcctgggacacttggctgcagcgtccagagcggcccccgcacagccccctaggctcaccgcggctctcccagccccgcggggtcgcccccactaccccggccaccttggtccccctaagcctggctccgcgccccgcccccctcgctctaaagcggccgctgaatgtgccaccgccccagggctccagggtccaggtcgagatcctctggggcctcccgcaccttccgccttctcacgtccgaatgccagcgtcgctgcacgcccttcctctgccctgcccctcccggccctggctctgcaggtctctgaatcccaccgtggactccgctaccaaggctcccgctgcccccatcccactatcctatctccccgggcattgtctggtgtcattcaaggcctttgtgctttttttttttttttagaaacgagaattgcgctctgtcgctcaggctggagtgcagtggcgtgatctcggctcgctgcaacctctgcctcccgggttcaagcaattctcatgcctcagcctactgagtagccgggattacgggcgcccgccaccacgcccggctaatttttgtacttttagtagagacgggtttcaccatgttggccaggctggtattgaacttctgacctcaggtgatccacccgcctcggcttcctaaagtgctgggattacaagagtgagccaccgtgcccagctacctttgtgcatttatttgctgttatctattaatcattcacagactactggttgtttttaacttgatgatgttataaatatctttgtatatgaatctctgatgtcaaagattttttttttttttttttgagatggagtctcgctctgtcgcccaggctggagtgcagtggcgtgatctctgcttattgcaacctccgcctcccgggttcaagcgattttcccgcctcagcctcccaagtagctgagattacaggcaccggtaatcatgcttaatttttatatttttgtagagatgggatttcaccatgttggccaggctggtatcaaaccggagttacctccggtgatctgcccacctcggcctccaaaagtgctgggattagacatgtgagccaccttgcctgtcgagatattaaagattttttttttttgagacagagtctcactctgttggcaagaccggagtgcagtagcacgatctcagctcactgcaacctccgcctcctgggttcaagtggttctcctgcctcagcctcccaagtagctgagattacaggcgcctgccaccgcacccagctaatttttttgtatttttagtagagacggagtttcaccatcttggccaggctg

SEQ ID NO: 1242895 - DNA, 4001 bp, Homo sapiens
atgtctcatcagcacctcagtggtggattaccaacccatgcctcagttgccttctctaaaataatgagctctacctctcagagatagaaccaagtaagaaggaaaaacgtgatcgtgcttaaaaaaggtaaatgcccataaaatgtaaggtaactggctggcaaacaagttttcaccgggtttcttttggaggtccatagcattttacctttccctctattatgcttagaacactgcgccatcaaaacttcttcggaaaggtcttaacctcgcttatatttcaagagtaccttttttattttattttttaatttgtttttttttttgagacaaggtctcattttgttgcccaggctggagtgcagtggcaccactgtagctcattgtcacctctatctcctgggctcaagctatcttcctgtttcagcctgtggggtagctggaactaccacaggccactatgcccggctcttttttttaatttttattttttaaataaagatggggtctcaccatgttggccaggctggtcttaaacttctgggctcaagcgatcctcccaaagtgttaggattacaggcatgagccactgtgcttggcccattccaagtgtacctttaaatcctctgaaaatgtatgcaatattacatgtgatgtgtatttccctgggaacagcatctgtagactcgtgaagtctgttcttgtggacagatgcatgcctgttctgttttatgattgttcaccagccctgtccccaaatacacacttttatacacgtctcctccctaaaatatctaagaattactagtttaaaccctgggttccctgcaaagtggaactggttttattttttggacagcaatcttgctcagtgattaagacctggcgctccagtgcgtcacaactaggttcccatgctgtgtctctttccagtgaaatcactttgagctatttcacttctcagtacctcgtttcccagtctatgaaatgggcatagggttgttacaatcaggtaacacacaggctgagttgagtagtgcctgacacatgaggctcaatgataactattattactattacttgtctggacatttgcttcaaagtaaacagcgtacaaatgtcattaatgactcaaacataactagcttagagtatcttttcctgaaaagacaggagaatggccaggccagcaaactttttgcctctagtttcttctgatgaaaaaggggccaggcgctcacacctgtaatcccagcactttgagggggccaaggcaggaggatagcttgagaccaggagttcgacagtaagaccccgtgtctacaaaaaatacaaaaattagccgggcgtagtgaagagcccctgtattcccacctgctctggaagctgaggtgggaggatagctggagtcccggagttcgaagctgcagtgagctgtgatcgcgctactgcactccagcctgggcgacagagagaccctctctttaaaaaaaaaaaaaaaaagcaaggaggggagggctacttaacaggttgttgtaaggacccaacgagacaaccaagcaaattgtttagggcagtgcctaacccaataggggttgtgggaattgtagtcatcagccctgagtgccaagcctggtccaagtcctccagcccccggcagggtccaagaagatgagccaggggcccaagatgcaggcctgtaggcctcttagatgcctgaagattacgcaactcctcctttagctccaaactggcttaaaactcgccagtgggcaacctcttccccataagagctccccgcgcacgggccaagacagcagccagacgctccccgcaggccctcacaccgaagaatgacgcctgtaaaagccaacccatgtgttccgcgcgctctcctcccatcccatcctttccacaagatgaaggcccgacgcttcccatgtggaggcctccctgctcgcactcaccagccttcaactctgccacagtcgccatttttcaacggccgccagggccgcaccgcggccctgcgcacgcgcagctccgccccactcaccctgcggcgtggtctgtagccaataggcgcacagctctcgccccgcccacttccgcccctctcagtttatgagctctgcggttgagtgggtagtgaatgtcgaccagagactccaccaatcagcgagcgctctcggaaggcccagttgagtgagacggcagggagggcggggactgaggcagtggagagccctgtggggtgctgctggcaccttagtgcttaactttagccagctgagtttttcattgtctctgcagcctcaagtaccaactgctagtagttaccacctattaaccctgcggttctcaaacttgagcatgaatcctcatcacctccaagacttgtttaaacggattgtttgctagtcctccccatagagtttctgattctgtaaatctggggtgaggccctaggatttgcatttctatcgagttcccaggtggtactggtactgctggtcggtctggagatcacacctcgagaaccactgtattaagcacttactgtgacgccttagcgcattatttccttatgatcacgccgtttttacaatgaaggaaacagagtcctccatcgctgaagagacttaaccaaggtcaccagcctgtcctcttccactcgcacttacacagtgcatgtaaggagtccaggagctttttatggaactaactaatgaaggaataagctccaacatcccatggaagtaaaggaaaaggaacaggggaataatgtaccctaaactgagtgtgaggttgcatgattccagttgtaatgccggtgagatccaaacacttggctaaataataaacatcgattagacgtacacctaagagtggccgggcgcggtggctcacgcctgtaatcccagcactttgggaggccgaggcgggcggatcccgaggtcaggagatcgagaccatcctggctaacacggtgaaaccctgtctctactaaaaatacaaaaaattagccgggcgtgctggcgggcgcctgtactcccagctactcgggaggctgaggcaggagaatggcgtgaacccgggaggtggagcttgcagtgagccgagatggcaccactgcactccagcctgggcgacagagtgagactccgtctcaaaaaaaaaaaaaaaaaagtacacctaagagctgccagggcacggtggtttacgcctggaatcccagcactttgggagactgaggtaaggagttcgagaacagcctggccagcctggtgaaaccccctctgtactaaaaaaaaagtacaaaaattagccgggcgtggtagcaggagcctgtaatcccagctacttgggaggctgaggcacaagaatcgcttgaacctgggaggcagaggttgcagtgagatgagatcgcgctactgcactccaacctggacgacagagcgagacaccgcctcaaaaaaaaaaaaaaaaaaaaaccacctaagagcaaggaaacctctttccgaggaacttccagcatacttttggttccatgcctattgtttttaaaactgatacattggccaggtgcggtggctcatccctgtaatcccagcactttgggaggacgaggagggaggattgcttaagctcgggagtttgagatcagcctgggcaatgcaagaccccatctctccaaaataaatacaaaaaattagccgggcatggtggtgcatgcctgtagtcccagttactccagaggccgaggatagaggattgcttgagctcaggagttctagaccaagctgggcaacatgagacgcatttctacaaaaaaaaaaaaaaattagccagatatgatggtgcatgccagctactcgagaggctgaggagagaggatcacttgagcctggacggctgattgtaccactgcactccactctgggcgacagagtgagtccctttctcaaaaaaaaaaaaaaaaaaaaaaaaaaaagaaaaga

SEQ ID NO: 1242896 - DNA, 4001 bp, Homo sapiens
tatattatctatagagacccccatacacctatggggacccctacagaaagtcactaggggctcgctatgggatttggtccataacttaacttttgaaagctcaggtcgagcacagcacagccgtcctggtaggggagggggattttaagatcaatactcattttgttgggctgcgtccctttggaggggtttcctgggatcccagaaacggggcggcgaattaaagttacctgcgctcttcacagacggctgggggctagcgtgcccgctctctgctcccgggtctgagaaaaggttggtggacatgttttgtttcttttttgcgtctctgcagccccttaattgtctggttgggtcggggctgggaagcgaagccggagcgggccggggaggggaggtcccgggacacgtcagtatttcgtgcagtcgtaggagtagggggctgcgtggcgatagagaggcggcgtggatctgtagggcagctggcagctggcattgccactcacctgggactccccgagggtcgagttctcaatccccagccggtgggagttgaacatctcccgcacgttggggaaagtttgctgctgggccgcgaacgtgtggccggggaggtggttcaggtccccgctgtggttgagataccaggaggccgcctgcgccgcggcggccccgggctgcggcgtcggctggggctggggagccggcgggggcggcggcgcctgcgggtggtggtggccgtggtgctggtggtggtggcccgtggcggcgagcgcgccctcctggccggcggcgaggttgagagcgctcaggggcgacgtggggccgctcgggtggtccgagagggcctcgtccagggcgggcgggacgcacatgtgcgccggccgctcggccccggtgtacaggctcatcgctcgcatgctgcactggtagcccccggcggccccggcctccaggccctgagcgcacggctggccgtaggcggcgggcggcgcggcggcgtagggcagcgccagcggcggcaccaccaggcccgcgcgtccggcccccgggctcagctctccgcccggcggcgacgttcgcagggtcatgatgttctccacgctgaagccaggcagcccgttgggcgccgcggcgtggtgctccggcagcgagccgtcgggggagccggcgggcgtggaggccgcgctgcgcgggctgccctgcagcgcgctctcggggctcagcgtctccaccttggtgatgaccggcagcgccggggacgccgcctcgctcttgatcaccaccttcttctcggcctccttgggggcgtccgctaggtggggggtggccggggcgcccttggacgccgccgggggcggctccttgaggtgggcccgctcctccttctccttggacacgtccttctttttgaagcgccgccggcgccgcaggaagctgccgttctcgaacatgttgtaggagtccgggtccagggtccagtaactgcccttgccgggcttcttgtcgtcgcggggcaccttgacgaagcactcgttgagcgagaggttgtggcggatgctgttctgccagccctgcttgttctcccggtagaaggggaagcggtccatgatgaactggtagatgccgttcaaggtgatcttcttctcgggcgcgttctggatggccatggtgatgagcgcgatgtagctgtagggcggcttcaccaggtccttaggcgccgcgggctggtggtggtggtagggcgcgtaggagcggcccatccccgcgctgtactgctccgggtggccggaatagacgcccatggggctggccatgccgccgtagctgcccgcagcccggtagtaattctgctcgctcaggtagggcaccactcccagggcgttggggtcggacacggagtagcgcgcctgcatgctgcttccgagacggctcgccggcgccctcgcgcacggactgcggccgggggagcgaggggggccctgagagcgagagagcgcgagagagccagagggggagaggaggggagcgggaggggcggccccgggctcctggcagcctccggggcgagggtgcgcgggcggcggcgctcgggccgagcaggggcgcgcgctttcagcggaccgggcggatcggcatcctggagggcgcgccccgggcaagcgcagcgccggccccgctcctcgctggctccaggacccggcggcggcagcgcgggcaggcgggcggccgcggacccagcggagacgccgcggcctggggacccaggtggaccctcggcccgcgcgaggaggggcgcaggaggctctccaagcccccagcgaatcggcagccccgagggtcagcgcgccggggtccgagcggctgccccgctgagcccagaaaaagaggccaagtcccttttagggattgggaaaagtttcaaaagtcttcttgctgaaagcgagtttttactttcctcgggccacgccccctcccggaactttgagccaatcacccggcagctgagaggagtcggcgccaatcggggcgaggagcgcaggaatccgtcggctctaagaccccgccgccccggcctccgcggcgactccgtcttcacttgaaaactttttaaaaagttatatcttattaaaatttattttatgatcacattttggtgaatgggcccacatgcccaaaacaaaaagatagccactttcctctgttaaaaaaaatcaatttgaaatataaaatagaatggattaatagagtaaaatatctctcccaaagaccttgtaagtagcaatgatcctgggacatttttcttattaatgagtgatgaagcgaataattagatttcctaattatgggggcccaggtgtaatggattcaaagcaaacgcgctggattggaatggcagggcctctcctggatgttatacttatttaatcaaataattaatcatcaacagggagtttccaggctcggggtcgtcaaggataacctatcgaggttttagaggtaaaccctacaaactgagtttccctcgctccccgccgaggagccaggcagcggagtgcatagaggggaaggtagcaacgtgctgactgacaacttaatcctccgaattcgcggggaattcggtagatcatccgcgtcgctgcgagcagttttgtggggtttggggaaaagggtgaagtgactctgctatttccccctttcgtctcccgcgtggacactcgcagcctaccaacttcagcttcgaaactcgtctcccttttcccaggtagaaattccctctaacaagctgaccccgcactcccagaagaccgggacaatgcagcgacccacccgggccaggcagagccgagttcctgggccctgcgaggagaaacccgagcctgttttccgcgggggcttggctcgaaggcgcgcgcaatgagcgccgcgcaccgcgggcaccaagcgtggacgtttcccgtggcccaggccggcgccggccgctaacaccgaccctagggcgctgtccctgcctcctgctcctggcaacgtccccctgggagcctccaagttgcttttctatatttcagccttttttttgttttgttgggtgggtagggtgagttagggagcgcgctccgtgggaagactgggtgagcggttgattgcaaacggttcaagatcccttcgggatgatattattcggcaggcagacctggagcgacttggatctccttcaaggatttctccttccctctaggaatcccggacagtttgtttatttgtggactgattatttattccttccacacctcaataatcagatccccttttcccactttccctgaaggagtgagacacccctttaacaaggctaaacacgggcagaattttggaagttgctggtctggttgggcagggaagagggcttcagggagaacatttgtatttcaggtttccttgcacccttcctggctgttcatcggctgcgtattcgattctcagcaaaaggatgttgagac

SEQ ID NO: 1242897 - DNA, 4001 bp, Homo sapiens
ggttgaaggagaggccagtgcagggccagcgccgggccagcagcaggggtgagaagaagcttctccagagaacaggccccggagccggggagtcccccgcagagaggctgcctaaggcctccaggcctggctcctgcctcctggggctgctgacagctgaccctggactggccctggcaagctcactccagctttttccagagctgggcctgcaggctgcggggggcctggggcagaatcaggaggcgaggctgctgcatctcccttggcagatgcttctgcatgttcggggtattggggtatcaggggtgttgggggtgtggggacctgaaaacttggatcctaaaaaacaaggagcccccatggcccggtctgcagctctgaccctccggggcctggccacggcaccctcctgcctcagtcaccacaaaatgcccctggactcagctgtgggtctgccaggtctggtcccctgaaaggccggggctgagcctctgagcgctggcccagcggctttgggcctaacaccttccgttccgcccagccccaggcagaggcagccctccaggcagcctgagggccaccaccagggagggacagccatctggccagcgctgggagccttgggtccatcccaggatctttccaagctgtgaggggacttaagggacacaaaaggacttagggcactggggtctgggacatctggctcaggaccagcctacctggtcaggcctggagcagctggcagctggagttcgaacagaaagagaaacagattggcccaaactagggtcaagagcggtagtcactcttcgaagggggagaggtggggccaagagacaccttggggagctggtgcctcccctcagccttggggttccgaccacagaagtggaggggctcgccccagctgggtcccgctgccactcagactcgacttcccggggaccagggcgccctcggcctccccactcaccttgcagctcggctggggcgttgtggctgttctggtgcagatacggctgctccagggagtgcgtggagaggctgccggacagggggttggccgcggggttacagggggacaggggctgctgcttgatataagaggcgccgctgttgagcgccgcggacgccgagggcggccaggccgccgccgagcccgagtagacggcgtgcggctccatgaccccaccggcgccggtgggcagcagcggggaggcgggcaccgagctgtcgtggtgcgggtactcgccggccgccgcgccgccgcagccgcccatgtacgagtggccgccgttggaaggcaggtggggcaccgagtggctgggcagggccatgccgtccacgttgcccggcaagtggccgttcatcatgcccaggccgccctccagcgccaggctgttgggcgggcacgagaggccgccggccgagccctggaagccgtaggtgtccgggaggtggttgaagccgagcccgttcatcatgctgtacatgggcttgagcgcctggcatttccttcggaagccgcgcggccgccgccgaaaggagccctcctcgaacatgaactcgctggccgggtcgatggtccagtagtggcccttgccgggccgcccaaggcccttgggtagcttgatgaagcactcgttgagcgagaggttgtggcgcacggagttcttccagccctggtaggagccccggaagaaggggaagcggctctgcaggaactggtagatctcgctcagcgtcaggcgcttggtgggtgaactctggatggccatgacgatgagcgcgatgtaggaatagggcggcttctccgggcgccggatgccggcgttggtcttcttggccttggacgggccggacgacgcggggtccatggccgcgccgcctcccccgccgccgccgccgccgccgccgtgcggtggctgctgcttctcgggcgccgaagacatcgggtggctgctgccgccgccgccgctgccgccgctgctctgcgccgcggacgggccgggaggaggaggaggaggaggaggaagaggacgacgggggggaggagggcgaaggggagggggctgcgcgcgcggggctggctgcacctctgccgtcatcggcggccacttctcccgagcgagccgcggcgcgcccgcccccgcgctcccgcccgccctccccgaggagctgctggatccgccggcggttggctcagagcccctctctctccaactcccgcctcccccacctctctcctccctctttctttctcgccctcccacaaggaaaggagccgagctgaggccgagggcagcccgggcgaaggccgtgaggaagctacccccgccggtattttttggggggaggcaccacctccaggtcttacggccgtgcgccccagccgggagcagccctgagtccccgccgcccgcggcgctcggctccgagattccgggcgaggcagccttcactccatctccgctcggctgcgtctcgcgggtcggcctaagaccctcccggagttccctccctccgtccctgcccccctcgggcccccgcgttggtgggcgcttaaagagcccccactctcgccgccccgcggccgccagcagaatccgccccgcctccaccaacctggcgagcaagtgttaatgcgccctccgcccgcggttcagccccggtgcgcgctggaccccgccttccccgcccgggcggcgcggcgggaaacgctccctgggccggggccttccccgacgcgcacagccctgtagcaaatcgcaagtgcggcggcctcccggtcgtgaccatcgcaggcacagccggctcgactccggtcctcgcggccggccggctaagttcccgcgagggaccgcctacccactctccccgccccgggaagaactgcgccgctcccgggatttttcggactcgcccagcagcttgcgagcgggcgggcagccgccggggcagagcgcaggcggaaaacgaaagcgcagcacgagtcgcggccgctttgtctcgggcgccgcgggcctgacgggggcgagtgagaacccgctggcccagaggcgacccagaccgcacaggcccctgaataagcggcgtgctcagtcactcacccgtgcgcgcacaccctcgcgctcttgtccacacattagcacacacatacatgtcttgatgcacatgcaaacccggtaaattacgcaaacagacgtgtaaacacacccatgcgtgtgtgcacactcatatgcagagggcgctcaggcatgtgcgcacccactaatgcactcgttgacacggaagcttaaggcccacaggagcttaagttcgcactcactcccactcacgcgtacacacgccacgctcggatctgaactcacacgtagttcagttgccctcccccacccccaacacacactgaaaacccgcctatttggccccgcggccccgttttcaaagcgcaggttccgatttcccgagagatggcaaaggccctggcaggaagtttacagggtttaacgtaaacaagttctgggggattctttaataataataatagagaattccgcgtgcgcagggcgggaggggggagttggcctaatgcccctgtgggctcggcctgccgccgccgcggggcctctgacactgcgcgccaggccaggttcctgagagcagacagcgcgggctgggagcgccggcaagggcggccctcgcgcacctggctgccagcccgcagggggctcgcacgcagacctgcccttgccacctcagcgctcgggtgcgggctgggggcggtggagccacgaaaggtggtgccgagagcggagcgcaggacagcgcaggagccccggcgcatcgcggcgcgcacagacccaggtgagtgctgctctcgcagcgactgctggccgggcgcggcctctccctccagggttccgagttgagaagaggggggcgaggggtgttttcgcgggtcatcgcgaagagcctagaggccaagccccagc

SEQ ID NO: 1242898 - DNA, 4001 bp, Homo sapiens
aaaggtcaatgcttagagtcaagtatttatgcaaagaatgaaacatgttctttttactacccagaaagaaattaagagaaaaagtctctgtttaaaataaaagtgttattgctctgggtggttatcagcttctatagctgaacattggtcataaatcctcatcgggccctacatctctcagaaaacctgaaaacccggggtcacccccggcacctccacaacttcaagtcaggaacaaacccagctgtgaccacccaccacccagatgggctcaaaaccaaggcctgagccacacggcaacagcgaagcaggcgacggtcatacgggggtccccggtcgaaaggacctcaactgcacctgtaaggcctgccttgggtggtctgcgggcccttgcatgcccgggactcgcaggacctgcggtgggcggctgaagaccacactccattagacaggtcaaacgtcaaggaatctcccgcggtggaggtccctgcagggcccacgtgcggtgcccacgaccccgcggggatcttttaagtctccgtagctgctcccagttgctgggaaaagtttgcttcggagaaggcaggcgagcgcgcccacctgcgcgcaatggttggtaacacttccctgaacccacaggccgacccaggcaaagatcattttaaaatcctccgccggtgggagctgtggcctttcgctcagcggaggctcaggctgggccgggagaagaaccgtgccattgtttgctttactggaagtggagtaccgtgtcgggaacctgcagggggaaataagagaggaaggggatcccgagctggtaaaagccgccctggacatgcgggtcgagcatcagggaagcgttgaaaggcggacggaggctggaggaggcggccaggagcgaggcacccagacggccgccgggcccaggcttggcaccccctaggagttcgtcccctgaaggcggcttctggccctgctttcccgccaggatgctgtctatgctgaagctcttggacttgtcggagctcttcggagagctgcgggaggcggggcgcagaggggaccccgggccgtcccctgtgcgcgctgcctggccgaccgccacggccgctgcgccctgggcagcgtcaccagcgtcctcgttcggggacgcggtccccggccagtggaggggcgccggcggagaggggccgtccaggaggggcgaggggcccgcgggcgctgcctgcaggcgggagattgcggggcccgagccccctgccccgctccccgcctccggctgcgcctccgcgctgcgctggtgcgtctcggcgcggggcctcttggcctccggggccccggggcccggcttgggcttcctcttccggcgccggtagttgccgttctcaaacatgtccaggcagcgggggtccagcgtccagtagctgcccttgcccggccgccctttctcgcggggcaccttgacgaagcagtcgttgagcgagaggttgtggcggatgctgttctgccagccctgccggttgtcgtggtagaaggggaagcggtccatgatgaactggtagatgccgttgagcgtgaccctctgctcgggcgcgtcctggatcgccatggcgatgagcgcgatgtagctgtagggaggcttctgcggggtctcggcccggcccgaggcagctagagcagccgcgggggcgaaggccagagggaggccgggtctctcgggaccgtacagatacagcatgggcgaggcggccagggcaggcagccggggatcgaagaggtgactcatggcaagcgagagcctgcgctgcgctccccgcaacgcaggagacccgggcggcctaggcactgcgccccgcgccgcaagggccctcccggggagccagccgtgcctctgcctctggctctgccgctctccccggccgctccgtgctctgtcccttcttcatggctttaaaaatgttaaataattgttgtaagtttgctgttatatgttgacttagccctggaaaataaattgtctatgataaacagtccttgtgttctcagcccacccacattaattaaaatttcattgctgaaaaactccaagcttttccctccacgtgtctttttgataccagccaatcggttttggggctattccttcatttgtttatagaattagtctgttgataagtccgcccacccaagttgaatcaagctgtgtttatttggaaaaatttccgggcacccaatatataaacgcactgatctgatgtttgaaatatcacgtccaccccttgacgctgtaagcacacacagtcagtgaggcaggatgtagactgcggtggctcagagcagggtctgctgagccaggaaggagaggtggagatgggggtgggtgtgcagggatgagttttacgctggcctgggggagccccataacgccagggcctcccacaaaaggtcttttcttctcccaggcttaaccggagatatcgagatgccacagtctagtaaaacactttctgaggtcctaggaaccttttagattggggcagggagagtatctaagaagcctgagtgtctgctgagaaggggatgcggccctccctggaaaaacaggtggcagacccagtaggaggtggcactctctagggacctgctctcccacaccctcccttccagggctctccggaaatcggagggaaagtggactctgggagcccagtctctctggaagggaaggcctaaggcactgggggcctggggaagagctcatggtccacagctccattgaggaaggtttcaaaataaacccatttagagaaccgggggcaaaagtaaggtcctcctgatggggccaaggttgcaagagaggaacaccataaaaggaggccgtggcagctggcgcgggaggcctggtatttgtgaatgtgggtctccagctttatattctgggctttcctgtttataacaaggagggggttataacaactttacaagtgcatgcagctggcccgtgattacattaggcatttgggaagcctgcttgctctccctgtatccacccaccctggggtgtacgcggccctccacccccatctcattttacattttcccacatcactgtttgaataaaaaatcctgaatcatgctgatttcgaagggggcctctcctccccactccaccggttagggtaagggtagaggcacctagtgtgactacttcctgtttatgaccaccccctgaatattaaaacacacacacactgtcacacacacacccacacacacacacacacattcggataactggcgtctcattgagcaaatcgtgtgagcatgtcaaagagatgagggaagggggaggatggcaggtgggtgtagaaatggcccactgccagtgggccaggaaggagggagaggcaccgagggcacttacaggggtagggggagtgtctgccgctgccacacccggctgaggatgtgagtgcccaggtagcctctgaacacggaaacgtggcgggcatcctttttcaaaatgagaaaatcagaaataacccgtgtgtttggggttcctgggtatccagcccatggaataagtagaccgcaggggagcgggtaaatttaaaataccaaaaaggaagtcgcaggaagggtggaaaaaccggcctgggtaccggcactgcctgcgggagcgacaggccagtccctgggacacctcgggcctccctccgcggccctgctcctctaacgtgggtccagcgagcagcccggccgcgcccgcctaggtcctgggggtgaacctctggccaggaggggcgaggctttgtcttttcgttaccactcgctctcacccgcgtacccctttcaaacttggggtgaagaaacctcaatgccagcgcctttgcaacccgcaggccccacagtctctggggtcacccaacctctccggggccgcgcgcccccagcaagctcaagtttggatccagttccttctccagcctcggcgctcgctc

SEQ ID NO: 1242899 - DNA, 4001 bp, Homo sapiens
gatgacactagtaactccctcacaggcaatggttatggtttcaatagagtaagagcttctttggtgcagtgattctatttcagccaaaattataatcccaacttatggcaaataataggtgctcaacaaatcttcacagaataaatgaaatactttaaaaataaacctgaaagatgagaaagacatcatgcacaacaccatgaggtgacatttgtttctttgcactgtgtagactaaagcagaagggtcgccctctttgtgcttatctttaatatattatccacatcatatgcagactcaagcatgaaaacttctggtcccttacgaaatactgcaataactcaggtcaatatagagcagattttatattttaaatccttaggtgtattgccctaaacagactcacgtgtaagatgaaattctatgaaagcaagaactgtgtctacgttatttaacactgttattcactgccaatatttgcctaacatagagtaggcagcaaatgacatgtgcaaaggccctgaagcccgataaagtatagtgaagagtgacttttaagaaggccaaagtgactggtaggcagagagcagagtgtcatatccaatggggttgtgaaagcaggtagggtccagatcatgcaggatcttgtaggcaatgtgaagttttgcctttatcctaagagcaacagaaagccatggaatatttttaaacaggtggttggcagagtaaggagaaaggaaagggacataattatatttgcatttcacgaagatcttactctatggtgtgcagaagagaatggtagttgagggaagggagagaaggtggaagaagagttaagttagggtgtagagtgagtgtaggccaatcaataggctattccaacagtctattaaaaagataatggtagcttggtccaaggtagtggagatgaaaaaaaaaaaaagtgggcatattcccaatatacgtagacaaatcaacaggatctgagtttgggaatgagagaaaggaaaacactcaatgcttctgagcctcagttcttcatctgtgaagctgggctgttatttatactccatctgtataatatctatcttgcaatctgctgtgacaatgatatgaaataatttaaatattatgcacttaatacagtgcctgacccacaataaatgctttttaaaatctctgttgccattattatggtcatcccatggaatggcaactaccagaagctgaacatcaaaggtagagaggagcaatgtagttaaagattcatatccacagcgctaaaagacacaaactgttatcagccggtcacggagacaattgttccaaagaaacacagctgactgcacagatatttcatctaagccgatctcagtcctcagagaccattatgagaaagcacagctggtatgatcacagtcatctgagaatccggtaaactgaggcacagggatggcgacaaatttaaccaaggaatagatgcagaagaaggacaaggaaatgggtatcttgcttctcatttttgagccgatccaacaagactcggcctgcatcctgaagagcacgaatttgtaacatcccctctaatatctccaggtcccttgctgacaaggccctgtcatcccttagtttaacaccgcgcatccgctcgccatcaaaccaagcccttccggttccctgatccttgctcacagcgcacgaagatctccaggccccgggagcccgacataccttagcttcgcgctctcgttcctcggcagtcggggtgcgcttcatgctgccactaaagccgccttcgccaccgcaagctgcgtagatccctcgccctggaccccgcctcctgcatgtagttctctcagcgtcctgctcccgtctggagctattctccctctgagtagaaaaaactacaactcccaggatgcaccgcggcgacacccgcgagcgccacgggatttagcacaggagaatttcccaggtccgacagctggaagagcgtagtccgctaccccgcgagcaaacaggctagagtccaaggagaactacatttcccaggaggctacgggagcctgccatgtttctcccgtgctcctctcggccagccgcccgccacgctgtcggcgctatagcaacggtagctagctgcagggccagtggcacggtgagtacccgggaggatgggggaggatgagggtgggtggaggttgctgaccctccccactgcagcgcgggccggggtcctagggtccgctctgccgcctggagaaggccctggagttggccctggagttctgctggcgtgaaagcagcccagcccaagacacctccacatcctcaggcctgaatcacaggccgccctttatccccacgtccaggaccaatttgaaatgttatatcccagccatgaaggtgagagttgatgctgctaattgccatctctatccagatcctgcaagttgtaggtccctaacacagtttgctcatttgccctggattaggagttggttggtagaccctaaacctcctgagtggtctattgtttgcttaattatatattatttgtttatcatgtgattacctccataacttgctagcttcataaaggcgggggttttgcttgccattttaatctcagtacctgatattcatttattcattcaataaatattttttctttattcttttttttgtgtgtgtgacaggttcttgctccgttgcccaggctggagtgcagtggtaagacctcagcttactgcaaactcctcctcccaggttcaagcgattcttctgcctcagcctcccgagtagctgggattacaggcgtgtgccaccacacccagctaatttttgtatttttagtagagacagggtttcatcatgttggccaggctggtctcgaactcctggcctgaagtcagccgcccgtctcggcctcgcaaagtgctgggattacaggtgtgagccaccacgcacagccaatcattcaataaatattaatgttggttcccaccctgtaccaggcactgttcctgaacagttgtgaacaagactaatacccgtctcaagatgtttatccttttttagtggagacaaacaataattttatctgataacttcagatagaggcagttgctataagagatacaagccatgcttggtggcacgcacatgtagttccagctactcgggaggctgaggtgggaggatcacttgaacccatgaattcaaggccagcccgggcaacatagcaagaccctgtctcaaaaaaaaaaaaaagaaaagaaaagaaataaacagtgaagaaatgtaaggaagactactctaacataggatggtcagggaaaacctgtctgaggaagtgaactgagctccaaagattaaggaaccagctaatacaaaggccttgagcaagacaagggtatggggggttcgaggaaagtaaagaataatgtaagtgaagcatagtgagcaaagaaggataacataagatggtgttggagaggcattgcagcattgtgcagggtttttcagcttctacactattattaacattttgggctggataattcattattatgtctcctaagcactgtaagatatttagcatcatccatggcctctactcactagatgccagtagcatcccgcttccttgttgtgacaaccaaaaatatcaccagacacaactattaatactttcaactaccaccttaagtgagttaactaatctgtgtctcagcttcctcatttgtaaagcaggaatcatttgagtaacagcctcacaaggatatggtgagacacttcattcctataacagaacacttagaacagtacctggcacatagtaagcgttcaatgaatgttaacaccatcatcatcatcatcatcattattatttttaaagtgaccttaactctgtcatggaaaactaatcattttcatacacgggcctatgtgtcaacaggatcctaaaaattgaccttttctataggagtacttcc

SEQ ID NO: 1242900 - DNA, 4001 bp, Homo sapiens
ccaggcaaggaagcaggagagtttaacctgtccctgaaggaggaaggactggaagctctcaaacattctctgagttaaagactgtcctgaagaagaaaaaaatcagggaaggcctcgggaatcaagcaaggctgagggacatcccctgagagattaacaaaaaaggtaaaatgatacaagtagctaatacatatggagtgctttttcaggcactatggcaaaggcacatcagtgtcacttcatatgacccacccaacagtcctaagaattggttcttatctcactgaagctctagacaagaaaactgtagtttaaaaagcagaaacatagctattaggttggtgcaaaagtaattttggcttttgccattgctttaatagcacaggcaggctaggcttttgttttgttttgttttgtttttgagaaacagggtccggctctgtcaccagagggcggaacgcagtgatgtgatcacagctcactgcagcctcaaactcccgggctccagcgatcctcccatcccagcctcccaagtagctgggactatgcatgagtcctgctagttttttattttttgttgagatggggcctccctttgttgcccaggctgacctacaactcccggactcaagtaatcctcccgccttggccttcctaagtgttgggattacaggtgtaagccaccatgcctggctttttttttttttgagacagtctccctctgtcgtcaggctggagtgcaatggcgcgatctcggctcactgcaatctccgcctcccaggttaaagtgattctcctgcctcagcctcccaagtagctgggattacagacgtgcaccaccacgcccagctaatttttgtattattagtagagagggggttttgccatgttggccacgctggtctcaaactcctgaccataggtgatctacctgcttccgcctcccacagtgctgggattacaggcgtgagccacctcgcccggccttttttttttttttaattaatagtttgctggagttacacaatctcaagaggtcctgagaaagtgtgccctaaggccctaaggttcttttgttgttgttgttgttggtttgttttgttttgtttttgagacgtagtctcgctctgtcgcccagggtggagtgcagtggcgtgatcttggctcactgcaacctccatctcctgagttcaagcgattccctcgcctcagcctcccaagtagctgggattacaggcatgagccttggcgcccagcctctacccactttcaatacagcctcatctgctgagatcaagttgaaatattttttagtgtcctcagccccacgctgtccaagactgggatagggttggggagccagagatagaataaagtactaagaactcttcatatgaaccttttgaagacaggtgggtcagggactgcacattttagaactttaaagaggaaaaaaaggctcacggaggactctgacttgctgccttctaaataacagaccgaaagaagttacttgggagtaaaatcgttttgtaaattacccaagagcacatcattgagatttgtgcataatactgagccctggccgggtaaactgagagaggagaagcggcctcaaagtaaaatcagagcagcgccggcatccagggccccacctgcctcagggtgaggatcctctgaggcccgcatccctcccggtcccagctgccagcaggtccggccgcaccagccgggtcgcggggctccccttggaagacccaggccaaatggacgcgggagcgtagaaacacctgtgggctcccggggcaccgcagagctcccggggactcttccctgtcaggacccgggcggcccgcgggtcgactcggtgctcccagtcagggagggtgcaccggaaagctgagggggcgcaaggggcgcaaggggcgcaaggggcgctgcggcgaccctcgcggactgacgtacctgccgtcgcccggcgctcggcggagcgggctctttaacgcgaggctgcgcgaccctcgcggtgcactccgggaagtgtagtttcacctccgcgcccccccaaggccgagcccccgtccggcaaaaaacacggtcggagccaccgcataggccagcgtgggtggccggggcagcgctttcctgaagggcagcggggctgcaatccagaagggagatgggaagggggccgctccaggacccacgaaactacaactcccagaggaccgaagcgccttaaagacagaggcccgttttctgggactccgggatccaggttaataggttaatgtgtagcttttttgtttgttttctcgtttgggtttttttttttttttttttttaacaccttctggacggcaccaggagcttccgctttcctctggagaaaaatccactgatggaggaaaaaaaaaaatcacgctttgcccaagcggaagcagctgccattcgatttgcagttggaaaggtttgcgctggtttcatcacgtggatcctttgggaagaaactttccaactccgtaatggggaggggatctgcggaccttttgggaaagttgtgaatggcagcattgattgtcatagatgacaattggaaatactctgagtgtctctctctaggttactatgtgaaaggaaaataaatctcaggaccccaaagtcactaagtcaaagggaaaagtcaagctgagaactgcatcagggaaacctacctcccattttattcttaaacaagataactacaaagataaaaaagctagatatggcctggccctcacaacttgcccactaggaaattccttgtgtgcccccaaatctgtaccctaaaacagttgtgtggaatttcagtgacaatgtaaatttatagcttatcttcacaggtgctgggctttgacagcactgaaagtcatctctcagctcacctgagacaaatgcatatctcattgcttcctctgccctatgtttattttttcttatgtaaaaatgcatattcactgagctagatgaatgcataagtgactagtcctctatccccctctaacatgtgaaaggcttatcaaagactcagaagaatgcagccatttgcctcttacctacccatgccttttaaaaatttcctctttcaggccaggcacggtggctcgcacctgtagtcccagccctttggtgaggccgaggcgggtggatcatgaggtcgggagttgaagaccagcctggccaatatggtgaaaccccgtctactaaaaatacaaaaattagctgagcgtggtggcgcgcacctgtagtcccagcagcttgggaggctgaggaaggagaatcgcttgaacccgggaggcagaggttgcagtgagctgagattgcaccactgcactccagcctgggcaacacagtgaggccctgtctaaaaaaaaaaaaaaaattcctctttccccaatatctgacctttcccctttaaatattgaagccctcaaaatcatctttggagaaaggtacagacctgtctcccaggtgcacacattcttaactttggcaaaataaacttgtaaattgattgagaccagtatctggtgctttttggtttacaactggaaaactaaactaggcacatccatgcaagacagatgctctatatgttcagtagggagtgatgttcaggacatcatgttaagggaaaagcagcaagttgtagagcaatatgtatgggaagcccctcaaataaaaaataatgtttatggacagatagtgtgtggatacacaggaacagggctggaagcgaacgcatgctagggagagactgctaagcatggggacaagcggggagaacttgagctttatctgtattgtttgaatttttcttacaagaatgtactttccaaatctgttgttaataaggagcctaaagctgggcacaggtgctcacgcctgtaatcccaacactttgggaggccaaggtgggaggatggcttgagcttgggagtttgagaccagcctgggcaaca

SEQ ID NO: 1242901 - DNA, 4001 bp, Homo sapiens
ggtgaagcaggagaatcgcttgaacccgggaggcagaggttgcagtgagccattgcactccagcctggcaacagagcaagactccatctcaaaaaaaaaaataaaaataggaccatgttgcaacaaagggcataaaattcctccatgagacactggttgagaagaggaacaaactggcgttatcagccaagtgttcttacaataaagaaaaagtgaagaaaatgcaagtttctacagagtcccagaagccttaaccattggaaaaaccaaggtcttggtggacatccacaattttctgcaagcccaattcatgtcagtgattgctctaaaacatcgcgcattcgtttcatccactctatgagaaagccattatcgccaggagtcaagagactaactctcccaacgtcgcagaactaccaaagtggcacaggtttgaattcgaacagtgttcagattgtggcctctgctctctcagcccagacccacagaataagaaagtctcaaaaaaggccattcttcactctttgaccaatcccggagatgaagtgggctttttagtgcaaagccagagaatcaaaagagcccttggaccccaaatgacagagatcatgcaactgctcgccttaggaggcgaaagtcaacaggtactcgagtccccagccctgggactccagatggttccgttttctcacctaccctgccttcccccagcgaacaaaaagcaacaaaagcgcttttgaaaagccccacttaagatacacgaacaagatcaactcatcctcccagcacaggaaacgcggcgcttcccccgcaggaaaagggaaagaggaccaggagagggtgtggcctcgggcggccgttcttctccgtccctatctcagaaaaaagaaatttagaccaggcgtggttggcttacgtctgtaatcccgacacttcgggaggcccaggcgggcggatcacctgaggtcagcagttcgagaccagcctgaccaacatggtgaaaccccgcccctactaagaaacacaaaaattagccgggctgtggtggcgggcgcctataatcccaactactcaggaggctgaggcagaagaatcacttgaacccaggaggtggacgttgcagtgatctgagatcgcaccactgcactccagcctgggcgacagaggaagaccgtgtctccaaaaaaaaaaagaaagaaatttaggcgggaaaaactctcgggccgtccccaagtccgttggtcgaaccctgaccaccgccgccaaaccgttaagctagagggcggccccgatcccgagcctccgcccccagccgcgtggcaacccaggcgggaacggagcgatcccgcccattcgcgaaggaccactgagggacaaggctcacaccggacgcgcgccgccgagtcttccgcgaagggtctcgcgacagaaagctgaaccaacacgaggcggggaaggggtacccgcgccgcgaagggggaggggcccgcagagcgcgtgcgcgccgcgagtgcccggatgcagcactgcgacaaagcgggctcgagcgcggggccgggagttgggggaggcgaggccacggagaatgggcgttttccaccctcacctgacgcttcaaacccctaagaagcgtccctcccaacgcccaccccaagcaaacggactgcaaagaaaagacttcccgccccgcgcgcgagggccagaggagcgaaacaaaatggcgacaccagcctcctccagttactcttctccgcggcttcccgccacaggggcgccaaaaaatcccacacgggatcgccgccccggtcccactgaaaacgaaaagcccagctgggaggcctcggccgggtgcgccgccgccgtcgcctcgcgcccttacctaccgtttgaggccatgtccgcgcacgcgcgcacaggcaagcaagcaacgaagttccaacaccgctgagtaccgacgcctggaggactgagcagccccgcctcctgcgtcgaagcttaagtacgctccgccgcctacgcaccgcgcaggcgcgcaccaaacgcggaagagcagggggaggcaggaacgcactccgcccccttcgtagggcaggtagagggtccgagcaggcagaagggaaacaagttaactagaatcatgcgaatactatacataatcatattttttgaggaagaacccctctctcctcggcaggactagcccacgatctatctccacccccatgaaggcacagtggtacggcctgagtgcccgctgggggcggggcgagggggcggtcccggcggctggggacgaaactggagtcacagccgggagtagcggggtggaaccgagattcctgtggccgggccccttcgctgggccccgctttcacccaggatggcgagctcctgccctccaccctcttgccgctgtatggggcgcctcgtccccgcggctccagcctccctcgtcggcagcacactggccctccctctcctgcgccctgaggttgacttcgtcgtctttcagggttgccttgcctttcggcctttctggggttcggggattatgacgtttgacctgaaagacagcagggatttcggccgggacccctgggccccgggctcgtccagcactgggctctcacccggatcctcatggctttgcccctggggagccacggggcggaacagcccaggccatccttgggaccagagagggttgacctcagatgtacggtacccagccttttctcagggacctcctttttatttttctgaagccctaccagggcgatcccagaaataaaacgtgtacaaggcttaagtggtttcaaaatgcacagataatttccttgtcatcagtcttacgaaggaagtaaagatacctccgttttctagataaggaaagtgagactcagagacccaagtaattgtgcctgattacagggcagctaagaggagtcgtgattcgaatccaggtcttgtaactgcaaaacactcctctttttggtggcatgaatgctagagtgtttggtcgccttttcacttcctgtgagagcaaaagcaaaaagaaacattcaaattaacttgcaacttgcactttcatcagccttgcctggagaaggcaatttgaaactactgaataaaacaagacaaaagacgttaattcctgatacataggcatgcaggttttccttcccaacttaacctttcagcgggatttcagaaggtcctttgagggttggacacgtctttctagagaaacaatgagggccatgccctgggcccgcccacaaattaagccccactaagcccttgacttcagccctaaaggccctgaatatgccaatatccaccccaccgcctttggaaggagagttcaactctccagtgagagcaaaagaaaggaagtccacccttattcatgcattaagtcacaaatatttatttagcacctagtatgttccaggcactgttctgggcactgggtatgcattcgtgtacaaagcagatgaagttaacatttaataataaagctgaccgggtgcggtggctcacgcctgtaataccagcactttgggaggccgaggcgtgtggatcacgaggtcaggagttcgagaccagcctggccaacatggtgaaaccccgtctctactaaaaatacaaaaattagccaggcgtcgtccgcgcatctgtaatcccagctactcaggaagctgagatgggagaatcgcttgaacccaggaggcggaagttgcagtgagccaagacgtgccactgcactccagcctgggcaacagagcaagactgtctcaaaacaaataataataataaagctgacatttaataatgatatacattgtgctcatctataatatgtaatagctaacactttaacaagacttactgtcaggccctgttctgactgagtaaactcttgattttatttttcacaacaaaaggctgatgtgaggatgacattttatcttttttttttttggggggacactgtctca

SEQ ID NO: 1242902 - DNA, 4001 bp, Homo sapiens
gagcccctgatgtcagggagcataaaatccagatttctagtcaggacccctaagagttttcagacttccaaagttttggagttccgtaagcagccaaccagatgtctaataccagagggcccatctagtaaacacctctcacctggactgtgggactgtcttatccacaaacaggaagatcgccttttcagaaggaagctggatccttttcctgatgatccacatgaactgagccacagtgatatcagatggaaccaagtacttccgtttgtcaatgtcaacaatctgagagcctgagaccttttccacaatcacctgggaaagtaaagagaggtcaggactgtgtttcctaaagcgaggctctggcctcacatggctgaggagctgatgaacagagtgtgggcaaggaggtgggtggggaactgcatagcaggagaaaatatgtctttggcttaataaaccacacgctctggaggttaagaattgatataaatgtgttacagggaaacagtaagtgcttttctgtggtcaattatgtaagagaaatgcagcccttaccactaagcttttccacattttatctgggcagacctaagaatatctggggagggtttcatccatggcccgttactccaggaccccagaatggatccaccttcacactacaggaaacactactgtgttcccaaggaacacaggagacaagaatggatggactaattggaatgcctggaattttagccagccaagaaccaagttcttcatttggcctgttgctcctctctgaacaagtttcaaatccgtccctcctactcctttccccagacaaattattcacaagcaaagagctacaataacaggccttaatgtccattaaaaattaataacgattacaaaactatctccccaaccatggaagaaatataacattatatttattattgactaagaagaaaatatggcagaaggggttttcagcggcttttcacattattttggtcaggcaaggatgacagggtcaaggtgagataacggagctagaagttaggtaaagatggagacaaagtaaaagatgaacgtcctgagactcaagtaccacttccaagaccaaaatgacagtctccctccaccaccattcccaaaagtggcagtgacctgttgccctgtcctagaacatcgttccttacataattggccagggagccccgaggctgcagacggctcgctggcctagatcgggagattcagcactgaggcaccctgaacagcaccagcccgagcccctcacgccccggccctgggcggcctcatcccggtctggcccgtcagctactgtaactgggactggaacctcaacttgtcaactgttgaatggcctggggcctatcacgggtcccagacgacagaggtgacagcgaggtgagggggcggagagtccactcaccggaaccctgtcgggatatttcgctcgaatcttcgcggactccacgcatctgtgttctgtgggagaaacaaacggggctgacggccgcgcctgcccaccggtcggttcccggcccccggccctcctcctcctgcgccctgcgtacaacccaggccctggttccggcgtccccggggccgcggtcctgtcccctactagctcccagcaaggcccgcggagggtgacatggggtcagggggccgctgcccgaggcaccagggcatgggcgactccagcccgcagcagggcatccgccccgctccactcggcccagggccgcccgagtgggggagggggcccacccgccgccccagcccccagcagccgggccgacgaccaagtgcttacccagcgagtggtcctccttgaacatccacttcatggcggcggcgggaaggggacggaaccggctcgcggagccgcggagctcagcgcaccgagcacaacaacaacgacggcggcagcggcagcggcagcgacggcggcgactacacggcaggcgggacttccggctgtcggagcctagcaaccggccgggggcggggcttccggcgccatttgtcagggcgccacgccaaggggcggggccgcacgtaaaggggcggggccgcggaggacccctttgggggctcctgggctgcggtggcgaagaagttggttatggggacgtctgtgagcagtatctgcgacattgctcgcaggaatgttcggggaactggtgacaggagtggggtctcgggagcgttggtggcggaaaacgtctggctgatagtgtagggctcttactgagggctgtttgggggtgtggctgatagctgagggctcttagagcggttcataggggaagtctggggaattggtgacaagaacggtctttaggggtaagaatgacataaggagggctttctagagcttggcgataacaagggagctgtttagggcgttgacagtttggggagtattgctcggagtggtgacaggttgggggctcattatgggaggggagggtgtttgaggacactgttggaagcggcactgaggacaacccggaggtccgtattagggacagccgtagtaggttgtcttggacctagaaattgaatttaaacaaatcccgttttcttcctttattcgtgaataaatatttgaataaacatttacgaaaaggtatcacaaatgcacatttgaggcggggtacggtggctcacgcctgtaatcccaacactttgggaggccgacgcgggtggatcacctgaggtcaggagttgaagaccagcctggccaacatggtgaaaccccgtctctactaaaaatacaaaaattagccaggcatggtagtgggcgcctgtagtcccagctcctcgggaggctgaggcaggagaatcgtttgaaccagggaggtggaggtggcagtgagccgagatcacaccactgcactccagcctgggcaacagagcaagactccgcctcaaaaaaaaatgcacatttgaggagtgtaacatcactgatcacagaccccttaattttaactggcagaggagttagaggtgactgtcagactcggagaattcccctgagagctggtcatgagatgggtttccttatttggctgtgggagtggtttagcaatcacagcctgagctgtgtgtgtgtcacctgcccggacatatgctttgaggttctccaatcagtgatgtaatgccttttttccaagcagactcatcaaggcagtctggtctgggtcaccatctgtttataagctgctgaacatgtagcaggaatattcacttaattgggcacatgaaccctgccacgtgcttgtgattctgatgcacctgtaaagcctgtatgtttgaatgtggtagttcatcatttcctacactggaaattcctgatcgatgctgtggaatctagcttcattctataagtatttttgttattttaagactgtgtgtctgagtaactagaataggtttttttgtttctttgtttttgtttttgttttttggagacagggtctttctctgtcacccaggctggagttcagtggcacaatcttggcttactgcagtctgcctcctgggttcaagcgattctgctgcctcagcctcctgagtagctgggactacagggacacaccaccacacccagctaatttttgtatttttggtagagatggggttttgtcatgttcgccaggctggtcttgaacttctcacctcaagtaagtgatttgcccgcctcggcctcccaaagtgctaggattacaggtgtgagccactgcatctgtttgtttgtttttaatgaagtggaaaaaatcctttgaatttcctacttagaaattattgttacatacaagagctctgtgctaggtgctggggaaaaacagtgaagaagacagatgacatccctattctcatgggtggcagcatgagatattcttgtccccctgacatattctagtgggataagacaaaaaataagtatgttaggtaatgataggtgctatttcgaaaaa

SEQ ID NO: 1242903 - DNA, 4001 bp, Homo sapiens
gggcttcctgtcaccctcccccacatgtgccccggtggccacaccccacccctccaccctgcacggcctgaacccttgctgtcctatggaaacgtagggtgagtccacatgcaattccctatttaccgggagccacattagaaaagcagaagtaggtgaaatacagactaactttatattttatttaacccaacataaccaaaatattatttcgacaagtcttcaacataaaaaattattcatgagctgccccgcctcacccctctgtcctctgagaaagtcaggaaaagcagaaacttaacagggaggcttcacctgcagagcccagctcatccagcgaagctatgctggcccagaaggagttacacaatgaaaagaagaaattctgaaacaaagtatctacactggcccagaggaacttcaaaagtgaaaggatgaaattctgaagcaaagtatctttaggagggagatgccactcagtgcagagaaaggcccggctactgctgtcaggacacggacccctgggcgctggagagcgtgctctggaaagcagtcactgcacacaaataagacatatgagatggaaaagcagctgcccaggactgtcggctgtcacccctgggtggggaaattatgggtggtgtctgttatcttttcaagtatatctttatgttaaaaaaccattaatttaataaaattgttaagtgagatattttacattatttttctttcaccaagtcttctaaatctgtgtattttacactaccagcaccttccaattccgacagccacgactgcccagcccttgggtgtggcccgtggcccccactggtcagcacaggtgggtctgaaggcacctgtcagggtctctgctggtcggagccagcacacaggggctgagcgacaccgacggcccaaaactgtctggtactcggtgtcgtcccagtcctcacacacaacgtgagcacggcgggacaggtgtaaccccccaggtgtggcagctgaggttcaagaatggaagtgacccccaagcttggagacagtagggtttcaacccaggtgtgtctggggtcctgcacggtgacccatgccccaggcaggctcattcctgagtctccaggtggctcccacaaggagttagggaaggaggcctccaggctggctgtgacccctgaccccgcacttgcccaccaggagacattccagcctttcagttcttcagaccttagggacacctgaccttcgctcagcattctccagaggacagagacagccgtcaggtaagactggagcccagcggggggacccggcggcccgaggtggcgggagtgattcctagggcgacgcagctctcaggcagggcggcaggagcagcctcttcctccctttggggaggccacgctgcgcgcccacctttcccaagagtagagggcgggaaaggtcagacgggggaggcagggcccggtagcacgccggccacccacctgccagggaggacgctgtcccggtcatgcagcacagtggcagcgcgtgtggtgatcggtgaccgccgagaccccacgcctggaccccgcggccactccccgaggggcctccccctccccgcacggggataccccccgtcccctccccctcctcctccccgcgcggggcctccccccttccccaaggggcctcccctcacctctccccccaccccgcccgcccttcccccacctcgctcctccctccatccgcccctcccctccccgccccaccccggccctgccccgtcccaccgcccgcactcacgtcgtccatgagcaggagcaggatgttggggggctgcggggcgcccgaggcccccatccccgcggcgctgagcaccagcaacagctgccaccacctcgtcgccgcgacaaccgccgccatggcaaccacgggagccgcggagccccggccagcgagccgacctagcgagcgtccgccggcccttccggctgggctgcggggcggggcctggacggccacgtgactcgcggggcggggccagagtccgcggagggacgggaggcggggcctggactgcctcgtgaccagtggggcggggcctgagccagctgtgtgcggatggggcggggctttggaggccgcgtgaccagcggcgggtcacgtgacgcggtgcctggcgccgagcctcccaagatggcggtgtgcatcgcggtgattgccaaggaggtgcgtacgcgcggcgtggggcgtccgggctcgcaccatcctcggctctccgctttctttctacttcttccctgggcttagaaggcaccttaggaaatgggacctggaggaggccttcgccgagctccagcggtcaggggcttcgcggtggacgagccgccaggcagaccctgactgagaccccagttccgcgctcgcccgtcccgctgctgaacgcacccctcggcgcagcaggtctcctccccgccaggacccaccagaaacctaggtggtcccgggcactacctccgtcctccgtcctcagcaggttctgcccgttctcccgtccagcgctggttccccgcggacggcggccccggccctcctgccagtctccccggagccgagttaaaaacaaatcggatcctgtcacgcctctgcctgagacctctgcagtggcttctcgttgccttaggatgctgtctgaataacctgctctgggatcctttccccccataacccttggcactctccgctccaaccaaacaattctgcagctccctggacatgctctgccctctcacctgtgggcctttgcacgcggaacacctctccccagctcccatcctctttactggcccacatacatttcaactggaaagcattttctgaaggctaagactgagctgggtggctgcccacacgctcctgctgcacggagccttcatttcctagccagggtctcccgagaccagactcgagaccgctccctgctgggcggtggctgctgctaagctgctcatgggcttccctcttggccaagatgatcatttgcttgtttgtgggtttattgactaggtatcactccccacgagggtagcgaggactcttgttcactgtatttgtgcaggacccagtgctgaacacacacagggtaaatggtggtgtgtgaaagaccgagaaagaagctgttaattctgggcttccaatggtcagaaatgcagagatgaagggaatttgagctgagtcttgaagggtttagtaaaagggtcactgtcaaggtgaagaaaagccagtattgagggtgctgtatttgggtgagccatgcagagttagaggtgggctgaggcagagtggcctccaggagaaggtgagaggcgtgcccaggtgccaggcttgatcggcaggctgtgctcaggcccatttttctgattcattttttcttttccgcccaccctactgctgctgctttgcaaacaacacataaatctccttaggttagctgggatcccctgaaggcagtgcccactgcggcatagagaatgaagcggtgggccttagagcatgggaatgcgttccccgggtggctgcaggtcacggctctgcagcatagttcagagctggtgtgcgctgggtggagtcttgtcctttcagtcgccgtcatcctttcttgcagaattaccccctctacattcgcagcacccctacggagaacgagctgaagttccactacatggtgcacacatctctggacgtggtggatgagaagatctccgcaatggggaaggccctggtcgaccagagggagctgtacctgggcctgctctaccccacggaggactacaaggtgtatctttcagggcagggtgtgtgtcagggaggacctacagttgcaagatgtactttaggatcagataacttgaaaccttttagaagaaaaagaggtgagagtttttagccagccagggaattagggtagcttgaggtgaatgaaggcctgtaactcttctctttcattggaagag

SEQ ID NO: 1242904 - DNA, 4001 bp, Homo sapiens
gaatcgcttgaaactggaaggcggaggttgcagtgggccgagatcacgccactgcactctagcctgggctaaagagtgaaactcagtctcgaaaaacaaaacaaaacaccacgacctcattgaggtcacactgtggttgggaaagaccaccaaagtaaatgtgtaaaatatggggtacgtcaaagtggtaagtgctatggagaaaaacgaacaaggataacaagcaaggattcggcaatttgcaatttacttcttttaagccaaacggatgccatttaaagaactataacaataatgcatctaaagtagttttcttcagcattttcccaaacagggaagactttggtctgctgactccaatttgggatgggttgctcaaacctcggaactgccagctagaagctgtctgtcacattagcaatccaaattctgtactaacgatgctaccccagaccctactgccgccccgcccccccacccctccacactccccaccgccaaagagcgcaaatggattcacaaaacaaatccaagagaaaccagaagttacaagggcacttgaatttcttctaagtttagcacagatatctccccaatgcaaaggttaaaagtgtagcgtgcgtggtggttttgctgggacaaagcgctaagaatacacatcattttgctttttctgacctgtcaattgtagtgatattctctaccactagcttatatttaaccagcttactggtcagtttctccagtttttagcattcccccctttccttttattaaaacagcaacctagtttgcaagaaggttgctaaaagaaaagatagtctcctgcaagatctgatacacttgtataagcactgtcttatcaaccttttaattaacctggttagttgagttggcaaatcaggttaagctttgctttactaaagtattaaaatgccctttgtcgcaaggctctcacggtcctcgggttgtaacagcatcctgagaattcgctacagtttacttcaacgtgtaactcctcttttaaacagttaccagaatggagcggaaaagacacgtttggcaaggagaatttcgcccggaggttcggactaccaacccaaggagaacatcgagagggttttctctgcctgcacccagcgaggcgctgtctgtctggcctcccagcgggcagggcgctccccgcctggttggcggcgccggcccagcccccgcgcgtggattcagaggcgagcgactggcgaacttcagcggggaccgcgggcccggcctgggcgagggggtgactcttccccggcgcggcctcgcccagcccgcaggtgcgggtcccggccggcccaggacggcgtctgggggcctcagggtctccgaggtcgggcgctcgccgcggcggtgggaaccgggagggacaaggcgggggatcgcggcccgggtccggggacaactccaaggggcgcgggggtccagtggggagcgcgggcctggaagccacagaggccgcctgggggacgcggtcagcggggccgggttccggcgcttgccgggagggacgccgcgccaacggtgacgcggggaccccggcgccggggacaggggacagggtctgggggccacgcccggcccggccgccccgcctccggctccgggcagcaccgccgcgcccgcccgccgtagccccctccccacctgatgtacgggctggccgccgccaggatgttcttctgcaccgggatctcctccccgtcgaggaccaggtgcgcgtcgcagaagcgagactcctcgcggaaagagctgagcgctcgcagcagacgcgcggcgtgctgagggtcagacacggcactgccctcagccatcgcggcgcccgctcctctgccgacgggtccggctcccgacaccgtccggccggacccctcgagcggcccgagtcctgcgcgcgcgcccgcccggcccggctctccgcgctctgagcagaagctggagcccccgggacgtgcctgtgctatccgcggcgcgctgggccggcgcctttaagaagccgcgtcatgaagtcatttctccgcgacgcccccgcaccgtcgctccccgccttctcgcctccgctgctggagatggccaatcagaagcctccttcctccgcccgcctgaccagctgcggctgggtgcagcggaaggtgtctacggatgagataggtcgctcccgcgatggagggatgtgcgggcgggctaggattccgtggttaagcctgtggcctctggagccgcgagtttgaatcctggttgcagctgttccacttactagctctgtggccatgggtaaggtgcccatcctcagtttctccgtctgcaaaatgaaagcgaattcttagtgttgttgtggactcatgagatgatgcatggaagcaagggcgaagtcgctgtagctttctttatttatgagagaaaaggagctgcccaggtgagaggacaaaaacccgagaaaacagacccggaaaagatggttttggttgcgggctaggaaggagatgtagcagatgaagctggagaagtccgaaggaggccttaaattttgcagggcctccttggtgtgggaaggagtttggtttctgcagtggtgaagaaccatggaagtaccgtatttagcaggggattttgtgcaggtcactcagctcctgcgtggagaataaggcggggatggatgtgctaaaggcagatcgatgcttaggtattgcaggactagagagaagggaatgggcacctggatgaaagggtgatgcgggggcgggggtagacaatagtggattgttttaaaagaaattgtgagggagagggagttaaggataaatattctgtttgagtaactgcatgcatgtttgcacctttcagggagagctaggaaatgctgaaggggtgggcagtagagaggcagatgtttagattcagacaggctcccaacccagtgaagatcaaagctgtgatagaaaggatcgctgggtcagctcagctggcaggccaagccccacggtatctgaagtttccctggaggttgctcagggcacatgggagtgtggaatgtagcaaccattttgtgcaaacgttagggactccataagcctctaaaaaattagcaattgtatgaggactccggaccagaagaatgtggctagcattccaggcaagacaggatggaattttcactgtccttcaaccaactgaaaggctccaataaagtcttgggtatttaccctgaaccagccaaggctttggagtcactggcaggaatccgagtatctaactgttttcagggcagaatagatggggagggtacggctgtggaagacacatgcatttccactttcttctgtaaatgcagctcagtgttcccggatgcaatgataaagatgtctaggatttgcttcaaaacaaaacaaagggatggggaagcagatgggagtgtagatgagtcaaaagtggccgcaagttactaattgttaaagccacgtaatggggatgtggagattcgttgtactgtctctatattgttgtggatgtttaatggggatgtggagattcattgtactgtttctatatttttgtggatgttgaaaaatattttcttctttcttttttttttttgagatggagtctccctctattgcccaggctggagtgcagttgtgcaatctctgttcactgcaacctccgcctcccgggttcaagtggttctcctgcctcagcctcccaagtagctgggactacaggcatgtgccaccatgcctggctaacttttgcatctttagtagagatggggttttaccatgttggccaggctggtatcgaactcctgaccttgtgatccgcccaccttggcttcccaaagtactggaattacaggcataagccaccacacccggccgaaaaatatatttaaaaaggtaagaaacacacaagacaagcagcttggacttatcttctccatgatacctacccagtatccctgtgag

SEQ ID NO: 1242905 - DNA, 4001 bp, Homo sapiens
tgtctctcctcccttcccaggcattgtgaagaccctgattctgtagctgtgcggctgcaaggtcactaggcagataaactcaagtcgcaaaacatgtttttccttaaaaagtaagaaatgatgtaatgcatgtttcaactgaacaactgcctttatttctcacatctgaagcatgcttccccctgcacagatctccctctgccccacgaaaagcttaaaaggtaacttaactctttgttcagggctcagtcctttggattttaatctgactgggccggtgcacctaaataattaataaatatcctcctgaaccccatcggtctctctaattccttaaaaatcccactacacaacctctaccttccaggttcaagaaattctcctgcctcagcctcccaagtagctgggactataggtgcgtaccaccacacccggctaattttgtgtgtgtgtgtgtgtgagtgtgtgtgtgtgtgtatttttagtaaagacagggtttcaccatgttggccaggctggtctccaactcctggcctcaagtgatccacccaccttggactcctaaagtgctgggtttacaggcgtcagccactacaccctgctttttttttttttttttaagagacgtgttgccaggctggagtgcggtggtgcgatctcggctcgctgcaacctccgcctcccaggtccaagtgattctcctgcctcagcctcccgagtagctggaactacaggcacacgccaccacacccagctaatttttgtatgtttaatagatatggattttcaccatgttggccaggatggtctggatctcctgacctcatgatccgcctgcctcggcctcccaaagtgatgggattacaggcgtgagccaccgcgcccagactcctggcctagtttggtagtttctttcatagtcggttttcagaagacccttcctgggtcagaaaacccatctacttaaatttaattcgtaatgtactgctctctttttaatccctccactccaagaaggctacctcatcacaaagccctgaaggcagtggaggaaggttcagcattacttagcatttgggaccttcacagccagctgcagggacttggtggggctcccagagctttcctccccccaccagctgaaacccaccctgccacacctgcccagaaattgagttactgacaattcctgtaccacaaagggagagccctttacaagagaaagacagacatggagctgatgaggccacgagctccgccttcctcttctcggtctgggcctgactcctgccaggctttccaagggaacagtggttcctgtatcccaaggttgtgccctgggcactccaagggcactggacctgtccgggcctccttggtgtagagggatctctagccactctggtgtgccccaggctctccatccgggagaccaaaggtcttagggtaattcctgcctccggctctattccatggggaccctggtgctctgcaaagcctcgtgagctgaaaccctaggtcccagggatccaacagaccgagtctgccattccaggatgagagtccccttgacgcatgttcactcttctggggaccgtgcgccgccgaccccgggccctgggcgttctatgaccacccctgtgagcacagggctctggacagcccaggtctcagtcccgagtgctgccaggccccggggccgggagcatcctgagtttgccccacggagacccccacaagagcaccgagctctcaattccagaaacccagcgctccaggcctcccattcccagggtctccgtgtaccgaggcctccctgccccgaggtctccgggcccctgccgaggaccccagccccgctcccgcccctgctcaccatgacgccagcggacaggcccagcggcgactccgggaccagggcgcccgcccccggaagccacgccgtttcccggcaaccgctgggcgatgccgcgataagtcacaagatcctcgcgagactccgccgggcagcggccctgccaaaggcgggagtgcgtccctagagacgggcgtccggaaggaacccggttgtgaacgttgggaaaatgtcgccggcagcccagaagcctttcgctgcagggcatgttttgcttattgctggaacctaagctccacgaggggggaacccttcacttctatccttcagcgcctagaacagcacacagcacgtgctcagtaaagacgtgctgatgaaggaccattgaaggaatgatcaatcagccacccaagcctctgaaactttccccaaatgagattcaaatctgggcaaacactctatcccctgggcctcactcaccccacccgcccacctttgaagggccctcccagctgctgcgctggtgggtttacacacacctcaaaaacgcagaaatcggaaagaaaaatacgttccagtttagttccaaatgtttgaaatcagtaagtattcctttcacaaaaataaactgctcttcctgaagaggcctcctccccactcctcacggatgaaaagaaaccagaggcttcccgacaggccctgcagaaaacaaacagctgccactttccttttctaactaatctcttgttctgaaaactgctagccattttacaatttctaaaatgaatctgccatccgtgaaaccaccctgttacctacatacaaccatctatgtcacccagaaagctgagtttgtcataaacaggtgcttttttttttttttttttttggagacagggtctccttctgtcgcctaggctgtgatcacaactcactgcagcctcgacctcctgggctcaagcaatcctcccacctcagcctcctgagaagccaggactacaggtgtgagacaccatacccagcttttttttttaagtttttaatagagacggggtcttgctttattgcccagagtggtctcaaactcctggcctcaagtgatcctcctgcctcggcctcccaaagtgctgggagcacgtgagccccacgcccagccctaagctctcatctttaacatcttcttaaaaagtggtcatctacttgggaggttgaggtgggagaatcgtttgagccctggaggtggaggttgcagtgagccaagatcacaccacttcactccagcctaggtaacagaatgagacctgagaccctgtctcaaaaaaaaaaagaaaaggtcttgtagcagatcttgttctcccatgtgtctggggatgaagagtacagaatccatgctcgtagaaagttgtgctgggggcaaagtgtgagaaatgaaagaaggcctggtggacctaggtcttcctgtccagctgggggaggaagttgccacatgagctgggtttgctcaggcctcaggcacccacacagtggtgggaatctgagaaccactgtgatgagagacttcctgtttgcccacctaagtcctgattgttcttggagaggagcagccagttggaagaactgcattggctcagcttgcacaaagcagtgatttatttatagtaagccctgaggcctctgtgaagtctggctggtcactgtgcctgggcaaccaggagccagcatcactgtgccagactcccttggcctgagaggggcctcctccccctgggacagggtggtcagacagtgacgctggagagcacagtgggggtaattattataatttaacacttacttcacaaaaccaatatgctagcagcttcatgctgattggctttttgcttcagaagtctggatgagtgtcctgaattaaatagctgtattaacaataattcctttcagcaaaaagggcaagaataggagggttagctcaggatagcctagacagggtactcatttttcacaagctaagagcaatcctggtctgtcggtgtgggctgcagagatgaatcattcagggagccctgaattgcggctccctgggatcccgacagggcccactgcgacctgttcttttcatattgaattcgagttcagatttttagaa

SEQ ID NO: 1242906 - DNA, 4001 bp, Homo sapiens
ctcccaaagtgctgggagcacgtgagccccacgcccagccctaagctctcatctttaacatcttcttaaaaagtggtcatctacttgggaggttgaggtgggagaatcgtttgagccctggaggtggaggttgcagtgagccaagatcacaccacttcactccagcctaggtaacagaatgagacctgagaccctgtctcaaaaaaaaaaagaaaaggtcttgtagcagatcttgttctcccatgtgtctggggatgaagagtacagaatccatgctcgtagaaagttgtgctgggggcaaagtgtgagaaatgaaagaaggcctggtggacctaggtcttcctgtccagctgggggaggaagttgccacatgagctgggtttgctcaggcctcaggcacccacacagtggtgggaatctgagaaccactgtgatgagagacttcctgtttgcccacctaagtcctgattgttcttggagaggagcagccagttggaagaactgcattggctcagcttgcacaaagcagtgatttatttatagtaagccctgaggcctctgtgaagtctggctggtcactgtgcctgggcaaccaggagccagcatcactgtgccagactcccttggcctgagaggggcctcctccccctgggacagggtggtcagacagtgacgctggagagcacagtgggggtaattattataatttaacacttacttcacaaaaccaatatgctagcagcttcatgctgattggctttttgcttcagaagtctggatgagtgtcctgaattaaatagctgtattaacaataattcctttcagcaaaaagggcaagaataggagggttagctcaggatagcctagacagggtactcatttttcacaagctaagagcaatcctggtctgtcggtgtgggctgcagagatgaatcattcagggagccctgaattgcggctccctgggatcccgacagggcccactgcgacctgttcttttcatattgaattcgagttcagatttttagaaaagagccttttcttcacatatgtggcttaagatactttcattcagtgtcaagctgtgcagctcagaaacccagataaatggcatctgagtttcctgcaaaatcccagagcaaatgttaatacaaacaaaccgactgccctctgtctgatgtctgatgcttcctgccacccactatccaccaggtaaaccgcctcaggccacggcatcaactcagtgaaggcctggatgctgggttaacaagagtgtttatgaagactagactttttcttttcttttcttttcttttttttttttgagacatacaatcatagctcacggcagccttggactcctgagctcaagctgtgctcccacctcagcctcccaaagggctgggattacaggcatgagtcaatgctcctgcaaacggactttctttgagagataaatattgaagtacttacaaatgcaatgatctaatgtgtatataatttgcttcaaaatgacccagcagtggagggaagtgaatgaggacagagaagcagtggcccaggccaggagctggcaatcgctgaatctgggcgatagggacatgggggtcagtttcatcgaaactgccttggcgctctctgcagcccgggcccgccgccctctccttacctcccatcccccatcccgccccttccagcctcccaagcacacgccctcgcccccacccgccccccgcgttaattcgcgccatccagggcgctctgtgagtctgtcattacccagcgcgagtcaggcccctcctgtgcccctcgccagccccgaggggcgcccgcacacagtcggcgccccacacgcaagtacctggaagagaacaagaggacgccagcgggcgcggccgccaagtgagtgcgcaggagccccggacgcccggccggggtcgggagggcgcagccaggtcccggtggtgtccgcggcggggcgcggcccgcgagggaagggtcggcgggggaggggtccgctgggccaggggccagcagggggcgcgcgcgggccggggcggggccgcacctgtcctgcggctgggggggcgccgggagggggccggggcccgggagcagctgcgcgccccgccccgccccgcgggctcctccctgccgccgcggccccccggttgctgccccgatgcgctgcgcccggagccggggccgagtcgctgccgcagctgttggggcgcccgggccaggcgacgccgccgtcgcccgtgcccctcccagaccgcaccggccgcatggagcccccggagggcgccggcaccggaggtgagttcagccccagcccccgagacccccgcgcagcgcttccccgcagcgagccgcagcccctccccccagggctcacccttcgccgctcccgggagtcgcgaagacccctttggcagctcggggtcgtccggcgggccaggggcacctcccgggcgcggtccccgcgcggggctgggggcacacggaccgagtctccgcccccttgttctctgcgctcccggcccgggaagccgtgcccggcacgctccttggtgggtggcccggagtttcgtcctgagccccctcccagccaagccagccggtgacccggggagcgggggaggggggttccggggctggagtttggggtccctgtcggtggggcgtgagggcgacgctggccgcttgcaagcgcgtccgctttgttcgcccagccgcgagtcccggggggcgagggccgtagactcgcgggcagggatcctgccaggggcgaggggctgagatgggtcttggggatgtggggcatgcacgggcgcggcctgccggggactccagagctgcaagggtggctggtccgggagtggcccaggcgcacgctcatcggggagggtaggtgcgcgtggagcgctccctgccctgatggtggaggccctactgcaggaccttggagtcggtaacgggaagaaagctctcagaacctccccccttcccgatcagagacttttccaaaagggctttcggggttccatttgcctaggtaggaacttggatgcaaactgcagactcctccacctgcccagccaagcccaccacctcctggtttcctagagctcccattccagggagccagcaggtgcctgagggcacaggcaggccagcctgccgctctggaactacatgggaacctctcagtcccccagccgcacacagtggcatcctctggagcccgaagggctgtccccgggaggagcaggtccacccaccctgtgtatctgcagtccaaggtatagggacaaatgccccagggctggtgggtttgggttttgatttgtcatttgtgggagggaccagagctctttcttaacactgatagtcccaggctcctgggtattcccagtagcagctttgtggacataggaagcctggaggttgggagtgagggcttgggggtctccgagctgtttccagctgtgaactgtgggcagtcaggcccctgtgagcctcaatttccatttctgtcagtggagacagttctgcttcccctgcagggctgtgggagcccaaggcatttgggagtggaggttaatatgttttccctcctcctttgggaaaaaaggaggacttcccagcagcttaaaaggcagagaaagcaggttcagtttctgagcccatcagtcactggctgggggcttcagacacctgactcaatcagtgcacaggtatttacctacaggtcgcagctctgtgcagtaccctgcctggggtggggagttagtgggaagacagggccctgtcctctgagggctcacgctcttgacaccaactcctgtttccttgtctgcaaagtggccagtgatgcctactttgtggaacctcatgagatcacacattggtgactctgtcattacttatcacttacttttgaaaaccttacaaaagtagagagaacggcgggacaaaggcccatgtgtgacatccca

SEQ ID NO: 1242907 - DNA, 4001 bp, Homo sapiens
tgctcttgtcgtccagctactccacaggctgaggcaggagaagtgtttgaacccgggaagcgaaggttgcagtgagccaagatcctgccactggatgccagcctgggcgacagagcgagactccatctcaaaaaagaagaaaaaaaaaaggaacgaaaaccacagacttgaaactaaattcttatctgagaaatgctttacctttgtattcaaattagtgatgtagggatccctatcagaaacagagcggacagactattagcaagacagcataagtaaatctttatgctacaaattttggaataaatttatcaaccattccagctccaaacaggtttctaaaacaatgagctaatgagacaagagccatcactgatctacgcaatcgaagcagaggagcagtcagtgtatcaaacatttgggcgtaaagaaaattgttggcctggcgcggtgacgcacgactgtaatctcagcactttgggaggctgaggcgggtggatcacttgaggtcaggagtttgagaccagcctaacgtggcgaaaccctgtctctactaaaaatacaaaactcagctggaggtggtgacgggcgccagtgaacccagctactcgggaggctgaggcaagagaatcgcttgaatctgggaggtggcgcttgcagtgagccgagatcacgccgctgcactccagcctgggcgacagagcgaggctccgtctcaataaaaagaaaaaaaaaaaaaaagaaaattgtttttcccctgcaataattgtgctgaagtagcacaaatggccgaaacattcatgggcaggtttcccagttatttcaagtccgtttgagttagggctcatttcagcaagcacacacatgaatgatccaatacaaactttagcagaacttctgttgagtccagaagactttatcttacttgttttggggaaatagctgaatcttcaaagttatgattgttttatctagtaaaaaaatctagatctggcgctttaatttttttttttttttttttttttgaggtggagttttgctctgtcgcccaggctggagtgcagtggcgcgatctcggctcactgcaacctctgcctcccaggttcaagcgattctcctgcctcagcctcccgagtagctgggattacatgcgcatgccgccacgcctggctaattttttgtacttttagtagagatgggatttcaccgtgttagccaggatagtctcgatctcctgacctcgtgatccgccctccggcatgagccaacgcgccctgcctggtgctttaattttaataagcgcttctgttttaattttacttcggagttctcagtaacggtccatttagtaaactaaaggcctccccatttggggtctcaacgatgcacgcagatgggagataaacttaaggccaccgagacgcttaagcgacacgtgcctggcttctgcagcaagcggccgacctgcccgccggacccgccgggccacccccgcctcggtgtcccgcaggcctcccctcccggctgcatgcaatccctagggcaaaggctactcgcgggtcctcccgctacttaagggggagaagcggccgcagagccagggatcccaacagaaataagaagggggcagggtccgcgctcgctccgccccggtggctcaggagcggtgccccggcgtcctccgtgtcccgctgggcccgggacaagcagcccaggcggggagggagcagccgcccacgtgcccgccgcgcttacccgagagcagagcgggtccagtgcgcagcgtacggacggcgcccacccccagctgccagggcctcggcgggcagggcgcggcgggtgacgggaccgcgcgcagggtgcagagcagggcccgcacgctccgcaccactcgcagcgccatgttcgcaggggtgcgggggtcgcagcgctacgcctcggccacccgcgccgggaggcggggcggggaggggcagttcgcggccggagggagccggctggatggaggcgcggaggcggtgccgcgggggcgggacagagcctgactgggcagagcgtggagggcggagactcccaggcgagggggcgaggcagggtctgattggccagcacgcggagactggggactccagggcctggcgcgacctcggatacggcgacgcgaaagaggggcgtgggcatggggaagaacctgaggcccggaagaggcagcaccgagaggcggagactagcgcggcgggcctgggtatgattgggctgcccgcaggaggggggcggggcctagccccagactgggttcctttccacatgtgtatctcttttactgcctctgtcataagttttcaaaggtggtttcaccacctcacgaaggaattcaagaacaagtcggaaagtcgtgaaagtacagaggtttactgcaaagtacacactgaagaaagggcggactcaaaagagggccacacaatggggcttggggtttccatctttatgggtttctttgagaaatggaatatacacaaaggtttctggaataaggtggagacttgtcagaactgtggtgccacccatttttacaccaaatatgggtgttcccggaattgttgtggtgccggtgggtgtgtgacttagtatgttaatgagtcctaggtgaagcctaggtcaaagccacaccacgttgggtccagttggttttagccaggttgacccacaccctggtttttcagggtcttagcccatagcttgtgcagctatttcaacagtttccttttgttagacagaactgcagcctggaagtttctattctccttcaactgctctgtaacgttcctgtctcaaagagccccagggaccccaaacaggaccggcagaatccagaagcttacttaaaaaggaataaagacttgtccaagggtcataagtggcttcttggtggagactggacccaagccagtcactaatgcagaaatattcaaaacgcagagagctgagacccagtgtgcacaattccttgtttcatcggccagcggtgtgaccaaggccttccgagaaaagccgaagtcatcatcccaatccaagaagtcagaaaaaaattaggttctgggaaaaacctcacctttaacacagattttatggagtggccatgagtcagcaaagaaatactgttctgaaaaacaccttaagctacacacacacctttagtactgttacagaaagggctcccaatccagaccccaagagagggtttttggacctcatgcaagaaagaatttggggagagtctataaagtgaaagcacgtttaatagagaagtaaagaaaaaaaagaatggcttcttcgtagacagagcagcagtatggcttctcgactaagtgtacttatagttatttcttgattgtatgctaaacaaggggtggatcattcaagagttctccagaaaaggggcagggatttcctagaactaacggttcctccgctttttggactatagggtaacttctctggacgttgccattgcatttgtgaactgtcatgacgctggtgggagttgttttttttttaacatgctaatgcattataattagcgtataatgagcagtgagacctaccagaggtcgccatcttggttttggtgagttttggccagctcctttaccgcatcctattttatcagcagggactttgtgacctgtatcttgtgccaaccctagctcatcctgtgactaagtgaggcaggtgaatcacttgaggtcaggagttcgagaccaacctggccaacatggagaaacccccgtctctactacaaatccaaagtttagccaggcatggtggcaggtgcctgtaatcccagctactcaggaggctgaggcacgagaatcacttgagcctgggaggcagaggttgcagtgagtcgagatcacgccactgcactccagcctgggtgacagagcgagactctgcttcagaaaaaaatacaaataaaaagaatgcctaacctcctggga

SEQ ID NO: 1242908 - DNA, 4001 bp, Homo sapiens
gataaatgtgagttgagtgtattccaaaaacagatacactactataaacagtggcaaaggaatgaaattacacccacagtacattctccacatgggccagagtgcagctttaaaagtataaatcttggccgggcacggtggctcatgcctgtaatcgcagctactcgggaggttgaggcagtagaatcacttgaacctgggatacagaggttgcagtgagctggggttgcgccgatgcactgtagcctgggagacagtgagacttcgtttaaaaaaaaagaaaaaaaaaaagaaaaaaaaaggaaatgagggaggccaggcatgatggctcatgcctgtaatcctagtaccttgggaggccgaggcgggtggatcactttgaggccaggagtttgagaccagtctggccaacatagcagaaccccatctctactaaaaatacaaaaattagctgggcgtggtggcacacgcctgtaatcccagctactccggaggctgaggcacgagaatcgcttgaacacgggaggcaggggttgcagtgcgtggagattgcaccactgccctccagcctgggtaaaagagtgagactctgtaaagtaaaaaaaaaaaaaagaagaagaaggaaggaagaagagagagaaaaataaaaaagaagagaatcagatatatttacacagatgcaaaagtgcctaatccactgaaaagccctctctgtaagctgtcattattatgaagctaggagaatgccaagagctgggaggtatcaaaagtttcaggagtgccttgtgaaaaggagggggcagaaactgatgtgagtccagctgccagggttgtgcgagtgcgaatgtgtgtgtctggggaaaaggtgataaggaaatgactcaagtgatttacaagacaagcaaacgtatgtcttgtgaagggtgatctatttagactaacctcaattactgaccaagaacctatttgacctgacccattttctacttcattcacacaccagtctttgttctcttccttgaagtcaggccacacactgcctcttctgttacctgaacacccctatattattcccatctcaggaccttctgcacctgcctggctccttataattccggtttctgttcaaatgttgcttcttcggagacgatttctcttgactattccatctaaataaaatagcgtaactctttccttcgagttcccccgatttcttcattgcacctttcactctcttaaagttatctcatttatgtgtttacttgtttaaggcttgcctcccccattccgatgtacactctgtaaaccagggacacttttgaccttgttcctggctgtatgtaaccttagcgtcaggcgcacagaaactatatacatatctgctgtcttctgtaaatataaaacctcaagtccggagatccctagacactgggagcgatcaagggccgggagtgtgccttgtggacgaatgaggaagtgggaaggccgtcctgagaagatcggggaaccctgggaaggaaaagtagaagtccgagctctcgggaggaccgaggggcgcgaacgtgggggtctcacctgccgaatggccgccagcgtgttctcgggcgcgtcgtggctgccgccacggtgggcgatggcagaaatgcggtcccggggcttgagcacctgcagggccctgcaagagggcaccggctcaaagctgaagacgcgcagtagaacgaagaggctgccggtgaggaggcaggcattgaccgggctccgcgtcaccagcagcagcactagcagcaggaaggagaaagggcccaggaggccgccctggtcctcccacagccacatgccggcgcccgcaccggcacggacgggagtcccggacccgccgggctcctggggcagtagaacgagaagcgagggggagggtccaaggcaccggcagcagcaggaaccctctgaggggaccagcgccgcacaatggcggcagcagacacatccagagagggagtcggccgcccagccaatcagggatcgggattcgcagcgccagtgggcggagccgctccatggcaacgggggagggcccaggccccaggccccaggctcacgttccaaatctaaggtgggttagggttttccgaggtctgaacttcaacctgggcgttcagactcctaggcgagaaaaggagggataagaaccatcctaaagctgtaggactggaagggattttagtgactcctttatctgcccttgaggaaactgaattccagggaacctggagaggcaggatgcttagactatcaattcaattcaattcaattcagttcagttcagttcaattcaagatgtgccaaataccggtccaggtgctccggacacagttgaacaggacctacagggtttttgctcttatgggattcacattcttgtgggaggaaataaaagttagcaagtacacctaacgtttacagagcacttaccatgtcccaggtacttgacgagcaaacactttatatgcttatctcattctcaatacagcctaacagttactatcaggagactgatttcaatcgactttattttccagattctgggggactggaagagcctagcaaagaaggcacaatcggattataaaactggaaggggttttaaggattcccttatttcatagatgcggaaactgaggataggtgaattaagcagttaatggcagggtggggactgacataaaggcctccccagtgatttgtgacattttcactcctcctccccctaatcttacttctgctaagggcttttgtaccaggcactgtacaggagttacctcaactgtgcctcacaaccacccttgtgataggcacttttaaaacccccattttacatatgcaaaaacaggcactggaaggagggtaagagagatagaccatgaagccgagttagggagtgaaaaggggcccctggacatattttggagggctggtaacatttttatgtagagaactttgcaaaaatattcagggatttttctgttacctttttttcctttagtgcattttcccactgatttgcaaaaggggatagatgtcttaagccttccagttggcatctaggattcagcctttttttttttttctttcagacagtctcactctatcgcccaggttggaatgcagtggtgcaatcatggctcactgcaacgtcgacctcctgggctcaagcgatcttccgacctcagcctcccgagtagctgggatcacaggctcgcgccaccccacccggctaacgtttaaaatttttgtagagatgccgtctccctttgttgcccaggctgatctcgaactcctgggctcaagcgatccttccgcctcggcttccaaaatgttggaattataggcgtaagccatcacgcccggtgggttcagcaagtttttacctacaagaaaatattttggtgaatgttacatgttttctaacggctgcatagaaaggggttatctttatacagataagaaaaaaatggcaacttcaaggaacacttcagggggcttcagaccctgaggggtgttcctattctactaaataagtaaatttattaataaattctagtctctagcttgcaaggaagactacgtttcccggcgtgcagcgtgctggccgtaagcattacgtcctccatcgcgggcgcgcaatgcacctcggggatggtagtgttctggtggcccaacggttttaacagcccgggaatcaaccaccggaagtgccggccctgagaggtggagtcggggtggcagcggcggcggttgccaggagcccgcgttgcagcctgagatccgtaatatggcggggaggaggaggagaaggcggcggcggaccgagctgcgctctgtcagtaccatttgagccattcgcttcctgacaaggcccgtggcgaggggagaggagctgaaggggccgtgggggatcaggtgtgtgcatgaggagggggcttgagccttgacgggtccgg

SEQ ID NO: 1242909 - DNA, 4001 bp, Homo sapiens
tctggggaagcagagaggaggcatgagctgcaggggagccgtggtgggcattccagaggccctactacctgcaggatccaagtcacatcttggggctgggtgtggtggctcacgcctgtaacctcagcagtttgggaggctgaggcaggtggatcacctgagatcaggagttcaagaccagcctggctaacatggtaaaaccccatctctactaaaaatacaaaaattagctgggcgtggtggcgtgcacctgtaatcccagctactcgggaggctgaagcatgagaatcgcttgaacccaggaggcagaggttgcagtgagccgaggtcgcaccaccgcactccagcctgggcgacagagagagactgtgtttcaaaaaagaaaaaaaacaaaagtcacatcttggctctgtgttcgaggcctgagttcacacccttttcattgccaccgccacgccactgggaactctcccagacccctctagctcgggtccccatgctgggtgggctccagctctggggaggaggggcccctggaggaggaagaggacgggggaggggtggggggactcacggcagccttgcatttcttcatgaccgagctcttctccgaggcccagatggtgatttcattacggtcatagcgtctcaccaagcctgctatctgggaggaggagaaggaggtgaagggagagccaggcctctctcacgcccccggtggccgccctagccctgcctgcagcaccacctcacggatgagctcttcgttcttccctttgatctctacgctcatgggtgtccttggaaacctctggaacaggtcctccagacgaaccatgcgccggtctgacccgtgagcaaagtggcctgggggtggtgtgggaaaaggggtcagagggaagccaaggcggaggtccaaggaaggcaggcatggcccaggcagggctcgaagcccttgctctcacctggagagaagtaaacctccagcttctccttgtagaggggcaggtcctggggaggacaggaaggatgtcactagaggcccgcattgggcatggtgactctcagggtgggggttggggtgtcagggcagggcccacctcgaagtccaggctgcccacatccctgtttaggcccgactggcggcacaggttctcatcatgtgacaccaccaccactctgtcccgtgtcagctgacagtcgagctccaggaggtccgagcgctgggccatggagctgtgggggtgaaggtcagcggggggcaggggcaggggactgggatgaggggcatggtggctgggaggtggccgggaatgtgagagcggagttcgtggcgggatgtgcaggccacctccagggggcgccagtcacccagctaggaagtgaatggcgtcccttgctgtgatgcagtccacgacctgcacaccctcacatggcagcctgggcaggggcagatacactcacttctccatggcctccatggtgttctccagcagctctccagatcctgtggggggcactggagtgggcctctggggcttggggtctaggggcctggcccaacctcatcacccacattccctctctgggctccatcctccctctggcctcacctccccagccagcccaggctgcgccagcatcttcttcctcgtccacaccctgccctgccacttcgctctccttctctcttggtccctgccccgtttctagcatgcccccttggacctacccctctgtgctgtccactttggcacctgttctcacccctacccggctcacctcctcggtgggcccccaggcggatgcggaaggtgggagccctgggcgtgtgcagcagatgaggccggcgcaggaagaagatggagagcatggcatagctgcccagggcagggagggcatagtacagcaaaaggctcatgaccgtactcccacagaagctcctgcagccacacgctcagccgtccgcgggactgtgctgcctgcctagccagtgtgggccggctctactactggccactgccacgcccctgggacctgctgagcctgccgctgggctggcttggagccaggctgcagggttcggctgaagctggggtagtgtcaggaggtgaggcaagtagccctggctctcatatccccaggcccttcccagcccccagcagccccgtcctgggctacatgaggggagtaaaaaccacccaggactgtcaggacctctccctctcactggtacttgtagccagcgcatccaacatgcctaccccttgccatttcagaggatccaggggtgtgtagggtgctcctgagtcaccccgaatcacccccagccagttagacaggaagccattagcgagaggacaggacagtgactaaggggaaaactgacccccttctttctaggagtctggagctctccagagccccgtccccagccctgggcagctgggagtgaagggcaccaggcccctgaaagcccaagtcaagtctgtcctcagagccgcacggggcagggcgggggcgtcgcgaacacagacagagccagggtcagccatagacacatctctatatttatatattagacgggtcagggaggtggcaggggcgccgggctctccacgccccccagctccacttctgctcaccacacacagaagcagcgagggcacgcgaagtgacagctttgacagggaggggattcggcccggcctggctcctcagggatgctagcccttgagactaaggaatgttccttcagggaaactagggtggggtttgaatgagatgaggggggcaggcatggccctgagtccctactcagcgccccccaccctccacctctgcccttcagcaggttggggcagccagaacccttccattccagaactgccagagactgggacgctggggaaggtaagggcgcagcagcagcagcgggagattgaactggggccacctgaggtcccgaggccccgtggggagggcgggtggggaggagaaggccttggcctgcctgaagctggaggcctcagcaaaggagagaggtggccaggcccatgctccaccccggcctgggctgccaaggtccgggctgggcacagtgtccattttctaacagtctggcgggagaggggcaggcaggaggcaggtcctaaagagagaagcaggcagaagaggagtcgttagcaccccccgggcagacccactggagccctgacctcaacatctctcatttcaccctcacagctggataggctgggtctcagtttccttatctgtaaatggagataataatagtacctagcttgaggtactgctgtaagattaaaggaattaatacatgtaaacctcttagaacaatgcttagggctttatgctttcattattagaactgtctcggccgggcacagtggctcacgcctataatcccagcactttgagaagctgaggtggtggatcgcttgagcccaggagtttgagactggcctgggcaacatagcaagaccccagctccacaaaaaaaaaaaaaaaaaattagccggttgcaatggctcgtccagctagctgggaggatcccttgcacccaggagttttgaggctgcagtgagctatgattgcaccactgcattccagcctgggtgacagagcgagacactgtctcaaaaaaacaaaaccaaaaaaaaagataaatagattgactccggaaactgaggcgccgagaggtgaggtgccttgcccaatatcacacagcacttactaagtggcacagctggagtttgagcccaggtgcgcatgccttctttctatcaggccacacctggctgaagacaggaagagaccggaggaggcaaggaggcagcgtgggtgggggcaggccagtggggtccccacagctatgtgaactgctgatctggcagcaggtgtgaggaggcctggcaatctgggtcaggctgggcgctgctgggcccctcccaaagcaatcatggccccacctgcttctg

SEQ ID NO: 1242910 - DNA, 4001 bp, Homo sapiens
tgtcctggggaccacccaactgagacacaacaggctctggctgtgatgcactttaatgagtgccctgcccctatccaaccatgcctggctagctgtcccatgagctctggctgaccaccctctagtcacaggagccatccttccagccgtcgcgccagcgctcatccacttttgagcagtcgaagtcaggcttgcccagcttgcggttcacttcattgtgcaggtggcacagccactgtgtgaagcatgcccgggtgcgggtgtctgggtggttcctgcacagcctgtgtagggagagcaggtaaagaatgagaggacgcagcggctccactgcccctgccagttccctgtctgctgtcaaggaaggagagctggggcactgctgtgaactacacctgggagtgcccttatgctccaaggtacaggcactcccagaacagggctgaccctgcagctccccgggtgtgatgaactcccagggctgcgcaaacacccacctggacagcttggcaaactccaacgaggcctcaaggcaacacattacagcacagacctggcaattttataagctcctaacacccaggaagcggcatccagtgtccctggcctcaggcagagtgtggcctgggtggggctgggcacagccttgtaactgaaaactggacttgtttcttagcatctgagggcaggccctggtgcgtcagttcagcaagagacttcattctaactgaccagccttatagcaacaatggcggctctaccctatacatctggcctagaaacacctgcaagggccagtgctggctcttggatccctcagtgaggaagagatggctcttgggagcaaaagcagtggatttccaagattttaaaaccagaagtcctactctagaagtcaggcaaagtggagtcttccctaacttgcgggaaaccgccttcagtgccagacaaggcagggaatcccttcctggaagccctgtggctgtggcaggagcagtacccagcagcagatcccgacagcttggcttctgagacgagaggaggaggctcagatagccccagtcctcacctgttggaggtccctgctcctcagcaaacttctgccacctctgcatccgtttctctacgttccccgctataacgtcagccaggagccccaggcccaggctccagtgcaaagctctgctgcgtgcaaacacatcttacctttttcttaggtcttcagcacactcctcacaggggtaaaacttagaaaataaatgtatgaactgggccatgtcttgctgctgttctggggtgggcaggtcggggtagtaggcggccagggtgtggaggacagcccagctgtggcggcccagttcctcgcgatccggcgggcagtcctccctaaacttggtgtcccgctgcggaagcaggccgaccgagagtgagttcattctccgaacaaaggcgcccaaagctccccactgtacggcccagccggtggcccactggactccggccaaagtcctgcagacgatccaacccacgcgcggatgaaggctgtaaggccgggcctacccggggggcaaggttcagggacaggcaaccctgggaagctctgccggggtacctgggcgggggcggggacaggggctgcgcggggctgggagaaatcgggcagggaactgcaccttctgctgcgtccgcatccacgtcttgaagtcgacgcaggcccggcacggccgcctccgggaggcgtcctcggcgacaggagaatcggaggtcggcgcctgggctggcgtcgaggccgaggcggccgcgtctctccgccccgcgccccggccccgcgcgtcggtcgccaggtcgtccatcatctcggagcgcgcgccccccggcaggaagaagaggttcccgccgtggaagcggccccgctcgccgggcgccgccatgttgcccgcgcaaggcctgccgggtcagctcggcctccagatgagcctccaggtcagcctccaggccagcgcgcggccacaggagccggaggcgcgcgccgtgctcgcgggggccgggcccgagccggggctgggggcagagtcgggggcggtgcctgcttgcgggcccgtgtggaggcggagccagaggccgcggcgctggccgggcccgaggacaggggcggggacggagcaggagggtcggaccctgctggcgccctcaggcgtcgatccgcggcgcacgcaggggttgcgccgtccgtggcggccgtcccgctttctccagtaaaagagcagtgtgtggcgcaaggtgcgcctcggccgcgctgtggacccgagctgacacccaggcaaagtccgtgttgcggcccgcgacgtccccatcgctccgttctgagtgtcctgcgtgcctgcggccaggctttgtgccctccgctgaggggcgcgtccacccgctggctgccaagcgctctctcaacgcgggccgggcgtgaccgcacagattgcggcgcgcgctagggtcctgggctcttgtcccctccctggcgccatggcaacgggcgtctggcaacgcagggcgcggcgcggccgcagagggttggcgcgtgccttgggctccctggcgcccctcgccggctgtcgcggatcctagagcctgggatgaggggtcgggctcccggttggagcggcctctgggattcctgtgcctccttgcgttcatttatccattccgctattatttgcgcagtgaccgctctgttccaagcgctgttccaagtgctgggcagagcagggaacacaattctgttccctgaccttctctgttcataatccagtggtcaagacaggaaaaaaaaacaaggactcacactcataaatgttcacgtacaaactggtgggtccatgcaagggtgtagtaaatctggaaggcctccttgaggaggtgaccctttctgaaggatgaggaatcagctgaggagcgccttcgagaccaagcccaaggtggcagggtcttggcattttgcaggaacaaaaacgccagtgggacgctagggagggttgtaaggtgggaggggagatccagggacggacaggggcccaccaaagacttggtcggcagcttcggggattgggaatttattataacggtaggagggaagatgctagacagttttgggcaaggttacccaatctgatcccatttcagtttgctgcagattccgctggctatcatatggggagtggatttcttttttttttttgagacagggtcttgttccgttacccagggtggagtgcagtggcgcgatcttgttcactgcagccgcgactgcttaggctcaagtgatctcccacctcagcctcccaagtagactacaggcacacgccaccacgcccagctaatttttgtatttttggggggcacagatggaggtctcaacatgttgcccagactggtctcgaactcctgagctcaagcaatccccctgcctcggcctcccaaagtacttggattacaggtgaggcactgtgtctgtccttggagtggattttgtaggggcaagtgaggagcatacagatggagggtggggtgtactattcaggcaagaaaagagggtaggggaggaaaaagtggaaaccatgcagggctgatggggtgtggggcaggagctgtcagctggggtaggcaggtggcctcagaatccctctaggcctctgcttgtgaataaatcctccccagcttctcctgtcttccaggggagcaaggtctcccctgggttcacacgctggaccccaccaggtcagctgggccctcagctgagacagggagaaggtgacagctggctgggggaaccctgcaaatcagccctatgtgagcaggtgttcattgcccatgccaagaccagggacagcttgagggcatgagagagagtgctggtgggacagacacacaaaggccctttgttgcagccagggcagcttcctggagggatgccttagaggctgactgctccctgaaggggctggagt

SEQ ID NO: 1242911 - DNA, 4001 bp, Homo sapiens
aaaatcacatagttctaatttttaagttttgggtcagaggaggctttctaaaaaattgctagttctactaccaatgtgttctagtattactatagaaatcagatagcaattgccctagcaaataaaaataataatgagggctgggtgtggtggctcacacctgttatcccagcactttgggaggccaaggcaggcagatcatctgaggtcaggagttcaagaccagcctggccaacatggtgaaaccccttctctactaaacatacaaaaattagctgggcgtggtggtacatgcctgtagtcccagctactcaggaggttgaggccagagaatcgcttgaacctgggaggcggagattgcagtgagccgagatcgcaccactgcactccagtctgggtgacagagtgagactccgtctcgatagatagatagatagatagatagagaattagacccagaccaatgattattccatggcaaagtgggaaaaccaggtggtaagagataacctctcacaacagaatctttatctgtgaaataaggattcgaccaacagaaccgtctgttgaaaatttcctctcttggtccaggcaggttctctaaactcccaatcccaaagcagttaattttttcacgtttcctgtaaaatggatggccttaaaactcttttgttctctagtgtagctttccagaaggaaataagtttccttatcaagaatgaatctagcttccccgactcaaaaacaaccatcttctctatattgctccatatcacaataaatttaagtgccttccttttctaaattaaatgctgttcccttcaacttaagggccacacactaagggctattcctttagaggcttttgggccccacagatcacaaaggtggtgccctgccctagttctttctggacatttaaaaggacatccactttcttgccctcaggataacattatgggaacaatgaacataaataagacagttaaataagcttccctgatgcctatccaatacagctttcaactcttctatcctgccttgttctttagatcgtgctgtagtctggagggtaaactcttcacacaaccattcccaagccctcatgtccctgtccactcttcctccctcaccttttaagtgtgatagggccttgatgggaagacctcacttcaccttttgtctcaagtccatctgcttccttccagagctacaaatacaaaggtaggccagggccattgagacgtggccatagggcacatgggagctggcagagccactcgcaccttctggggtgtcccttcttccacctgtcaactgaacacccgtttcttaaagatttatccccaaaagtcccatctcattctgaaaggggacgaaccagctaccccacgagccctttgtctgagcttctacacctcacacatcctcatccacaaagcgtccatcctcacacagtcaggtggtccgctcggcacagggcgggggagactaggtttttgcatctggtaaaaggatgggttatgtctcaggttcttccaggatcccaaatcctataattctaccaccaagcctgcgggtcctatttctgcggtggaaagggcgaatcccaaggcgaccctccactccacgcgcctgcaggcagttggaacaagccccctccaaccccggctctgcgggtccacgcctccaacctccggcgccgggccgcggagaaggccctgtcggcgcccgctcccggccgcgccatgccctctttcgccctcacccgccaccggtggccgcctctcacctggcacgctggcatcgcccactccgcgctgcactggaaaccatgggtccgacggggtctcgggggccacccatccgccttaaggaaggctggcggggatgcgcgggcccgggagtccagggcgccgccaccgggaacgcgccgcctggtttctaaggaactgggggctctggaaagggaggggcgggacggcaggaggactgcgcatgctccataacggggatgggcctgcgctgggaggggccgtagccgggagctgcgcatgctcgctttttgggggcggagcttaagcagcctggctaggaggctcaggttattcatttccggcggcggaggcggcagtttcctaagcttggcttctctccggtccgctgaccggcgtcagggaccaggttttggtagctgtgggtagcctcagttgtcctggaatgaaagacggtttcgtgttggacaaggacatatctgcagaaggccagttctctcgaactcgtcggacttcctggctccctgacccccagtgactcgtttttccgttttctcaggtgcctgtctgggctcctcttcctctggatgttttttgattgttccttaaatatcagtgctcttcaagactgtaacctcagtccccttggcctctttactgaagcctatgccccaccaaatagcaaactatccgctagagtaaggaagccgttagaccttagaataaaactgcctgtgtaggaaatgtgattggggtttgtatctgcatggggagcccccgtccctgcttgtctgaccctcctgctgagtatcaagatccccactcagctggcattaggatgatctcccagccatcattccagagcagcctgtggtgacagaatatgtcagctgacctaagcgtgaggcagttcctactgagatatgctaactagcagcagagctatccctgctttgagcggagacaggactcctaccacctctgtgaggagcatggaaggcttccaaagtgatgagaagttgtaacccctaaaccccccctcttctgatgggattttatcctttctctcctggatcctctagagccaggcagaaggaaggcagagtcaaaatgtgcctgtttgatctgtttcttagtcattgttcggagttccactcttcttgagtaggatttctcaacagtggcactattgacattttggacctgataattctttgttgggcaggggtggggggagctgtctgcattgtaggatgtttggcagcatccctggctctacccagtagatgccagtagcaccccaagcccagttgtgactaccaaaaatatctccagacattgccaagtgtctccctgggagcaaaatcattcccagttgagaaccactagtctagggggaaatgagcctactctggctttacttatatagaaccaggactttatgcttaatctaaaacccatattttcccctttatgctacctcttccctaagagcattctatagagtaatagtcctgtaagattctgctgagtgacacagtctgtagtaacttaagtttggaaagtgcagggttaagcaacacattttaacacaggattgagcttttaattagctggtggcgatcactgtgaacatccataagacagttttcctaatttactggaccacctcccaattccagtgacttttttactggcaaacctcccctaatttactggcaaacctcccaattccagtgacttttagccactgcctgcccccttctgttctgtgttattttgtggtactattatccatcccatcacccccaaccaaagtctgcatttgccttgtctcttgcttctcctatttccctcacattcagttattcatcttgtacctccaattctctcctaaatctttctcaaacctgccctctttgcagcctcctacctgggttcttttgctccaatttgtctccagtaccaccttcaggtggacaccagcatgatctaccgtatccctcctctgcataaaaccctggtgcctcggggacagggcaggcaggagtgggccagtcacaccactgggcatcctcatggaggaaggatgctcatgtgtactgtgtgtatccctgtgtgccaaacactgctgtatatctgccataatcctctacctccacggggcagaaggatttaccatgttttaaggatggggaaacagtctcggagaaagaggttaacttt

SEQ ID NO: 1242912 - DNA, 4001 bp, Homo sapiens
ttctccttcctcattctcctccatctttaaggagcaaaactacgttacaaccacatccctcctttgctatcagtgggtgcccctgcaggtctccccctgcctgtttctgctcagccttcagtcttctcttcccatctgcctcttcaatgctggggctccccacgctctctttccaaacctctgctcttaatatacgcaagcttctcccgcaagctcactgccaatgaaccagactcccaaaccgtacgtcccacacttgccctctccagtgccaaccagctgcctagagggcatctcttttttgactatgccacaagcacctcaaactccacatctcaaccttctctgcctaaaccagctcctcctcacaggggaggcatctgtaacccaccagttcctcgagcctgaaacccgcgatctagcctagatttctccttgtcccctgtctgcattccaaggcaccgaggctgctgactacgcctgctcattgcttctccctctccccactgccttagtcctcctgcggcccccaaccaccaccaaaagagctttttagccgctctccctgcctgaagtctcaccctctccgcccaatttagcaccatatggctgcaagtgacgcctttaacaggcttccttgatcagattctccggctgaaaactcccaaacagcaaccccgccctcggataaaacataaactcctttctgcagcacacaaggctcttgaagatctcgccccaattagccgtgcagcccctttcccggattcctgagctttaggcttgcactccagcggactgacctacttgttcccggagtgctccacattctcttgtccccagcttttgcacacgcagtttcttctgcctggaatgcggtcggctgtgacgacccccaggtaaaccaactcctaccaccacaggtgaaacgaacgccctcctcctcctcgccaatcccgttagtaaggtgatgtgactgccggcttgtacccactaaaaaatgttttggtgagcaaggaccctgtgttatgcatctcagtgttcctggcacctagcagagctgggtacaaggggaatattctttatcccctttgaacctcaatccctcattggtaaaacggagataataataacccctaagatgactgtgaagcttacaggagacatgcagaagaattctggccaaagggtttgagcccaaccagggtaacataatgagaccccgtctcttaaaggaaaaaaaaaacacacatatatatatatacgcacacacacacacacgtgtgtgtgtgtttaaaaaaaaaagtctggccaaagtaaacacaaaaggtaaaaaatttctttttgacgcggtagccagatagagatctttctcagccccaaacagactgcatgtcttgcacgactgcgtctccttaagcctcaaggtccccgcttccgtagtggggttaataatagaagccagctcggggtgggaatgaggattaagcaggactaagccgctgtgagcacagtgcctggcgcaggggaaagcgcaggtcacgtagccattggggtgggggtcggggtcctgtgctgctgctaagttggggggtgggcggagggggaggggcagagctcagaagggggccgctgccccggcggatgcttggggctcctctcgggggacccctgggcgatcttccccaccgcgccgggcccaggccccctacccggccgccggcctcccctgcggccgcccgccccgaagcaaggccccgggaggcgggaagcgaggcctcacgtgcggcgcagcggctgcgccgaaggcctgccaggctactcactgagccacagctccagcgacgctgccgggcccgggggaccctgggccgactcggttcccgccacagccgccgccaccgcggtcgccgccatcgctccagccccgacgctgcggccgcgggcgccactgcctcttcagccgctgtagcgtcctggcgctctcctctgctgactgcgcggcaggagcggtggacacgtgacggggcggggccgctggcgccacgcccaccccaggccccccctccacgcgggaccggccggaacatttcttagtccagatccctccacccagcgctggtcttctaagaccactcaccgtacggttgccagataaaatacaagacgcccagttaaatttgattttcagaagaacacgaataattcttttagcatttttattttttaagagacggggtcttgctctgtcactcaggctggagtccaatggcgcgatcacggctcactgcagcctccacctcctaggctcaagcgatcctcccgcttcagtctccggaggagctgggactaggggagggcaccaccacgcctggcgtgtgtgtgtgtgtgtgttagagactgggtttcaccgtgtgtgtgtgtgtgtgtgtgtgtgtgtgtgtgtgtgtgtgttagagactgggtttcaccatgttgcccgggtggtctcgaactcctggtgttagagactgggtttcaccgtgtgtgtgtgtgtgtgtgtgtgtgtgtgtgtgttagagactgggtttcaccatgttgcccgggtggtctcgaactcctgggctacaagatcctcttacctcgacttcccaaagtgcttgcatttattttttatttttctttttttctttttttgagacggagtctcactctgtcgcctaggctggagtgcaggggtgccatctcggctcactgcaacctccacttcctgggttcaagcgattctcctgcctcagcgtcccgagtagctgggactacaggtgcatgccaccacacccagctattttttttttttttgtatttttagtagaaacgagggttcactatgttggccaggctggtctcgaactcctgacctcgtgatctgcccgcttcgccctcccaaagtgctgggattacaggggtgagccaccacgcccggcctatgtgcttgcatttttattcacagaagggttttcctggaacactttttttttttttcagatggagtctcgctctgtcgcccaggctggagtgcagtggtgctatctcggctcattgcaacctccacctccctggtttcctggaacacttctaaactaacatgtcctgcattcctcaatactctgctttattttctgcatcacacagtacaccatcgatgtattatttacttgcttattctgttaaaagataattttcccaaaaaagtatgtcatgattatcataattatgaaatgaatacgtgttaaatattttatttaattacatgagggaaccaagcagatgttataatcaatccaaaagtgaagtcaaagaagggcaaatttatctggaaaaaaaggaagataagacgaatgtgcaaatggaggcaaaactggcttttcgaccggggtgagagctgtccctccagtgagcggaatttacctatttataggcaagaattattttgcattggtatcaacttaacagagttatgagacttctcaaagacaaagaaaggctagaacctggaaggttgtgctgtctagacaacacataattttccattgaagctgttgtgccgtacccctattaacttcagtagggatggcaccatgtttgaaaggcggaagaagagacccagagccactgaatgaggcaggtttactgaggggacttacggggtggtctagtggcagtgggctggacaggaggaccactaccatttgtaaagagcatcagtttatatagtattttcaactagcacccttcccctagcaacctccatctggcaacctcaatttaaccccaaagggccttgatcccccgtatggcctgcgttccacaggatggggccaagggttcagatgttcctcttagataaagagtgaacctctgggctggccactctgtgattctgtagcttggaactcagaacacacattcttcttagaccataggtacgtatgccatacagaagcacaaattcttccttgtag

SEQ ID NO: 1242913 - DNA, 4001 bp, Homo sapiens
ctgccaaggtggccagatcgcttgaccccaggagtttgagaccagcctgggcagcatggcaagaccccatctctacaaaaacgcaaaaatttgcagggtgtggtggcgcacgccagtggtcccagctacttgggaggctgaggcaggaggatcacttgaacccaggaggtgaaggctgcattgagccgagattgcaccactgctctccagcctgggtgatggagtcagacccgtctcaaaaaacaaactacaactttcacacacaccaaaacctaacatgacattactaacagtggttagcagactctgctgagaggtgaatctggaagtattcctttcagctgatcagtagataacggaacagagggagcacggacctagtcaggaaggaggccccatgcctccaccccgtgggagagggcgtcaccccaagcccagccccacccacgcatcaaccagtctccaccacatccttacctacatccatccactctggagggagcaggcgacatttctgtctttgtttcaggttaatcgccagccacaggggcacttccacgggtaaaccagggttaaaaggccccaggtccccctgccaaaagtaaaacaattccccgtaagattgaaaaagaacaaaaaaagcattactgtgcgttactgctatcaaataagaggcaaggcattgcagaggctgaagtccaaatgcaaataataaaaacccaactgttaccagactcagaacaaagcgcctcctgagcggctccgagacacctgcgagcgtggggctcagtccttctggcctttccgcggacaggatgcaagtctcccctgagtgggtggggggcgctccctctcccgcctgcaccctccaactccggaacaggtttcacacacccaatgttggggtcctggggtgcggggaggtgggtctgggcaggtacagagcctgccctccttctccaggactcccagcgccgaggcgcctccctcatactgaaaacgcaaagccgggcgggcgcgggggctcacaatccagctactcgggaggctgaggcaggagaatcacctgaacccgggaggcggaggccgcagtgagccgagatcgcgccactgcattcccgcccgggcgatagagcgaaactccatctcaaagataaagacaaaaacaaacagaggcaaagccgacttttgcccataatcccagccctttgggaggccgacgtgggaggatcgcctggggagcccaggagttcgaggccagccgcatctctaccaaataaataagccgggcgcagtggctcccgcctgtcatcccagcactttgggaggccgaggcgagtggctcatgaggtcaggagttcgagaccagcctggccaacacggtgaaaccacatctctaccaaaaatacaaaaatgcgccgggcgtggtggcgggcacctgtaacagcagctactcaggaggctgaggcaggagaatcgcttgaacccgggaggcggaggctgcagtgagccgagacggcaccactgcactccagcctgggcgacagagtgacactccacctcaaaaaccaaaaaacaaaccaaaaaagcccccaaacagatcaaaaaaaccctgtaaacccgggcgttcggggcactggcaaagagcgcagtctcgctttcctcatccgagaagcgggaacggcggtgagcgagtcaagcgccgagtggtggcctccgcagatgcgggagcagggcgagcccgcgaccccggggctgaaggccacgcgggagccccggacgcgcccagcccggcctcccctccccacggcgggcccaggcctcaccccgatgaggtagatcttgtccagactgaagttggggataatggtaaccagctccttctcggcgaggaattcgacctcggcagcgtccatggcggcgcgagctgcaggccagagcctcacggtctcctcgggcccctcagcgtcccggaggagacgccgcggccgccgttttcccgccacggcgagagcccgccccggccggaagacggcctgcgccagcctataggaaggcggtagacagcctataggcgctgtctgcgggcgggggggcggagaccgcgctcgcgaagagcccgcggattggcaaggccgagggaggctgcgcgccggccccgccccggcccgcggacaggccccgcccccaccccggccccgccccgcccgtgggcgtgcacctggcgctgtcaggatctcctgccgcgggcgccagctttggtgtcccttcacctgtccccggcgcccgccgcaaacggccctaatcaagagccgggggtggggttccgggccgcttctacgccggcgttccgcatggggccaagagtaaacgcatttattttattttaatttttaaacaacttttcgtggatttgggatcttgctgtgttgctcaggctggtcttgaacttccggtctccagcgatcctcccatctcgacttcccaaagtgctgggattacaggtgggagccatcgtgccaggccaagagtacaagcatttattggcccaaactcagcaccgggcccgggactaggcatcacccgggctgacagatagagggatgagggaagaccttgtttccattaatttcacaatcttctgccctctctgcacacattgtttaaaacagctgtaaaaatgcagattcctccatcccaccccacagcttccaattcggacacttcagagcaggagctcagaatttgcacttcggcaggagccccacatgagacaggagcggcaggtttgcaccacctgagcaaatactcacctgctcgctggaccggctgcccctgtacagtgggcgcaggtgaagccagagcggtggctggagctcacctgtgtcagaatcccctagcgggtgcccattgtctgtgtgcacgctcctgggagttgggattccggagtcgtggaaaggacagaaagctgaatttcatccagggccaggtgattttgatggggtggtcatggccggaaaagcttcctgggggtgaagcgctattctaggactgcagtcgaatttgaaaccttgataattaggcccgcgagaaaaatcacaggagacatgaggattccagggtttggaattccagcagaaagcaccccctgcccccgccccagctaaccggatgctctcctctccaacctccctgaagccccatagagggtcactgggaaggtgaaaaaaagccgtaaagctcacaggcctgctcacaaagctgtgtctgttgtgtatctgccttagaagttgttatttacagatctggagttttcgctgagttactttcatgtgtgaagacacatactcttggccaggcacgcctgtaatcccagcactttgggaggccgaggcagaaggatcacttgaggccaggagtttgagatcagcctaggcaacatgccaagaccccatctctattaaaaaaaaataaaaacaaaagagaaaagacagatatgctcgaagagaagaaatcaaaggtcactctggatgctatgtgaccaagggcaagtgacaactctgaacccctgtctctttatcttcaaaatgaagtaggaagagaaggagcctgcagtgttcagggaggagggggagctgtgggccatctggcccctcccacagtagaagctccctcaggcagctgcagacgtgtgtgccagactgtccgggttttgactgatgagggaatgttttcttcactggcaaatatttgtgttccaaagctgacgagggtttgcgtcctgatttgtccagcctataaaagagcaaaggaaaagatgagaaagctgaggttcagagaggctgctgagggatgggtaggagggctaccagagcctggctgtccacatcacagagcctcggcatccttatctgtaaaatggggacagggctgctgttagcctcactgggctttggaaagaacaggatgggaaagtgtgcagctttacagattgcagaagg

SEQ ID NO: 1242914 - DNA, 4001 bp, Homo sapiens
ggcctagatgacagggtaactccgtgtcaaaaaaacaaacaaaaaaacaaaaccaaaaacaaaactacccccaaaccaaagatttccaactgaggaacattttacaaaatacctgaccaccactccacaaaaccgtcgaggtcattagaacaaggaggtctgattaattgtcacaaccaagagaaggctaaggaaacatgtctactaaatgcagtgtggtatcctaggtggaatcctagaatagaaaaagggcattaactaaaaactaaggaaatatgaattaagtatgggcagcatagcgccatgtttaccagtgtgtatgggaacgaaatcctcatctgctaggatgaagtcaacagataatgtctacattaaaaaaaacaacccaacaaggtaagtttaagaatattatttagaaatatgaagatgaatcttgaagacaccactaaaaaaggtacatgagccctgtggacttggagggggaagtgggaaaaggaaggcaggacctgctattttttttcttataaatcttttggtactatttgactttttttttttttttttttgagatggagtctcactctgtcgccaggctggagtgcagtggcacagtctcggctcactgcaacctctgcctcctgggttcaagaaattctcctgcctcagcctccagagtagctgagattacaggcgccggccaccacacccagctttctagtagagatggggtttcaccatgttggccaggatggtctggatctcttgacctcgtgatccgcccgcctcagcctcccaaagtgctgggattacaggcgtgagccaccgcatccggcctatttgacttttaaaacgttggttatgtattactttgataaaaattaacttgaaacaaacagaccaaacaataaacatcgttctatacaaaacttaggtgaaacaggatatccaaattaatcattacaagccatgttcctgggacaattttatatttgaagccatatggccttgggttccgaatcccagctcaccactaactgaagccctggccaagtgacccagcctttctggttgctgaaggattaaagggaaaagcttactccccacacccaaccatgctgccactaagtaagcctcagtagggcttactgatcctgtcatcattatggaggaatgaatttagcaacttggggttcctacttatcacatgctcttacagaacccaaagctgttttaaggcaaacatgatcagaactctaattcttaagtattcagctggagccaatctttaagcattcaacacacgttgcatggggtagggggaagacactaatttggacagtttcaaaaaagaaatcaatgttggaggctgcctggcgacctaggataaatgtagtttcaccacagatggcgaacaagaagtctggagaccaccccgagcgcgaagggacccccgcggagtttccgagaagtcgttagcgccttcggccctggctcctcgaaaactacaaatcccaaagggcagcgcgccccgatgcggcgtcccagggccgaggggcccgccgggagctgcagtctttccgggcaggaccccgcacccaaaggctcacctgtgggaccgcgttgtcagtctcggcgcctgcgctccgctccaggaagaaagcgccaaggcgaggcatggcggtctccgtgcgcaccggcagcttctcgtgggacatcaggatgtcgtccaaagaaagaaagttctcctcaggccccagcgcacccgactccactcggaaataagcctctgacatggcggccacttgagcttctccgcttccactcgcgtgattcggaggagcctcaggagttaggggtgtacaagacggggaagcggagactgggcaggatggttggggtcaggaaagtggattgaaactcgtttcccgcgcccggggacgcatcagacaggagcagtcaattcgggcggtaccgcccaggcagaagcaatcgatcaagtctgcagatttagagcagcgggacacggctggggagcggtaggtgggggcgccggaagttctcttccctccgcttgctgcacggtgtgggaacgttacgaagaagctggaacgctcgttgaagctcctggacccatttgtactggattgtgttcatgtgatccttaactatttatatgaaattaaaaacactttgcaacacttttaggggtttaaaataaaagcatcttgtgcccttcactccaggcctaagtccgaccctttcctacagtttttttcactatgcaactccgttaatcttagtatttgaaagaaatgttaaacaaacaaaaacttccagcactatccccagcgagttattatggtctagatgatgaactagtgtgttgtattttgttagtattttggtgggggttggacggggtgggtagaggggtggagcactagactgcacatggcttgctaaggttgtgagtatacttcagggtgtcttagctcatcatcaactgacaatctccttttgtggctctgaatttaaatccctaaaaatggaaatccaattggtccagtttattgattggtccaggtacgccacaatggtcatagatctccagccaccctgtagatgggggtgcctgtgttgggtgcgatcactatccagtgaccaggggaaggaccatggtcgcatagtaccaggtttggtggctctcctcagccagggctatgggtggcggcatattgttgagagatgcactacagaacttacttcgtctagagcatttctggggctactggagccgggagtaaagggtgtgtgtgaagggaggtgtgtattaaccatggattttagtttctgttttctgtattttatgatgctttgacatcttggggccttggggacctggggaggaattgcccctttcagagttagctaattcctagagatagcaaacaacttgcttgtgaacacccctttcatttacaaaccaaccaacccaagcctatatccccacaccatctttatccatctcacacaccaatattttccctgccccaagtcactgtaataaaccaccccatggccaagtaccagacaactaaaattcacctctatatcccagagcttgccaacattattcaaattattcaatcctaagcttgttcagacttcccttccctgcttcgcccattccttcccacggcaataaaggctctgggctttctcctcgctctctctacctcctcattgaccctaatactttctcgtgtggccgtaggcacagccccttctcttgagaactataataaaattttcaaaggcattggccactaactcattgattgtcatcacccagtcacctttataaatgaaattctgaggacaatgaaaacaaggtgcagtggggtggaaaggaatggccaaactgtggaaaatcttggtaccattctaaggagttaggccattccatagaaaatgggaggaaaatgtaaggcaaataataacataaatctgggcttcaggaagagaattccagcagtagataaagaagagagagattagatgcttggaagctgttcagtgggcagtatttggcaaccaattggatataggaagtgaagtatagtgagtagtcaaaagattcaagttttgaacgtggctgaccaggtggatggacatgtcatgaatagatacacagaacacaggaataggggcagctggagggaagggatgagttcagtttgggacacatggtgtccaagagctactagacaggaaggtctgcagcccagtggagaaagcagcctagaagctttagagaggaggcacactgagaggcagttatatgaaggttttttcctttttcatattttaaatgttcagtttgtgatacagtccaatgtaaaaataaacacaatctgcagtgataatttagaatttctctgatgacatggaatatatggtactggatgtagtttgagacagaaatataatttggctaattg

SEQ ID NO: 1242915 - DNA, 4001 bp, Homo sapiens
aggaaaaaacattaaattggaaatttggtccctccacctccccccaaccccccaaaacccccatttccaatttatatgacgcctttcctcctctggagcataaaactgcctcctttaagtggaggtttccaaatgtccggaatacacatgaaggatatatacactccttgaataggccactttttgccactttccctaataatgtgctgtttctaccacaaactactactaattgtttggtcaccagtattaggatcctagtttgatgaaacgacatctattatgtgtcctcaaagagcgaaaagaaaattccaaaaagttcgacagagttaggaatattagctgtatctaccagaggactatccctctagtcgttaagctgaagatgagaagtcaggtaaggcctcacatttctaggggctctggaaacttcctttctttctgtctcctgcttatgtatgtcttttcctctatctgaattgcttttgtatagaatactagaacacgagatgaaggggggaaatgccaagagaagcaaatttctacaagcaagtggtcttgctatagcttgaacgccttaaacaaatctgatatttaaaaaaaaaaccaaaaacagtatcaagtggtagcttcattctatttgtccacctttagggctaattttatatacctacacctctggaaaaagttactactgtcagatttgctcccaaactttgagaattgtcattatggtctgcagcattaaacctagattataaattatcaatgtcacttgattataaattatcaatgtcactcaactgaatcacaccaagcaacgacaaatgtagatttcattaagagatactgttaaaatcacattcagacctcagaaaggcaagatcccataacccagtcacaaacacagcttcaaacgcttccccaacttttcaagctttggggcgccaagtcactgggagttaacagcttaaacatggggttcaatacaactgaccaaaggaagtgaagaaaacaaagcatacattaatttcagcaccaaaaatatggatttgcgaattacatctactgctaataaacagatcattctttacagcctaagtacgccaggcatttttttatgtttaaatggcttgccacaaattgtcctagtcgaaactgatggcaaaatcctaaactgatcttcggcgaggagacactctgcatagagcatcacacaaaagacaggagcgaacagacacgctctgggcctcggcggattgcggccaggagcccaggttttcgtcccagaccccggcaacagggagggaaataagggcgggggaaagaaggagtgggagtggtatccttttccctgaaagcgcctgggagtgaggagcaaagagggaaggagcgagtgcagcacagaggaagcaaggaaagcagccgaccggcgtcagcggcttccaaggccggcaacaccctcgggcccgcaccaggcctggccctcccggcttcgtcccacctcctcacctccctcacatcctgcaggcactcgagcaccgccaggttgttgctccaggtgtgcttagggcacacgcgggtcacgtcctccctgcaggactcttcctccgccagcttccagcccccaccagcccccgctcctccccgccgggccggaggcccacccgccgggaaaggcggctgcggcggctgaggctgctgttgctgttgctgctgctgctgttgctgctgaagctgcgatgactgaggcagctggggcagctgctgacccgccgggccgccgcctccggcctgccctacgaaggacacaaagttggccccgggaccctggccctggctgtggacgccctggccggggagtttctcggccccggccgcgaatagcagcagcagatgcagcgccgccgacaagcggaacatcctccgtacacgtccacacgccgccatcttgagtccgcggcgagctcgacgcactcgccggcgccgcgtatttaaatgagggggtggagacgctgggcgtggcagcgtggccctgccgagccccgccccgccggcgccgacccgcgaacccagagtggggcgaaggaggaggccgtgctggaaaccgcacacaccctggaccggcgggcgggagagcggcgctccttacccgggggggttgctggggtttcttaaaaagcccgggcagggcggcctactctaattccatttgctgtcacaaaaaaaaaaatcaagggaattggggttgccacaaccaaaatggccggtagaatatgtcgccggttcaatgacttggaaaacaaaaactttatatgtagaggtgaactttgcacaaccaggtgtattacggaatcggaaagcctctccttgtatcgctccctccttccttccttccttccatctgcctcagaagtctttcttagccaaagagagagacagcattgaatagggttaagagcataagttctggggtaagaaaaaaaattaaggttataatccttgctctggcagggtacgcaagagctcaaatgtaaagtaccattggcaagattcgaaataataatttaagtgcctggcccacaacactgaactcaaaaagtcacagccagtattgttaataaactgggaagccgtttatgcatgaatcctgattttaagccagcatttagattcatgtttaaaggatgaaaaaataataataaaacacatctttgaggactcgggttaagtctgtgtgtcggtaactgttctcattgacctgcatgcaacaccgcaggcaccccacactagcatcccctccctgtccttaggagagaggatatgttcccaaagcctcttcacatccgctgtgtaatctgagccatgcatcaggcctgcgttaggttctcatttaactgaagaatggcacagagatgttaacagttctgcgtggagggattaaatgagctgcccaagaggaactctgccatcctgtagacagctaggctagccaccagaatccctggggcttcccaccaccctggcgcactttcatcccactctgtccatgcacatgttggggaatgagggcagtttgggttgtgtaatctccactggtcattgtgtccaaaaatgcgaattacatctactgtagtaaacagacagcttctgctgtcctgacccgcaaatgagcagtcaagaccaagttagacataactagaacctgaaaagtcaggagctcagggaacccaaaaggagctcctgagactgaagatattctgtgagtacaaattacccactgtggctgaccccaggcctctatcatggggaatgagagcttgttggcatctccaccaacggtcacctttgctactgtcataaaatgatcatgaggctgctgctaaccttgagcactgactaaggcagccccatgtttattagcaaacacatggcataggtaagtttcagtcaggcaggctggacacatcaccagaagtccttgagatgtcactagcgtatgttaattttttttttttttttttgagacggaatctcactctgttgcccaggctggagtgcagtggcgtgatctctgctcggagctgccacctccacctcctgggttcaagcagttctcctgcctcagcctccgagtggctgggattacaggcatgtgccaccacacccagctaatttttgtatttttagtagcgacggggttttgccatgttggccaggctggtctcgaaccccaaacctcaggcgatctgcccacctcagcctcccaaagtgctaggattacaggcgtgaggtactgcgcctggcctccattaattttcaatgctgagtctgcatgtgttcagacaagtgggagattattttaagccagtttaactagaaattgacaatcctagataagccatcagttacttatctttcagcctgaactgaggaaaccacagccacagattgcctccagagatagggaggagtacacatggctatcttgaaatctcagt

SEQ ID NO: 1242916 - DNA, 4001 bp, Homo sapiens
gctcacgcctgtaatcccagcactttgggaggccgagatgggcggatcagttgaggtcaggagttcaagaccagcctgaccaacatggagaaaccctgtctctactaaaaatacaaaagtagccaggtgtgatggtgtgtacctgtagtcccagcttgggaggctgaggcaggagaatcgcttgaacccgggaggcggaggttgcagtgagctgagatccgggccactggcctccagcctgggcaatgaagcaagactctgtctcaaaaaaataaatagagatggggtcttgctatgttgcccaggctagttttgaactcctgggctcaagcgatcttcccactttagcctcctaaagtgctggggttacaggtgtgagccaccgtgcccggccatgactggtgtctttataagagaaaccagagagagattcggacacagagggacaaagaccgtgtgaagacagggcagagcctggagtgaagcagctaccaggctagagtgccaggcatttccagaagctgccagaaggcaggagagaggcagggaaggttctcccctagagccttccaggtagactccagcctccagaattatgaggggtaacacatctgttttttaaaccactcagtgttggggtactttgtcatggcaaccccaggaaaccagtccacccctctctccggaactctcacccctccttaccgaggcactgggcactggaggcaggtccccgttgccctggcgctcgggggacagcgagctgctgccattgggggagtccagcccagatggtggtgacaggctgaggtccacgagaggggctgctgaaaagcgtccctccaccttctcggggaacttggagttcagcaggaagcctgagggagaggcacagttcagggtgtgctggagtgtagagtcccagtgggccaggtactcctgcctccgaacccccactgtgaccttgggagcagacaccagccatgcccccagaccacacgaatgtgaggagcagcctgtggagctgacaggtgtgtgacaccacccaccacctctgagctttaccagccgccagagcttggcccccgtgagccggggaggggggaagtgcccgctttgcagacgggaatggtctggcacgcagggttaataacagaacaggactcgaacccagggcccctgggtccctgtcagacgggcaggtaggaacctttctagcttttcccaggccccttcctgcctcagtgttcccttctgtaaagtggcaggttcgggctgggctgctcccatagccttccccttcagacaagcggtgaatctggttttcgggtgactctgctcttggaggcagggcagaagtggtgcccaccaccctgggcccaagcaccgggaatccctgagaggcacctcctgggctcagacccagcctctactgcccaggttggccagcggcaccaccccacagcctagggtgcaggtcctgggactactgccgctccttctgaatgcctggttgcccgaccagctctgttccagatctgcctagaggcctcagtttgcatcgtgtgccagccacgtgagctgggcactgcagctcccacctccctgcagacatacgatgctgggcggatggaaggacaagcgtgcgggcttcccatgaaccggaagccgagaggggctgcagctacatgctggtggacacacttggccattctccctgtcaccatgactggatcagggctaagtccccctgccctgcccagggccagtacctgagggcggggagcctggagagccaggtgtggggctgtcatccaccaggcccagctccctgtgcagagcacggggccggaccacacccagcgtcctctcccgcttctctcttgccgcccggagcttggtgatactcagcttcaggtcgagcggctcgtccagggagtgcatggtgagggggccggagttggaggtggcagcaggcagtgggctcccagctggtcttcacgcaggaacctggggaaggacaggagctgtgctgtggcactgagaccccaggcttctcctcgggctgtactcatgacagtctaacaggagcaggagcagggggcagtgtgaggttgtctcctgggtagggagaccctccgagcgacctggccggcagctatcatggggggagagccaacagcctcctcagagattccgcatctgcttcccatgagtctcttggggaagacaaagctcacattcttcattttgccatgaaactgaattttatttgctgacagagtctcgctctgtcactcaggctggagtgcaagtggcacaatcatagctcactgcagcctcgacctcctaggctcaagcgatcctcccacctcagcctccctggtagctgggactacaggcaggcaccgctcctggctaattaaaaaaaaaaattttcttttttgtagagatcgggtctctccatgttgcccaaactgatctcgaactcctggcctcaagcgatcctcctgccttggcctcccaaaacgctgggactacatgcctgagccaccacgcttggcgaaactgcgtcttttacaggcatcgcctcagatcgcagagctcagaagtggaaaaactatcagatttgccaagaccagctcggtcgggagactaatccggcggcgctagaggaattaaagacacatacgcagaaatatagcggtgtggggtgggaaatcaggggtctcacagccttcagagctgagagccttgaacagagatttacccacgtatttattgacagcaagccagtcattagcatagtttctatagattatagactaactgaaagtattccttatgggaaataaagggatgggtctggctagttatctgcagcaggagcgtgtccttaaggcacagatcactcatgccattgtttgtggttcaagaacgcctgtggccgggcgcagtaactcacacctgtaatcccagcactttgggaggccaaggcggggagatcacgaggtcaggagatagagaccatcctggctaacacgctgaaaccccaactctattaaataacaaaaaaaaaaattagccaggtgtggtggcgggcgcctgtagtcccagctactcgggaggctgaggcaggagaatggtgtgaacccgggacgcagagcttgcagtgagccgagatcgcaccactgcactccagcctgggcgacagagcaagactccgtctcaaaaacaaacaaacaaacaaaaagccaaacgcttttaagcagtttttccgccctgggtgggccaggtgttccttgccctcattctggtaaacctacaaccttccagcgtgggcgtcatggccatcatgaacatgtcacagcgctgcagagattttatttatggccagttttggggctagtttacagccagattttggggggcctgttcccaacaagattcaaggcctgaagccagatctcccgggaactggctagccgtgtcctaacagccttttctgacagagcaggagccatgctccggactcccgccctgtttgaccccaaagatctagaaccaggccagggggcaaggagcatcctctgaaatggccggcaggtagccacgctcaccaccaaggaactcgcaccaggcaaaccgagaaagtgggcacagccaggggccccaccgccctccctgcagaggcctagaggagaggcatcgcaagccagggagccccagggcgctgggtcgccaccagggggcagctggggattgtggcctggcctggccagctggggcagggttggtggagttgaccagctgtatctggcggttaatatataaatatgtagaaattattttttactggagatggtattcttttagtatcacttcccatgctgtaattttcatcatttttcttagaatttctcactggtttaattttcattttctttttggaaatggagtctctcagtcacccaggctggagtgcagtggtgtgatctggg

SEQ ID NO: 1242917 - DNA, 4001 bp, Homo sapiens
aacccaaggcctagtacttgtctaaatctcccatttttctattgaggtgtatggaaatgtgtagatattctagaagttcccaatatttaacatgtagcacagtgctcagtagacacaatatcccttttactgcagtggccctgttttacaagcagttaaaactaagatcaacagcatcccctgccccccaccaccccacccctgctccaatgtgaccccattattactgaaaaaatgcagacgacactctttgaaatacttcctgtgcaggaagggttgacacaggacatagtgaaaacaaaggacaaccgaggcacagaaaacaccatattgcaaagagaccatctaaagacacctcccgggctccaagcaagaatataaaaacacaacatttggaaagcaatgatggatcacctcatgcaaaatctggaatgccaacttctgcaaagaggcactggagtagcacatatggtaacatggaaagaagatttaaacttagttgggacaaaaatactttggcttttcactaacctacatttagactttcttcctggataatttatattttcttctccttttgttacatttaagcataaagctaaattcagactagaattatttccggggttaaaaaagaaacttcataaacctcctctaaatccagaaataagggtttagagaagatttaatgatctggtgtatactgcattgccttttaaaaaataaccgatactaggggaaaaaaaattctaagtgccatctgaatgagcccaatttaactcaatactagaaactgagaggaatgcatcttacattctccacctcttcaaacccaacttcagatctcttcctttagtagcaagacactcacctttcctggccaaggaggatatcggccgagtttccccctagagaaaacacaaagagtcaacacttgccctgcaaaagccagtccatctccttcaacccactcaatacgcaatttattttcctaaatctctgctggcatcctcaaatgccgaaacaaaagctttcatagctgggcccaacaccctcagaagtaaaatgcaaaattgtatacttatgtgcacaacgcatatccattcttctgttgacaaggaatacagaacaacacaactgtcaaaagtcacttgtctagagcttcttaatgacgggggtgggaggacagcttcctctgtaaacacagactttccctccctaagtctggtttaattcaacaggagacctgcctggctttgacaaatgctaatggaagccttcctctgggtggagaaacaagctacgcagctcgagggaggcggcgacaaagtcttggttcgggcggttgtctgggacacagaagcagaccgcgggaggcacccaagcgtgcactggtcactgccaagccatcggttgtaaaggagaagtccccccgccgtttcttcgcggggcaacgccagcagtccggtttagacaaccccggctgagccggccgcacaggtcggctgcatcgcaacctgggctttgaccgaatggcaccggccagatctcgcaggtccggtccccggcgcttctgctttctgggaagccccaacaagaccccggggaccggtcgtccggggaagcctcgcggcaccggcggctcccttcacgggggccgccagtatctgggccccgagtgcagaccccacccggccggcctcggggatcaaagccggtgcccgacgtggccaccctcggcctcggtcccccgggactggactgccccttccgcctggcgccgctcgcaagcgccggcaccttctcttcccctctctccgcgacctggagcgcataaaaaggcagctccagggccggcagcgaaccccgcgcccaggcgggtagctccccggcgcgtctcggttggcccggccgctcggactcaccacaccaagtcgccgagccgcagactcacagccgccatcttaccacccaaccaccgccgacgcacgggccgccgggaacagcaagtcgccccggcgccgcccattggagtgggcccgaccacgtgacgggggccggctgtcactggccacgccgctactctgacgtcaccgcgcccgccggggatcattggtcgaccgaggggcacgtgacgcgagcgccgcggtctccgcgcgccggagcgcagagactcccggctccttccccctcccttcggctcgtgacaacgaagcgcccgcggtctgaggcggcggcggcggcgacggtgcgaccggctgagcgcgagagggagccggcctcgcggctcgccccgcccccgggtcttggactccgcgcccctcccctctcggcgcttccgttacgcccgttggtccggcgcgggccccggggccattcccgagcccgaggcgctggtcggccccgtcgcagcgccagtgagctaccctgacggagctcggcgcggcctggaactcagcctccgccgggtctgggctcccgcgcccggcaactctgcttggccgcaggccgggaggccccggtgtccgcgcccgtccgctcccgccgcccgtgttctttggagcgctcctcccgacggccgctttcggaggcgccgtctgagcgcggggtcccgcgccgcaagttctcctggggcgaccggaggctgctcccccgaccccctggtgtccccggagtggctgcgcggacgtcgagttggcatttcttcgcttcctcctgggccggcgcgcggcgcggcacaccaggctcccctgggctcggggacccggccatgggccgaggcgcgggccgcccgcccgctgggagccacggcttagcagccgaccgctagctgcgccgccgcccggggaccggcatgaggaccgccgcggggggacgtctgcggcccgcgtcggcgctggggacaaaggtgcgtgtcgttgtcgggtccgggctctctcgttagccttgccctagttttgcacttttgaaaaagttgtgacaacaggaagacagatgccgggcgtagtttggacactttaaaactgaaccatgaactgggaagtgttaactgcagttgagcgcagcgtcggcccaaacttcagcagaccaggtagaatcacaattttgcaaaagatcccagtcccgatcacagactccacagtgttaaggattgacttagacttggtgtcgggctcttgttgagtcactgccagctggcaaaggtggcgagtcgacacgcatttccccaaggcattgtggtggttagagatttcggttgcaagtcggtgtttagcgtactgggtcgtcccgcagcctgatttttcttgggagatcagtttccctgaagtaccaagaattagctgcacggactgtcatttactgcgtgtgtatttttaagacaaagtgatctttaaagcgtatttaagattccagggaataatttgataaaaatttaacataagttcctgtttaaaaattctgaatttgtgaggaattgaatgagattttaataacttaaataaaaacatgaatcttggccgggcagggtggtataagcctgtaatcccagcattttgggatgccgaggcgggtggaccacctgagatcaggagttcgagaccagcctggccaacacggtcaaacccagtactctactaaaaatacaaaattagccgggcgtggtggcgcatgcctgtagtcccagctacttgggaggctgaggcaggagaatcgcttaacccgggaagcggaggttgccgtgagccgagattatgtcactgcactccagctaggcgacagagcgagcgagactcgtccccccgccaaaaagaaaaaagaaaaaaaaatctcaaatgaacattgcaccaaaacctagaggcattccccttaacatcagaaacatggtacatttctaccactattagataataagaatatattgcctaaaacctgaaagttctagccagtgcagtaagacaggaaacaaaaataagaaatgcaatttttggaaaagggaagac

SEQ ID NO: 1242918 - DNA, 4001 bp, Homo sapiens
agcctcacaggcagcttccctcccccttccacctctaccttggataaaactgtgcccgtcacctacgtttggaaacccactccttcccctagcacacgacccctcccctaaccctggccctctttttttgcgggggagggggtgcgaggggatgtagaaaccacagcctccaattcagcaccaaacgcatgaacagcagacacttgatcctccaccccagtctagggctgggtcccctccatgttagccaagttcaaaatcactgccccaggaaaagagcagggggaagtgggattacggaccttgggggatagggaggtatggagggaagaggagaaagaaatagagacagaatgaaacagagacacagacagaaatggaggcagtgagacacagaaaatattccacaagcaagagtaatgatcataatcatgccaatagtgtgatgttctgatcaatatggcggacactgtcattcatacaactacaggcgctccccttccccctcccaaaaaacacccacccaggagttagggtggaggacccagaaccaacgtagggagtgggggaggggagtcaaatataggggtgtgtgtgtgtgtgtgtgtgtgtgcacgaattaaaaaacaggcctggagagcaatgtggagtaagcaatgtaataaaaacgatttaaaaattattcttaataaaagtacgaatcccaatgccacagggacttacttcatctgcttcacaatggtgctttttcctgattctccagcccctgttgggacacagacagtggggaaaaactggtgagtgtcagcttaagggaacagggggagggggggactaaggcatgcgagggggtgggcgatcctgggcacatggtggtgccaacttggggaccaggtctcccgggcgcgagtggggtgggggagctggtggcagggggtgcggagtggccggggtcgggggatgggggtagcagcggcggtccttaccgagcaggagtaatttcacgtctttggcggcgctgatgccatcctctttgaggtttttctcaatcgccttgctccgctcgagggcggctctctcctctgcgctcagagtacatcccatggtggccccttccctgccacagcccgcacgactcggctggcacggctccccggcttggagcgccccccacccccccagagagcagagcctgggctcaaggggggaaaatcacgatatcctctcctgggctggaaacaaaaatgtcgggaaaccagaaccctccaaaaagacagccgctaacaagattccagcagcggagactcgcggcagctggcaggggtctggggttgtcgaatcgagggtggccggggtctggggctccggagccaagggaggaggcgcccgcgggccgaggaggcgcggactgcaggcactgaggcttgtgcacgacccaaaataaataaaataatagtcgaggctggagccgcagccggagccgacagagggtggggtggggggcagggtgggtcctgctgccgcggctgccggaggaggaggaggcggcggcggcggaggaggaggtggaggaggcggcggcggcggcgcgggatgtggagggagtgagttagggggtgctgctagtgcatgtgcatcgccgctcttcagccgtcggtgcgtccgcggcgccttcgccgacccccgcgcgctgggcagggttgggcagggggccgggccgaggggcaggtctctagcgggaggcggcgtcgctgtctcccagagctcgcatcgctcggtgagcctaccggagagagagggagagcgccagggagccgcagccagccgggagctcgagggagagggagagagagagaggcagggagggaggggaaaaaaaaaatgggagagcgaacaagcgcgcgcgcgcctgggcccggggcggggaggaggccagcgcagcgcgcgagtgcgccagcggctctgcgcacccggctccgcgggccgccagctgacgtcagcagggccgcgcgccgggcccccgggacggggagggcgcggggcgggggaggcgcgcgccggagttcgcgtcagccggcggcggcgcgcacacgcgctcgcggagcggcctgcccctccccccagcgccctcccggcccgcggctcccccggggtgggtgcttgcgggactggcgggggcggggagtggggccgggcgcgcgccggggcgccccaccccgcctccgcccccgccccacgcgccggcggcgcggacctccttgtcaatgggagcgcggggccgggctgcccgcaggacggtcaggtgggccccccagctcgctgccagcgcggcctctgtccctctcgggccggctctccatcttgtcgcccgtagcccgccttctccgtggctctccagccgctggggccgcagagccgaggccgggttacctcaggaaacgcgatgtggtagtgggtcggaataaacccgcgcgccccagaattcgccttgggggcgtaaggacagattcggacttttcgtttcctatgtccacatttattgagcacctaatatgtgacacccgaggctgtaagaagaggaacgcagcgggcggagaaaagccagagctttttctctgtgagccgctgcctccagggccatagccgaccctgctccgagatcccagccgccgctctccgtgcaggaggggtgcccaccctggggaggccagggtgcccggagtggagggacagggcttcaagcgaccgggagtttccagcaaacccctgatccctgagcagtttattttaaaagcttttgcaaatgttggacggtttcgtttggtggaggccgtctttgcactaaattctcctgtcctcccccttcgaaacgcacaaaatgaattttgaacagattttggatgagaggttttcttccttttttcatcttctgaaacatttccccctcatttcttctcagataaagacccagaaacccgggacagttactcggtgtacagctagtcaaatactgaggaaaccagtcgatatttgccaaagattgggcatgttctgggtggtctcagattttgaagaaacgacttttttactgcacaaaatagttttacaatcagttccatcagacagccccaggggctctcctagggaaaggggccaataggcaaggttgcatggggataagagaggcaagcggccagtggaaaacggttttttgttttttttttcctaacagttgggcatttctgtagctctgaaagcaaacttgtttgtttcatttcaacgatagaaaaaaaacactcctgttttggaaatgtaacccagcataaaaatacatttgcaatggggaaaaagaaagcagtttagggccacccagaagaaaatattttttccctgatttttttttaatttggtatttcccagtgtgggtttgcctcattttacaaatagctgcccatgtcaagatgtgggtatgtgatttaaatattttaatttgaatcacattttacatagtctaggaaactgacaaaagaatcctatagagaattgttttataaagtgaataactgcttctctacctacccgcccctctcattcttcttttctgtgcgtgtttttggggggctgttatgggataaatcttgtttggcttaaaaatcactaaaacgcagcctttcaaatccaaaacagagagcttaggtacccaacattctatagaatgtattatttcctcaagaggttgctaggaacagttatgtagatctaccaggtgcagggaagcactccacaccctcacccaggtcctgtatccctgcaagactgcgttggaaagactgaagaggtaagaatataccgatttaattgcggattccgggtcacatttcacgtttccatgctctttctttgaagtaatttttaatttaaaatcttaggctcttggattatttgggtttgtatggttgaatgaaactatcattgaccttaggtatatttatttcttcttg

SEQ ID NO: 1242919 - DNA, 4001 bp, Homo sapiens
tttgcccttttccacccatgggttgttcttcatcaggtcggggttcaggaaggggtccttggggatcccgtcctcgatccacttcagcagcctgcgggtgggcgggtggcaggtgagtggtggcacctgacccccgagggcctcctgctgcacctgcctgtcggcggcggtggtcgtggctatggaaatgagcagccagcgcagggcagacaaatgagaggcaaatcaggcaggtggggcactcactcggggatggtcttggacgccatctcccgctggaaggccagctggtacttgaggctctccacctctttcttcatctgtggcacgtcccactcctccatggggtcaggggcttctgaagcagccagcctggggctggagggcacaggaggaagccacagggccgaggccaccagcctgtagtccccacccccgctgctccccgcaggcctgagctgaaccccgcaggatgaagcggggagagtccacaccactgcctgggccagtcccctaggcgttgctagggtgcagggcacagagcgagttcccacaaggccccagctcccgcctcctgcactgggactaattaactgcaagaaactttacatcctcagctactcccccataggcccccacaccttacgaagatcccttgcaggcaggagaaagggtgctcagcacggcaggcccccagctcctaccctcccactgaggcccacgcaggctgacccagaccacggtgtgaggtgtggggcgaggtcctcaggaggtggcccctgccccgccccgctgtgtgcccctttgctttgcatggcagagcccagtccagagccaggactcctggacaggaatgttctgctgcagtttgcttctctggcaggtggggtgtgtgctcaggatcttgggggctcaggctatactacccgagtctgggatatgggctgtgggtggcccctgggtccccagtgtgtctgggaaccacacacgttacctgcgtgctttctgcttgtggccagcctgggaaagccacaggttgacacccctcagaactgccacaagttcgaggcaagtgggggtgggttgccccctgcctctccccctacccactccaggggcccagggagtccctcactccgtcccaactctggcccccgtccccaaggttgggagacagggctgaaccttgggagggtgggtgggggttggcgtcaagtttcggggagcctgcctctggctgtgaagggggctcctggcccaacagtctccccatcctttggtcgtgcagctgcaccggccacctagggaggggcccagggcctgaggctggtggggtcccggtggtgaattgggcagactcccagcagccagcagagggtctgcccgtagtggggtgggaggccggggagcgagcgggggcaggtttctgggggagtgatcagggtcatgcagaggattccctcccggagactctggagttccagcacccctacccgcccccatccccggtgcaggccttttctcggagaccctacactcagccccgtgggcgcaggactagctgcgtgcgggtcctcccaggcccggggtgttggcgccccgcccacagcccagtccttgctgcccagccctaccttcgcgcagctgccgccaagcctggccacccaccccgtgcaccccgtggacgcccccagccacgggactcggtgggcactgcaggcggcgcacggcgctcagatggacacagctcccccgcaccgcgagagccgcctccctgcctgcagcaccggctcgggttgggttttgctgcctgcggggcagctgccctcgccccgggagttagggtgagcccaggggactgacctgggccagctgagagtcgaggggcctccgggccctccctagccccgggcgcctgttcatcggacctaccttgaaaaggtgacagcggagggacaatgacaacggccaggcgaccgcgagtgagagcgagggccaagtgatgttccgggagtccgccaggcagagccctggctgtgccccgcccctcccgccacctgggccctggcgccgcccccacaccctcctcagggctgggctgaccccagagatagcctgtgctgccccctcccctgggctcacccagcggatggacatgcagccaggggccagtgtggggctggtccattttccctgaggggccagcttgggccctggtggagaggtctccttccacttgagggggtgggttccccctccagtgtcctgggccagccgggaggagtggggatggggctgggaccctttgccctctgaagcctctgcagcctgcagggttcaggtgacactcagctgtgcccccctgacagaggcatcctgtgtgggccatgtggctcaccctgggatgtgagcctcttactgctaggggccccggggctctgtggagctccctgctccagcccgatcccctgttcccagaccagtggccggcacggggcagctcccgagggcaggagagtgccgtgcttttcagtctgatctgagctgagagtggcggcctgaggcgtccccaacaccggtccactgtgggtgctctggggcacgctgcctcgggagaggtgcccccagctgcagcacttgggctcgggttgtgtgacctcaaggctctggggagagggcttccctttggggctccgcacctgtcagcctgcagagctgagactggccccttttcctctgacacgtttccccgtgtctcctcccaccctgcccttgggtgtaccccttgggctcctgtgggagctgtgccctatgtaccagcaggtgacgtacataccaggctgcatcctaggtgggggcgcccaggcagcaacagcagcctctgggggcacagggccaagctccccaaacagtccctgcagaagctgggccacccccggggaagcgtgggccaggccctcggtgggtgctggcagggccaggggcctgtgagcaggtcactctgccttccccagtgtcacagggaaccgcccggcctgcctggggtggcccagacctctgcaggggttgtcggggagaggtgggccctgtccctctcaggcgctcaggtccctgaagtcactcagcaggactccctgccagtgtgactccgtgaatcggggccacctgcacctcccgccctgatgtgtgtcggctggatcagaggcgcctctggaactggggcacattagggaagggattatttttattatggatttgggggtggggtggggcagcttaaagcccagggcacgaggcctcctcctcagggcagatggttgcccctcttggcatggtgggggctagacgtctccctgatcccagtgcccgccctgccctgcctgtgccccctggtgctgtgacttcggatgcaccttagtttctgggctgctgagggctctccctgtggctgggggcaccactttgggcgccagagagtggaatggctgttaggggaggggtgtgtgccaccccaggatgcaggcaaggcgggggggaccccagggcatgtcccccacgttccctgggacagcaggtggcttggagccagggccaggcgggggaacaccctgaggtccgcagctgagttgtgagagctgggggttctgtggccactctcaggaccccaagcggcctttgcatctgctcatctggaaggacctaggaggtctcctaatggggtcgccaaggctccaggttctggcttttggtcaattcactggacccagtaaggtccctgagggtgcctgagctctgtccaacacggccagtgcccccagtgaatcaggacacaggttggagtgtggtgtgggccaccaggacaggtgagacgggccgtggggtcacgtcctggagtgagcactgccctgtggtccgggcaggtcctgccagtcctcagcatctcagcagagaagtggctgtgtgtacctgcatggtggacccggcctgcctacctgagcagg

SEQ ID NO: 1242920 - DNA, 4001 bp, Homo sapiens
ctccctttcctggatccctttccccaaatagccacagctttactcccttttctcctttagcttttggctgaaatgtcacttcttagacttttcctcagcaccctatttaaagcaatccccaccaagacaggaggattgcttgacgctgggagtttggggccagcctgggcaacatagtgagacttccatctctacaagaacacttaacatttgccgggcatggtggcgtgcacctgtagtcccagctactcaggaagctgaggttggtggattgcttcagcccaggagttcaaggatgcagtgagctatgattgcactactgcactccagcccgagtgagagagcaagaccccgtctctaaaaaataaaaaaagcgatcccccaaacaatactctaacacacatacacacactccctcctctgcttcacacatctacatggcatttttcatcattggccattctatgtattttatctaattctacaggctcagtgcctgttcctccatccctccccattagactgtcagctccatgaggacaagcattggtatatctgtgttcgtttctgcaaccccagcacagaccctaacacataaaggtattcgataataaaattactaaagctgggcgcggtggctcacgcctataatcccagcacttttggaggccgagatgggcggatcacttgaggtcaggagttcgagacccgcctggtcaatacggtgaaataaaccctatctctactaaaaatacaaaaatttgctgggcgtgatggtgatgcatgcctgtgatcccagctactcgggaggctgaggcatgaggatcgcttgaacctgggaggcggaggttgcagtgagccgagatcgtgccactgcactccagcctgggcgacagagcgagactcttgtctcaaaaaaaaaaaaaaaaaaattcttggatttttgtctattatatttaatactcattcagcgtttaaatgatatatatactcatgacccaccaattccacttctggaatcctgcactgggaaaccgctcacctgagggcaaaccaaagcacctacacagcatgttctccacagaactatttctaatggccaaaaaaatggcaagaacctaaatacaatcggggagtgcagtgccatcctatcgcgtgctgagcaccaagagaaagaacgaagacctatatcatcaccatgaagcgtcccgagagatacagcgagtgacaacgacaaatcagccaaatactcgcgcagcatgattttttaaaaaagcgattagattacaaaaactatacgttttccagttgcatagacacgcacgtaaaagcacagaaacgcgtctgcaaagtcaccagactattaacagcagttacctctcggaaaggaaaggaaggactaagtctggagataatttaattcgctacaagaacgttctggtatattctctcgtacttccacattaattttagaaggctgacaaaccaatgctttagactccgggccgtaactctcagggtcactcatccatcctccactgttgctgctccccgcggccacccccgcgccggccaacagcgctcctcactcaccagacacgggtgaaggatccctcttggcctggaggcgactggcctgaggcaagaacgggttgttcaccctacgggaagcggcaaggtcagcggggaacgggcccgggccgtcccccgctcgagccgccagcccgcgaggctgctcacccaaacgcgttgggctcctccaccaccttcatcttcgctgcacctgccggcgcgggccctacggggagcgagaccgtgagcggggaggccggggtgcagagcgcgcgcggggcctggggacgcggacggccgggccactcaccgccggccgagagcccgaggagcaacaggagccgcgccagccccgccgccatcgcgccgcagcggccgccgcgcggtcacgtgaagtgacggtcacgtgaccacggggaccggaagtggcgtccggcgcaagcgctggcagccgcacagcccattgggaggccgaggggcgcggccgtggggtggggagtccccggcaccccaggtccgcgccatgggccgcaggagggcagcgcgcgggccgggggcggaaggcggccgccctcggcacctcccgacgcgctccctggaggccttcgccgaggaggtcggcgccgcgctgcagggtgagcgaggcgtgatggggagagcgggtcagggtttgagggcctgcccgggggtcccacgctgaggccgagtgcccttctctctctcgtgcagcttccgtggagccaggggcggctgacggcgagggcggcccgggcccggcggcgctgccctgcacgctggccatgtgggagttgggccactgcgacccccggcgctgcacgggccgcaagctggcccgcctggggctggtgcgctgcctgcgcctgggccacagattcggcggtctggtgctgagccccgtgggcaagcagtacgcgtcccccgcagacaggtaggcgcgggaggcctgcccgaggtcgtcttcatttccagcgcgtggttcccttcagggatggtttagtggcacttgtatgtcgcacccacatccacacccacgtgggcagggaacgtctgtctagtttgcctccgttgcgtagcgcagagcctgggataaaggaggttttggggtaataaacgtttgttgagtgaataaacacatgctccaggtgccccaagcagctgcctcaaaagcttgctcgtgaagtccgtttgagggtgtttggggatggcggaatgatgtccctgaatcccttagctaggccattctccggggcatgctccaccttgggtagtgctggctcctgaacttatcccatgctgtccctggcagacagctggtggcgcagtctggggtcgccgtcatcgactgctcctgggccaggctggacgagacaccgtttgggaagatgcgagggagccacttgcgcctgttgccctacctggtggccgccaaccccgtgaactatggccggccctacagactttcctgcgtggaagcgtttgctgccaccttctgcatcgtaggtgagtccaggggccccacagcagtgtgacccggcggcctgctgttcctgctatgctcccagcatcatgtttcctgccgacagaccccaggaggagcataagggacggacaggggaacagttcagacagaccacggttccagccccaactgtcacttcaggttttcggcctgtggagttgcagtagaggcagaatgggatcgctgttctatcagggccggtgtgtggggtgccattcattatcagggcaccactgcccagagaatcctccttatcctccacgtcctccttactgaattgctgatctaaagaggccctgatgaggcgtggggcagtcttggtgggaatgtttgtttcgcagcaaaggagggggacttggtcggttgcagaggtgtggactgtagcaagggaggtgcaggctgggggcagcacgggttctcaggactgtgagctgatgtttgctggggaccctgcggttacttgggagagcgccgccatccggcagcagggtgatcaggaggcacttgaggggaccgtcgacttctttgggtttcctgtttctcacaccgtcaggctttccagaccttgctgtcattttgctgcggaagtttaaatggggcaagggcttcttggacctgaaccgccagctcctggacaagtacgcggcctgcggcagcccggaggaggtgctgcaggcggagcaggagttcttggccaatgccaaggagagcccccaggaggaggagatcggtgagccttggcggggtgggaaccaaggccctccaaagcctggggggtgggaggcctggtcctgctctgagctcacttagaggccactttcctctctcggctcagatcccttcgatgtggattcagggagagagtttggaaaccccaacaggcctgtgg

SEQ ID NO: 1242921 - DNA, 4001 bp, Homo sapiens
tcccctgtgtaagattagtcgagagaaggaacaataaaatctgtaactggttatgatcaattagttgtaaacaccattacacttggaccagcctatgttcagattttgatctaagatacaacattaaaatgtcatactgtatttgtttccgttgcattacgtgaaaaatcagggcttaaaataaaaatatccaatataagagacatgccagcaactgttaatagtgctgagatgtaacagtgaatataaagtaggtaaagtctccgctctcatggaacttacattctagtaagaaaaatacagaaaagaaaaatgagtcagactctcaaactgaaagaatgactaaccctgaccccaagggattttcaccaagcactagagcttcaggtgatctagccaaatccataaaacaaggtattattttaagattactgcaatagggaaacatactttctcttgacggaaattttaagcactcctttggttttccaaatttgttgcataaataactcctcctggctctggcccactaggtaggcagacttaaagagcacacgttgacagtgggccaggaaggagccaagtcaggaagagaaaaaagtgcgaagcctgggcaaaactgtactgccaaggctgtggggccttggaaaggacagatagttctgctggctgaaagacacagagcatacattcaaacgaaaggccaagctacgctttgctccttgcagttaatacctgcttgggggtggttttaaaactcagttccttattaaggtagtgcttaaggagagtgctccaaatcggcttcttgagttgaattaatcttctggctccggtctccactgggaatgaattactagagctcgtttcaagctctgaaatttccctccatactattatacacgccacagtacgaaattacgtttgtcattttttgagcaatgaccatttgtcattgtccttccctcgccttgttcacagttgtatcgttggcatctggtccagagcctggctctgagaaactgcagttacgaaatatttactgaatgaaagagcacagggagatggagaggaagattgatagcctccctgcaaccggacctccttaggggcaataaggaaaaaacaaaacaaaacaaaaaaagagacacactacacctcgaccctttcccaagcaaaggccaaacgggccccggggtcacagggacctcggggggtcgcaaggtcaggagaatgccgcacgccaaggtcgcaggtgcgggaaggaaagcgaggcccgaatgccggcgccccggaaaccttcctctcgcgctcttcccgcccagggcacacacgcggcagccagccgccgccggcccaccgactcgggcgggccgggggccaggacaggtgcgcccgccgcccccagggcaccctatcaagggcacggtcgttacccggcgccgctgccccagtactatccgcacccctcccactgaatgggagtccggcaaccgccgagggccacacttcctttccctagggattgcgttgcacgccttcctgcagggcccagtgcggggaccagagggatgtgggatcctgaggatcactgtggggcacggacgctcaatcctcagtccccagtaagggaaagccgagggggtggcagaaaagtgtgtgtgtgtgcgtgtgagtgacagtgtgtatttgggggccgggaggggtgaatgtcctggggtgctcgcagctcggcggggcagggccatcgccctggctccatctccgtttcccttggcttacctggctctggcagaggccgcggcggcgaggcccgggtggaaggcggcggcgatcccggggaggacgcggccggagtgcagcagggccatggtggaccgtaggagggcagtgggcagccgcaggacggagcagagggcgagcggacacacacacagggaaccggctcctgctgaaggtaaggacagggacttccctgggccagagcggccgcgtgctgggcccgagccacgtcacagcgatccctggcggccggcgggcggagcggcgtgggctcagcggaggtcgtggaagaggatgactgcacagtttacctacgcccagcccttgctgcgcttcattcatttaatccagctgggccaggcctggccggccgaagaggtggctgctgttatggcagtttgaaagatgagaaaatgtaggctgacatagttgacgtattttgtctgatgccttacagccattaggacccaaggtggccttactttcaaccctaatagtttccctaagcacaagtcatgtcacgtcgttcctgaatgtttccttatcccccacccttttttttttttttttttttttgagatggagtttcactctgtcacccaggctggagtgcagtggcgtgatttcggctcactacaacctctgcctcccaggttcaagcgattctcctgcctcagctccccgagtagctgggttacaggtgccaccaccacgcccggctaatttttgtatttttagtagagacgggggtttcaccatgttgaccagtctggtctcaaactcctgatctcaagtgatctgcccgtctcagtctcccaagactgctaggattacaggcatgagccaccgcacctggcttccttatcccttttatggagagggtcgcatgtgtattttgtggggcagttgtgaggattaataagattagcagattatgtctaaaacagggcctgatttagtaagcacaaaataacccatggtcattaatgacaaactcgtgtatgtcaaatcctgataactgtttgtggaaggaaatgaatcggttttgaaggaaatgaatcggttttaaaggaaaaagcaaatgaatttcagacacatccacaagtcaaacgagtctttctcatgtgtagtctatttctctgatactcgtctcttaaaccaaggtaggggcccggtgtgttggcttatgcctgtaaacccaacactttggtagactgaggcaggaggatagcatgaaaacaagagtctgagaccagcctgggtaacaagatgaaacccccatctcttaaaaaaataaaaaaaaattagcaggatgtggtgttgcgtgcctgttccagctactcagaaggctgaggagggaggattgcttgagcccattaattcaagagtgcaggccgggcgcggtggctcacgcctgtaatcccagcactttgggaggccgaggcaggcggatcacgaggtcaggagatcgagtccatcctggctaaccctctctctactaaaaaaatacaaaaaaaaagtagccgggcatagtggcgggcgcctgtagtcccagctactcgggaggctgaggcaggagaatggcatgaacccgggaggcggagcttgcagtgagccaagatcgcgccactgcactccagcctgggcaacagagccagactccgactcaaaaaaaaaaaaaaaaaaagagtgcagtgagccaggattgcgctactgcactccagcctgggtaacagagtgagacgctggctctaaataaataaataaatacatacataaataaaataaaaccgagatagaactgtgtaccttggcaatttaatatctcctctgtggctccacgttgcctgaatggtaaagtctaaacccctacttagggccacattctaggtccttccggcccagctccaatttactgtctcagacccttatgctctcatatgaccttgacctatgcgcctataggccatgacttgggattctacctgtgaaaagtaaagtagagattcttctttaaagactttcctccctgtctaattagaaataaatagtaacttctcttaaaaacaaaatgtattcaaagacctgtactaacagtcttaaatatctgctagccataataaagaaatcaatgtactttatgttcctagctgccaccatttagcctaaatatttgccctggcatgcttatactggtccaagcaagcattaggtcatag

SEQ ID NO: 1242922 - DNA, 4001 bp, Homo sapiens
ttggggaaagaaagccttaaacgattgttagaggattaaatgtgataatatgtgtaaaatgccaagcacagcaccagggtcaagctaattgtcttctctagttctattttgttgaatgctgtagatgcctgaagaaggagctaagtgcacacacaggatcatgtgcttacaatacacattaaaggggctttctaaaaaaaagagattttcaagctttgcacatgcttataatacacattagaagggcctttcagaaaaaaagattttcaaactttgctcatgcatgtacttattttaagacaaggaatcactgcatttgttattcttagattgtatttttccactggaggcctccaatgagctcagtaccctctcccaccctcctccaggggctgaaatttgcactctaattctaagcctgagactcctttctgcaagtatctgaattgcccacttcataaagagatcacttaatctagccctttcaggaaaaggagaaggcacttgccagcacaaggtgactgagttatgtatttcttgatcttctttaatctggggtctctaatctcccaaagatatgggcatgggaaattatgttaactggctcccactgccctttcagaggaatttctgattaggctctttgagagattgtgacttgatttccattgtttctcattatgtttcccttgacttctagctctgagtttttgctttagaactgccaattcctcttccttacctgagccaccttctctgcacttctatcctcacttgctaggtcttccttgacatctgagatgccaggtgagcagaatacttacctcgctgcactgcagatgcctgggtcagaatgcaggagaccaaggccagccacaggaggccagagcccaccatcctttccataaggtgaggcatgcaggtcactttgctgtatgcagacttcccatgcagctatgggaaagaaaagaccaagataagattagggcataggtctatgttcttagaaacagatccgttgacttccttcataaagagctgcattgtttcaaagtaggtgtgacttatggacagatagagcgagataatgggtgataaaattgacagtaagcaaaccaaaggcaagcttagagctggctagtactgcagaatgtcctagaaaggtctcaggatggtccctgctcaggtggaagtagaggctctttggagattggatagagaaaaagggatatggtacctgtgaatacctgcacacaaaagtaatggctgccctttcttagttttatgcattgggtgctgctaagagccccctgaaatgtcctctatggatgtagatttctgtgactgtggaaccatgccaaaccgagcctcatgttccttgctcctagtacagaatctggcacacaaggagtactcagtagaggattaaggatgaataaataaatcaatgggggttgggggcggtggcgaggcagaaagaaagagctgcaaaaaagcctgccagcatttggatggcatttacttttctgggaaatactttccctaaatggccaaatctttggataacttcctacaacctctggaagacttcagtggaaaatagagatcggtttcgggcagggataccatgagtatgctatgagacagcagggatagggaagcacccaggattggtgattcttagagatgagatcccaatagagacctagttccctggtgggaatatctgggacaaggaagagggtggcgtccgtaggcctggagcatcgcagatgactggaagcatgactgagttggacatagagtggtacctggagcacttgacaatggccagggtccaaactacttgctgggttctaaaaatttccagaaacaaagaatcctagcatgtccagtggatcaagatttcccaggattaggaggaagcctcctggggcttaaagcaggacttacctccgatgagaacacaaagcgttcctcctctggccagccatgggaatgcagcctgctgtgggccgtctttttattgcaatttcccacccatgtgtctctcctcaattggtgcacaggtatgatgggagttctaggccatacactgggcttgttgagtggaggtgagataagccatttacgcaaaggatggtgaaagaagggccctcccctcacaatgtcaacccttccagctgtctcagcattgtgcgaatgcttcctacaaacaatagtgctgtgtgctgaatgctgaacatgctgggcactgctttgcgttcttgacttctcacatttaatcttcataattaatcaatgaaactggtgccatatttattaccagaaaccaaacacgaattgaaaggaagcttaatacccaaagggaagtgaagagaaaatcaaacaggcacttgtttgcacaatggattttcagttgtaccttgtgttcctagctaatcatcttggaacatttctgcttctgtctgaaggccactgagcttggggccagttagactaagaggacacataggaaaggaaagaagggagtgtggatgtttcgaaaaattccatttattggtccatagaatctacccaactccggatttctaatgctgagcagttttggaatggctaatttggtgatgatggattttggaatggcaaaggacagacaaaggttcttggacaaaagaagcaccagagtagcccctgtaaatcccttttgatatgtaggctgccctagagattggaaggcatgagactgagaagaggctgtagaggatcttggacttattaactccaggcttggacctggctttcatgacatggtagaaatcatggacttcataaaagagccaaagcttttgcagaaaaaatggccactgcttcttctctgtcactctgggactccttaaggagccaaggcaactggagtcaagggagcaggagggtcttggcattggtaacaccttctacaaaacctcaacctggaaaaagaaaaggtgctacaagccaccttctctactcccagagcaactggagaataaatagtctctaaaatgtggaacttgtgacaactgggcccactaaatcacctactgatccattcagtctggccaggtgcccatcccagtctccccagtggccactcttaaccttcccattcctcttaaatggtctctgcagctattatcacccactcacaccacctttctcagcagatatctggtaccctacttcaaaaacaatttaggccacaacacctgaccttgctccttcccctgtaaacatataaatactggtctccatcctccaccccttccccctccaacttctgataaggcgatgttcctccttttcaaagtcagttcctccatccctcttctggcttctccattccaatctgaaccatgtagctacaactttatagccaaatccactgggtagtttgtttctgctcctttgtgattggatttgcctactgcttgttccgggtaccttgcatttccttgactccgcatgttcatattttcttgattctcctgtttctacctggagatttctgctctgttgctacaagatcctgtctctaagaatgctggttaggtcccatttttcttttcacgtcataaactctccctgggaggtatcaagttatctcatggtttcacataccatctccaggctggtgagttctgaatccgtatccccagctttcgctactcccttgaacttcagttccatctacctattgattgctggacctctcactgccgctgagatgcttgagacacctcaaactcagcaagtgcaactctgagctcatcaagtcacctaaatcttctcctcctcattgtatgatctattttaatcaaaggtgccacttgcctcccagtcatccaagctggaaacttggcctcttcctttctaagctccttcctttctccctctgctcccatttccaataatcctttcttctccatctccacctcaccaatccaaattcgggccaccat

SEQ ID NO: 1242923 - DNA, 4001 bp, Homo sapiens
acagcacagaaaggatcttgggccaatttgtccaccccttcactatactgttggtgaaactgaggcccagagagatagatggatttgacctgcaaggtgtaagaccaggctcttacccccactggttccaggcaggcactgagggaagaaaagcctgaccctaccacacaactgaagaaattgaggccaaagcagaagtgatacctcccccaggcactccagatagaagctgtggtttccaccccctttcccaggagcaaaccacagtcttcacttctgcttgcaacctccaaattcccctccacatcccttcagagaggtcaccatgcaccatccccccacacgctgagccatttcattctccaccctgcaattcattatttgtggccttctaggaaacagcaatcccttatctgacttccaggatggttccagttgatggtggggaaaccgaatactgcgtaagaggagtctgcttgaggttctacagcaggccagtgggcaagctgggactcaaacccaggcctccacggtccagggcactaccccctgcacactgcagcctcccaaagatggttgggcagctgagttgctttgcagacaagtaagactctatttaggccaatagagaaatgaggagctgtggagcacaggacagagcctttggaagatgagaatttgataaccagttgcagtattcagtgcctaggctgtgtgacactgggcaggcacctgacctctctgtgtctcaggttttctcatctgtaaaatgaggccaaggaaatctatttcccagaaagagaaattcaaacaacaatttccctgatcctctcctgggaatcaggccctgagaaaggtccagggctctgatcaaagtccttggccaggaatacatctgagcacaaggcttgggaacccctgccttcctccctacagctgaccatgcacccccgaagcccacctctccccagcagcacgaaggcctactgagccagccattctccgcacacagccccacctgcccctgccaaccacagtctggagcccctgcccctggcctgggtgaggaatcaatcaacctgtggtctctgcaaaaaagcactaacaggccaggaacggtggctcacgcctgtaatcccagcactttgggaggccaaggcaggtggatcacctgagatcaggagtccgagaccagcctgaccaaagtggcgaaatcccgcctctactaaaattacgaaaattagccaggcatgctggctggtgcctgtaatcccagctactcaggaggctaaggcaggagaatcgcttgaacctgggaggtggaggttgcagtgagccgagatcgcaccactgcactccagcctgggcaacaaagcaagactccgtctcaaaaaaaaaaaaaaaaaaaaaagccctaagaaatgctatagtaaccctatttcccaggttgggaaagagaggccaccctggagcccaacaggaagtctgtgaccaagccagcagcaggtccatttacctgagacatgctgtccccaggatccaatccaggtcactctgaaaggagctgcacctgctccagattgccaagcacaaactgtgtgccaggtcctctactgagcccctgacagccatccaaggtgcaggttcccagactcaccccattttacagatgagaaactgaggtccagaaaagaaacctctcttcacttgtcccagacctcgcggggaagctaagattcgagacccatgcctaaccacttcttaatttaaattgcccctccttccaaaagcacagatctctacattgccccagatgtggagctgccaaccagaaagggaaggagggtgggtccccagcttgctcaccaggatatcaccaggtctgtgcccacctggacatgggtatggccagtgcccactgaggggcctgtggataaggacagagaactgggcagaggagagtggggagaggcccggaggaggctgacctgagaagctgccgctgccgtctcagctgctgtctcggctgctgtcttgtagcttctgcaggaagaaggggaagtcgggaggcgtctgtgggtggcctctccctttgccccacacctgcacccccactgcacttctctctgctcccttcaccccaggcccaggcaccacactctcacttcacttcttctttcaccagcagcagcctctttgcttccttcgagctgtcggtcatgccctggtcaccctttgagggtatcaccccgtagagtctgcagctacttcctggggtggctgctcctctgtggaggtgctcaaggacatggcaacgtggccttatgcagtgcgcaagacccacctgagctctgcacctttgggcaagacatgttgcccctctgggcctcagttttcccatctatagaaaagggaaaatgatccctgcctgacctgacaattgatggcatattgatgatggcaaagacctcaggcagcagcttggtcagactgcctgggttcaagtaccaagcccaccacttactgggtgggtgacttggggcaagccactcatgctctctgaacctgtttcccctctgtaaaatggagataatgacagtaccatcttgcagggcagtgtggggcttacaaaaggtaaggctggcaaagtcactggaagtgctctatgaagccgtcatatttcacagatgagggacctgaagcccagagaggacctgggcctggcccagagttgccaagtggcagagcatggtggagaggggcctccctggccacagagcccagaaaacatgaggctggaaagctggccagcttctccttgagccaggcagctggataggcctgtcctgcatcagccataccctctgaagagctctaagggaaagcaaggaggtgtgtgtgggggatagagagagagtgttggtaatggggagacggtgctctctcttgcctgggccccatccagactcctgggaaaactgactcaggaatgtgctcttccagccctgggggaaagatggagaggcagcaaaagggagaaaccagacaggtcctaacatggtctccccgctctctgcctcactggggcccttcccgcatcagcccaaatacagcttgcaggtagtacaagtggcctctgctgaagcaggagggagctgctccttggagggcagccaggtccccaccccagctgcacggtgaaggttttgcagggacaccggtgcacctgtgtcctgactcctgggctacactccctctgggtgacttgggcaagccttggcccttctttgcgcttcggttttctttgatcaggatccagaccttgacctccaggctcttcctttccgaggtcacccagctacctctaggattgccatgccaacctcctccttcctcatgctgaatgtgagcccaactggctattcttagggctcaggaggaggccctgcctaccccatagcccctctagcctgggtctgtaccagcctcactgtgccttgcttcagttgggggctaagttagtgcccgttacttagccctgcactcctgatcctgaagctcactaccaagatactctcctgctcaaaagccagtggtgaggctgggtgcggtgactcaggcctgttatcccagcactttgggaggtggaggcaggcagattacttaaggctaggagtttgagaccagcctgggcaacatggcaaaaccccgtctctactaaaaatacaaaaattagccgggtgtggtggcacatgcttgtaattctaggtactcgggagactgaggcacaagaatcgcttaaacccgggaggtggaggttgcagtgagccgagatcgcaccactgcattccagcttgggcaacagagtgagactccacctcaaaaacaaaacgaacaaacaaaaaaccagtggtggctccctattgccttcacagtctaaccccgtccaacttccattgccacccagtctgattgtgcttgccatattaatacccacctcc

SEQ ID NO: 1242924 - DNA, 4001 bp, Homo sapiens
tgtccctgctttgaactcttgaagggtcaacctctgcttgtctttgtctctgtcccttaaatggtttcattagaaaagcctgggatagtgagtgagtgagtggctatctcactcagtagaggaggtgcaagggtgggtggattgttggggggacattctgatgggaatgctgagggggaaagaggttcttacacttttccagttcagcaagcatcatcaaataaccaaccttctcaaaaactcatttcccaaaacagtgctctggggagagaagctccgaagggctgaaggggggaggtggaacctggactaaaatcaatcccagctcaaggtaattacaggacatgtgctaccaccccggcagggcaagtcagaggctgagctgctctcctagggcagccgtggcgattagttaggaataaaagcctcatcactggcttggggagagaggctcacacattagtaaacttgcgctttctcatgcctgccaaatttgggaggggggatttattgaaacaatctcatcaggggccctgactgccaagttgaatgtttgggaaaggaaatctcagccaggctctcagaaatccagctcccaagttcccaggatcgcaagatgctaaggttcgcagactaagagatgactagggagatgatgctaagatttcaggctgtacactggattttttttctctctttctctctgcttctttcagtccctctctcctctctgcatgcaagtaatctttagggatctatttgtcaccaagactgcctgcaaggagggtccacccaaagctggagccccaggaaaaaagctttctctctctctcgctctctctcgcacacggcccaggcaagcactccctccttctcggcagctcagctctcttcaggaattcaggacaagtctcagccacactttggaaaggacattaagatgtgggaccagccagacatccacagcagccgtgagctgcccagggtgggtagacctggaggccaagccagggggccaggcatgtcctcaaggagactgtgaccccctgaggtggcagccaccgcaggctgccctgtgtgtctctgcacccttgccctggccagggcatggtcccagagccaacccctgattctccttagccagctgggagacccttttcttgctaggcattctttctccattccagtgccccccgagcaagagagtgctcaatgtcagggtctccagcttcatctcgtgtcaggcggggacacgcagaggggcagaggtgccccaagtggggtggacgtgcaggggccacgggagaagggaagcctccacgaagccttctgtccagaacatgcagtcaagccaaacacacacaaagccctctacgcccccaccccatgaaagccgccccctccagatgcgcgcacaaatgcaccttcgaatccatgctcacatgcccagcccatcgcccgccgtcacagtcatcacacacacacacacacacacacacacgctcgcgcgcgcacacacacacacacggtccccagctagggcacagcaacttcctttccccccgtgtggaaatatccatagttgcccttaaagcttaaactttttccgagggggcgccagggaacgcacgggggaggacgggggattctgggtagggttgcccggcacttggggttcctggcttccctccctctcccccacgcccctcacctggtaaaccgaggcacagcaagaggctgtagtagaccacgggcacgaaacccaagccgcaggccgagccgggggaccaccaagacagcgagctgttggctgcgaggtgggcgtgcgtgtgctccatgagcgcgcccctcgctccccttgccgcttcgcgcccggcctgccagcccgactctggtcgccggctcggtggtggcggcggcggaggcagcggcagctggagcagcagcgcctctctccccgcaggactggctcctacccttggccgtgatcccctctgctcgctccgcacctgcccgcctggagtcttggctcagccctcccgcagggcgcggggcgcagggtgcggggcgcgctgcgcggggcctcgggaggggctcccggagcccgtctgtgcgcctcccacctcggacccgctccactcccgcctcaaagccggggggctgggacgccgctccccgcagccaatcagcggctgcctggaagcggagtgtgtgtggggtgggagggatgcggaagaggagggggtcccagccgcctcgcttggctccactttcaggggagaagatgcagttagacctgggagccccgaaggaagaccggagtggaaaacaggctatccccaatctccaaccccgagggaggggcgtggtgtgggtaggatctgcctctcccgcagcggctcctcactcctccagcgtgtcctcagtttgcctttctccactctcctcgcagccacctctcttgcccctctccaatgcttccagtccatctccggatagaggattctatacctagggcaaagaacgggggaaggggtggggctgttggagcagcgaggatgctaaagcgttgtcggttttcctcgacaagggaagctgagcttgctggctctggaaagaggggtgcgtgcctccctgtgcgtgtgtgtggcgactctgggggtggccgccggtgaactgtcccctaactggagtgcgtttgaagaggatacagactggctaagagaagcccctcctgcatgccgcccttcagtcaggaataaggatgttgcagacactcaaacacgcactcgcccacgctcacacaaagacacacaatacccaggcatgcggtgtactcacacgctcactcaggcacgcggatgctctcccatcccacacccagacccttgaaaacacgcaggcatcctcatcaccatgcacaagaccacactcacagggcgctccaaacatacgaaaacgcacgcgggagtcatgggggcttgtcgagagtgcttgaaggttgtgtgaagggtagcatttgtaaggcaggtgggatccaagcaatgtgtgggtgggtggtcctttctcctcagggcaggcaggtggagggttccgggtgtggccaccacagacttgaggagaaagagaggagagaaagagagagagagagagagagaggagagagaggagagagagagagagagagagagggacatagtgtctgtctggggctcaagacagtgagtgtgagagagttaaagattctgcaggaacacccaggccaggcatccccaggagcagactgtagcagctgcctatgcaaagagctgtgatgggtctgagaagcctaagaccccccgccctcaaaccccccactcccgctgcttcccaacgcccctcacccctatatcacatccattcctggagagaaggaactggctaagctttccccagcctcttccaggtctcccaacgtggagcagacccctgtccctcaagaccagcaaagagcatgtatccagttcttgtctttgttagaggttaccccaggcagggatgggggacactctagggcagagtggaaatctccaaagcatacagagtcaggcagtctgcataaggggggcatctactggatctagctgggtctgtggtaagcaaggaggcacgtggccccacaaaagggcagattagagtcacatggacccagcccagtgaggccaggtctgagatttcaagccccattagatactgaaattttattatgacctctctcgattaaatatgactactgcaaacacaaagaaaacgagaacaccgctgcattgatgaataaagcagtggctggccattgtagaagctcaataaataattgttcaaaaacctatagattggattggtctgcaggcagctagactgagatgagaagttggggatagccaggggcgggggaaatgtatgtgatctgacaaagccctcctagtctcttcaaagatgccctctgcattgggaatgatgga

SEQ ID NO: 1242925 - DNA, 4001 bp, Homo sapiens
ggtaggccaccacacccagcttgggttctcttttaaaatccaaattcccccagtggagagggcagcagaagaggcctctgactcctctgtagaaacctcccttcctgaactaggggtcccagccttggcatggggtcaccagcatccccttacctcaagaccatcctacttgctgctcttgcccctaaaattgtgcctcttgcatcagcagctcccttggccctggcctgtgaggtctgagtggcagctgctcggatgccaggcctggtgtcaggtgcctctggtcaggcagtgaggcatcgtcgctcctgtgccaagggagccaaatgaggcccagagaggtttagtgactacccacaaggtggcacagcagtgtgcaaagatggcaggacttgctccaactcgaaaggactgtgtatcatctcactcgatgccacagtgttcctggaggtcagctttgatctccccgtgcaccccacctccacccccactccctacacccatacacaccccatcagtgcccagcacagaatgtgttaaagtgttggctacaagagacttcccactgggagaatcataaagagggcgcctccgtttcctcacctggacaccaggactgccaccacttctctcttggtaaaatgaagagctgcagttgaaactactttgtggaaagcccacggagcacccagccccccaacacatcccagaaatgccgccttctgcatgtgcctgtgcccagcagccaggagcccccagggtctccccctaagtcctggggcacagatggctcagaaggcgtaatggagcaatgatgaagccactcattagcaggggctgcctaattaacagagggaatgtggggggtgccatttgctgcccacacgccccagggagccaagttggtagagagggcacagcgccagcaccccacccgcaactccagacacccacctctggctggctggcgtgtgtggcccatgagaccaggggaggggcctactgctgcagcttatgggtttacagaccactgcccctgcctctccttcatggaacagacagggaaacaggcctggacagcaggggagcctggcccagggtcccacaggaggcagtggcagggccgggccctttcttccacgacagttccctgttccaaagagtcctcagccaccatggaggggcctggcccagagaagacaagcagccggtggagggagggaccgtttgaagttctcctcctgcctcttgcagccaggggagggagggctgtgatgctgggtgcaggcagctggggggagcaggggaccctcagctggccgctggctgggcacgcccccccaggcctgcaccctgttccttccatttggctcgctaagggaggctgccttctcctccccagtcaaaagtcaaacgacctgggccaacctgctcccaaaccggtttccgtgggatcccaggaggaagctgctcagggcgctgcggaaagcaggcaggagacttcaggtcctgccgcctgcctcccgtccatgctcaggctccgcggcgtcacccttgccctgcgtcctgcagtgtccgttggacaccgggaacacacctcacacctgccagcttcccggtgctaggatgaccaccatgccagcatgcccggccatgctgtgcactgcaaggggtaaccccagaacagccagggcctccactgagagacgcccagtaccctgaacaggccaagggccaggccacacacatcgggactctcagggcattgaactagacctgagggatggccaaggtcaagggggacaggctggcagtggcaccctacttatctttcccacccctgtcccccacccgtctcttacctccaggtctgggcaggtccctcaccggcctgtgcctgtgtggcctgctcctccccttccacctcctcccagggccacaggcacccagtctgagcttgtctgggctggcgggcagccccaggtgaggctccgcctgtctgtctcgccccatttccggctgccccacagccactgcagccgccaccctctcttgttcccaggtgtccttgcaggggccaacctgacccttaggtgctgagtccccccacccctcacctcttcgtggacttcagcacctctctcctgggaagcagaggctgctggatgagcccaggggagtccttgggttctctgggtctcagcggccgcccaggctgttgggagatgctgccctccatccgtgatctgccaactctttgtgagtttcttcctgcctcctccctcagtccaggccccgcctggaatcctgggccagactcacctgcctgtaataaaaacaggccccagccagcagctggtggggtcaggaggcgggaagcgagggggatggggagtcctgctcattcttctctctgagtttccaggctcctgcaggacacctgacagagggagaactgaggtagacaaaggggcagggatggaagcctcttccaggaaagagctcagcggccaccgctcaaggcatcctgggagggtgcccagcagagtcctccaggcaggccttggcccactcgcccctaaccctgcctgcctggcccctgtcccacccttcactccttgtctcagtctggcaattctccaggggaagtttctcaagctctcacacccaggtacccctcctctagatgctttctgattcctgcatcacatcctcaacattgagaacaccgtctgagccccgccaccccttctagaagccatccgggcaatggctgatttattctacaaagtctctatcaggtgccactgtgggtcacgcctggtgcgaggtgctgcatgcacctcaatgcaccctataaaccttccctcacctcccctcaccccactgtttctcccatagtcccccaggctcccccttggctgggaccaatccctaagtgtcggaattctttctttcctgatccgtgtgccctgctagcgcaccaaacccaagaaccagcacagggcctgggatcgagaaattctgggtgattgatgggtgaggaagtgtgggaagaaagcacagacggtggatggatgaaagtgtggacaggcaggggatgcaccacgccttcagcgagtgtctattgagggcctgctgtgcaccaggtcctgtgccaggcatgggggatcctgcagccaagaaaacatagaaacctctgccctcagaactgtaggagagacaagaaatgaataagcaagtaattattaaaaatatccagtggcggcggagtgcagtggctgacgcctataatcccagtgctttgggaggccgaggcaggtggctcacctgaggtcaggagttcaagaccagcctggccaacgtggtgaaaccttgtatctactaaacataacaaaaattagccggacatggtggcagatgcctgtagtcccagctactcaggtggctgaggcaggagaattgcttgagccccggaggcggaggtggcagtgagccgagatttcgacactgcattccagcttgggtgacagagtgagactcagtctcaaataaataaataaatccagtggtaagaattatggaacaaaaataagccaggaaaggggaaagagtgatggaggtgggatgggcagcttagatgctctctgggaagggacacctgtgcacggactgaatatagtggggaaagcggcctttgggacatcccctgagaccagggattggtgtttaaggagcaaggaggaggaggccagcttgattctgtggctgaacaaaggagctgaggtagagatgagatgcaagaggtgaaacagggatgtggacaggtggtcagatgggagcagaggtggatccaggtctggactggagccctctctgactccccaaggcagtaaagaagggttatctgctggccacagcccaggtccattcctgaagaccagcccagaccccactggcattcccagtcccagctccctcttgcccctcttccccatggc

SEQ ID NO: 1242926 - DNA, 4001 bp, Homo sapiens
ctgaccccaaggagccaacaggctgcccggggctatcctctgggaggggcagggggcttggctctgggtctgggccactcacgagttctgagataccttatttgcctcacccacggccatgttcccgacagagcacagagtgcacagtaagcgctcaataaatgcttctataaataactttcttggtccactgaaggagcaacaaaggctattcctacacagcccgtggaccccaggctacaactgctccacattggtgggggtgggaggcccctgccttgacccatcccctcctccctacgcagtaaaatgaacatcagacctctcccagtggggcacagggagaccccaactctaccacgcaggggaggtgggttggggacgggggaggacaggaatcattggtttcctacacactcccagcccccgcggggaccagggtgggaagtcctatcagtgccaggcagatggagccctgaggtctggtggcaacgggcagggtgttcagcccgcagcctgcgcttccccgtctgcctgtcaccggttccaggactctcacccacgtggcccacgttcagagaccctgcggggccaccttctcccaaagctggccttggtgatgaagagcacggctgtcccttgctcagtggggaccccggacccagccccagggacagctgcaggaaagctgtcctcaggagttccctcaagtgccaccccctccctgagcctggcccctggctttctatacctggatgtgctaggtgaccttgggcaagccacctgccctcccagagcctcggttctcccatctgtgtagtaggagcactgatctcacagcctaaagagcagaccccagcttgctgggcccagtgactgtaccactctgagcctcagtttctccagcaacaaaatgcctgggagccccgggaggtgtcgctccccttgggccccagtcccctcccaggcatctccttgtgggtccgcccccactctagagacccacccacagccatgctgacctggactagatcccaccaagataccaagacccccccatttccccatttcaccaccatccctacccactgtccaacagccacccgtgcacggatgcacacatccacacttacactcacatacactcccacactcacactcacactcatactcacacacactcactcacactctcacactcaaacgctcagtcacactctcacactcacactcacattctcactcactctcacacactcacactcacacactctcacactctcacgctcacactcacactcacactcactctcacacactcacactcacacactcacactctcacacactcacgctcacacactcacactctcacactcacactattccccttcccacctgctgtccagcccttgtttgggtacctgctgccaggtggagggtcccacgcagggccaggcggctggaccacctttcaggatccacccccagaggcttaacctgccagccctggtccccgctgcctgccgagtgagctggagagcgtgggaggctcccagcccatctcctacggcagggcagggcagacagctagtgcggagagggagggaccgggtttgtttggtggggagacacccctctcctgccccagctgggctcctccctcctccctgagcttgactggggatgacggacgatatatgtgagtcatggatttctcagagggagaccaggagggggcagggctgagagcgctgaggcagtgatcctgggggatgcccatgactcagcgccgggcaagggggcacctcagcctcacccctcatccaggcagacagtgttcagggacaggaaggggccggggatcactctgcttcctcagcctccatctgtcgcctcccagggccagtctccccaaagttcccacagagaggccggggttgccacggcaacagggcccttggatgctgtccgcccaccccccaggtcagggcgacaactgccctttcctgaaggagagtccagcctccttggcagccgacgggagccagtgctgaccggcagagcggaaggcagtcgggagggagcgggtgacaggcagccgggcaggaggccagccaggccacgcacgactgaccggctgacctgcgtccccccggggggtgacccgtctcccctctcagtgctcctcaagcacccacagtttcaacatcccaagtcattttggattctgagaccccaggggcttctggaaacggcctcctttaatccatctgctgagccaaaggggaaaccgaggcctgggtgaagagccattcccagtggccccaaaagctcagacagagaagtgtggaaatggaccatgccccatcccccttctggtcattcctctgtcagcagcacctcccgctgctggggttcagtgcccttctcgagtcaggaggctttggataactcacactccctgcagaggctcctgtctgccctcctcctccgagcaatgaggatagatgattcctcagtcagatgtgctgggaggcttttacaatgccagaagggtgagtggtgacaataacagtaattacactcgctgaccaccgtctgcattccagctccagagcgcccctggcagtggagagaagtcaaacctgctactcagaccagtgcctggtacttgccaagccctcaataaatactccctgtgaatgtggtgatgaagaagagggagcttaaggcagatacatgtagctcagagatgagaattaacctgcccaagatcacacagcagggaggtgcccgagttgggatggcgggagcacaggccgtctggctccatagcgggtctcctaaccactcagcaatccagcaccccaggcctcagcctggggcctggacacgtggatgcttggggaacttgagattccttctctccggtagagatctgccttctaaacaagggggccaggaaaagcttccccatgccacgtggaggaagaatgaatggaacgtctcgggcagcctaggagccagggctgctgcaggtgaactgcactcctcacctacctgcttgaaatcaagctgcagaaaggaagggccacaaagccaccccgtggggtgcagggaggccataaggtgagagcttccagaaaacggcactgtgcttcccacattcacagtccccagtccaggctgtgggccaatacctggggcagggaggcacagtggggactgggcccatgtcataccctctgctctctcccggggctgcagtgggaactcccttattgccaaagcagcagaggccagcctacactgggggcccactaacaagggaggacaagtgagttatctaggggaggatgggttgtccctgacataccaccacctctgcctcagtttccccaaggtcagtccttcagggcctgatcaactggtaacccgggcagcctcagctgttccccagggaccaggcccacagggcagctgtccccccaccaccaccaccacacacacaccccacagagcgtgctgaccagaagggcacagatggagagttgaaggcaccactctctctgcagatggctgaagagagtgcggagccagctgccactctggccacataggagaggcttatggggctgcctggctgggcggagttggctgcccagctctgcctgcctctctcaccgtcggactttgcagagacctactatgagctaggggcaggcaggtgaggaagcaggcccccagctctgagtctggctagagagacaagcctggttctcatagtagcgatacctggagttggtattcagcatccaggggtctctgggagtaaagggggagaaattcaatgacttgttaaacacaacactatctgttatgagtgctgataacaggactaataatcacctgctatgtctggaggttttatggtgtaagatgctctgcttgtacagatcattctcattttatccacacaaccctgtgggttgggtacc

SEQ ID NO: 1242927 - DNA, 4001 bp, Homo sapiens
cagggaatgtacatgcctagagcaggggtggcaggagttaggggcataaggttcagacaagctctgcagccaactggaatcttgaggccagcctgtcccttctctgggccttattttctcctctgtcaagtgggcaactctgatgtttgtcccctgactgccttctctgcagccagggccctccaggctcccgcaggcttcaggatgcctacaggtaagaacagagcttacctccaagctggtagcaagggacaaagaggatgctgaaccgtctcccctgacccctctagactgtcttccctctcaaaccacagccggacctcagttgtctggctgaggttccccttccctatctgtgttcccacgttgcccaaggccaggcccgcaaggtcagcccagtcacctccctccttgcttagcagttcaactaccccaggtctggcaaactcccatctttggagcgcaggacacttagcattcccaggctggccaccaaccctccctttcttttttcctccccctcctcgaggtcctggatcactggctgaggggccgagagcaccctcccctactaagtaggctgagaagaacaaagttctcccctaccaaggctgggggcccgagcctgactgtgcctgggccccgtccagggaagggaagtagaagcactgagttccatccccactcctgagcacacagcacagcatcactgaccatcagaggttgcacaccccgcaggcggggtgctcaccacctccagtgacacaactatgttcattaagctcttcgaaaatgcaagacaggattgtgagctttttacacatgttcacgcatttaagcttcctcaaaacccttgagacaagtaccatcacacccactcaacaaataaggccagcgaggcccagggaggtcaagttacctgcccgaggtcacacagctagcaagtaatgaagattggatgcgaacccagggctggctccaggacacacgctgtccatctgcaagcctatttccctcctgaacttacctgactcttagaaagcacatctcttgaaaagtcacagtaaagaaagcttccaacaatgtgtttccatgggttcagctggacgccatcctcccaagggcccaaatcagggagcccatcagaactcacccaggtgaccttggatcccagccccactggtggctctttcctgcacttccagtcccctcacgccctggacttgtcagaggcttgtttctgacaccgggggtgcagcccagggacccaaaagaatcttcagcaagggctgggctgcagggacgggtgtggagctctcacccccaactatttccttgtagttgaggctgctgtcttaaactgcccaagtcccttggagtaccatctgacccccccagggtccctagtgccaccacacccccacccactggctacaccatcaatgctggggagaaggggaatgcacgggagaggaaaaagataaaggggaagggatggggaggaaggaggcgagctggaggggaaggggagtgaaggaggaagacaggggagaagcggggagcagggagagggagcaggagtgaaagggacggggaggaggggagaggaggcgggagaatcgtacctggactcctttgtggcatcaggcagactatagatacattaagaacgtgcgtggcagatgaggggttcttgtttgcaggcagtagcctgcggggctggtgggtcaatgtcccccgaccaccttttttcaagaggacagagactttgaagctgggccaccccagccactgctccctcactggagcttcaaacaaaggggacagccagggaatagaggctgagaagccccagccgccagcgcgggagaaggggcgcaggtgacagcagcccctggcaaccgttgccctggcaaccgttggcagctgcagggactacgtcacaccccggctcagacccagcaaagcaacgtggctccgtaacttgtcctgttcccaagtcctcaactcagacgctgcccaggccagacagggagctggcaggagggagggcaggggttaggacagcgatttatggggagccccggggacacctgcctgtcttgaagggaccacaaagagccagagcttccaatttctcgagagaggcagagccccaggtttttacatgaaatctgcaagtttgtcaacattgactttaaaaccaaatcttttttttttttttctcaaacagagtttcgctctttcgcccaggctggagtgcagtggcgtgatctcagctcactgcaacctcagccttccagtttcaagcgattctcctgcctcagcctcccgagtagctgggactacaggtgcccaccaccatgcccggctaatttttgtatttttagtagagacggggtttcactatgctggccaggctggtctcgaactcctgacctcatgatatgcccgcctcggcctcccaaagtgctgggattacaggtgtgagccaccgcgcctggcccaaaaccaaatctttttagaacccagtgcaggccacccagtaaccaaattatgcctaacagtagctggatttgcttctggaagctgccagcctgtggccctgccctcaaaacaagctgaacaccctctaatcccaccactggcttttgtgagcacaatgtgtgcatcatatttctctgaaaactccttagggtccacctcctccaggaagcctcctcagattgccacagcctaccaagaatcccccttctgagttagccctaggcctggaggttcctcctggcttccttctagagctcccggggcggggctgggagctcagattctcttttgccagtctggggaaggaggaaaatagaggcagagcttctgaaactcctactgtgtgccaggaactacactgggcattttggagatccatttctaccactctgcaaggttagccctaggggacccaccttacagattgggaaacagagactcgggggatgtgacttgctgtgagccacctagctggtaagggaagggtatggaatttaaatggagattttctctgggacatgaagctatcaagaccagttgtccatctggcacttggctaatccctaactctcccccacgttcaatgctcagccaactttatttgaacatctccagtgacagggagctcgctctcttccaagagggcacattcctttgatctctaagtttttcatacccactgagtcaaagggaaaaggacataaaaactgtggtacgccccagacagggcacagaaaagaaccaggggttagaacccccaccgaggttttcggttccaggccagcagatagggtggggttgctcaggggtgcaaaaggtcctggggtctcagtcaaccagctacaagcactttctcagagcacaagtggggaaccccactggcaatcacattctgaggggagtccaacagaggaaggggctttgggatgatttctggcagaggccatgggaaaggcagcaggggcttggggctgaggggatggtgtctctgcaactccccttctcccccgcccctccgtggagcagagccaggaggcagcttcagtcaggaggctgctattgtctcactgcaggcccagagctgggtcccattcaggccctatttttggcccccggaggaagaggaaaagaaagcaaagaaaggacttgctgttctctggtgaaaccttctcccggaaaggctcacaaggcttgctggccggagaaggcggcctctgttgcatcaaaggatcctgtgcttaaagggagctggcaaggggctgtggttcaggggacctggggggaggtacagacgaggcacaccacgccttttacatacacttggcactcacttacaacagcaacccggagaaacagaggcacagcttccccagccccacccatagtccctaaacatcccactcatagtaataataaaaataactgcaatagctcattgctgcccagagccaaaa

SEQ ID NO: 1242928 - DNA, 4001 bp, Homo sapiens
ctcctgtgccaagggagccaaatgaggcccagagaggtttagtgactacccacaaggtggcacagcagtgtgcaaagatggcaggacttgctccaactcgaaaggactgtgtatcatctcactcgatgccacagtgttcctggaggtcagctttgatctccccgtgcaccccacctccacccccactccctacacccatacacaccccatcagtgcccagcacagaatgtgttaaagtgttggctacaagagacttcccactgggagaatcataaagagggcgcctccgtttcctcacctggacaccaggactgccaccacttctctcttggtaaaatgaagagctgcagttgaaactactttgtggaaagcccacggagcacccagccccccaacacatcccagaaatgccgccttctgcatgtgcctgtgcccagcagccaggagcccccagggtctccccctaagtcctggggcacagatggctcagaaggcgtaatggagcaatgatgaagccactcattagcaggggctgcctaattaacagagggaatgtggggggtgccatttgctgcccacacgccccagggagccaagttggtagagagggcacagcgccagcaccccacccgcaactccagacacccacctctggctggctggcgtgtgtggcccatgagaccaggggaggggcctactgctgcagcttatgggtttacagaccactgcccctgcctctccttcatggaacagacagggaaacaggcctggacagcaggggagcctggcccagggtcccacaggaggcagtggcagggccgggccctttcttccacgacagttccctgttccaaagagtcctcagccaccatggaggggcctggcccagagaagacaagcagccggtggagggagggaccgtttgaagttctcctcctgcctcttgcagccaggggagggagggctgtgatgctgggtgcaggcagctggggggagcaggggaccctcagctggccgctggctgggcacgcccccccaggcctgcaccctgttccttccatttggctcgctaagggaggctgccttctcctccccagtcaaaagtcaaacgacctgggccaacctgctcccaaaccggtttccgtgggatcccaggaggaagctgctcagggcgctgcggaaagcaggcaggagacttcaggtcctgccgcctgcctcccgtccatgctcaggctccgcggcgtcacccttgccctgcgtcctgcagtgtccgttggacaccgggaacacacctcacacctgccagcttcccggtgctaggatgaccaccatgccagcatgcccggccatgctgtgcactgcaaggggtaaccccagaacagccagggcctccactgagagacgcccagtaccctgaacaggccaagggccaggccacacacatcgggactctcagggcattgaactagacctgagggatggccaaggtcaagggggacaggctggcagtggcaccctacttatctttcccacccctgtcccccacccgtctcttacctccaggtctgggcaggtccctcaccggcctgtgcctgtgtggcctgctcctccccttccacctcctcccagggccacaggcacccagtctgagcttgtctgggctggcgggcagccccaggtgaggctccgcctgtctgtctcgccccatttccggctgccccacagccactgcagccgccaccctctcttgttcccaggtgtccttgcaggggccaacctgacccttaggtgctgagtccccccacccctcacctcttcgtggacttcagcacctctctcctgggaagcagaggctgctggatgagcccaggggagtccttgggttctctgggtctcagcggccgcccaggctgttgggagatgctgccctccatccgtgatctgccaactctttgtgagtttcttcctgcctcctccctcagtccaggccccgcctggaatcctgggccagactcacctgcctgtaataaaaacaggccccagccagcagctggtggggtcaggaggcgggaagcgagggggatggggagtcctgctcattcttctctctgagtttccaggctcctgcaggacacctgacagagggagaactgaggtagacaaaggggcagggatggaagcctcttccaggaaagagctcagcggccaccgctcaaggcatcctgggagggtgcccagcagagtcctccaggcaggccttggcccactcgcccctaaccctgcctgcctggcccctgtcccacccttcactccttgtctcagtctggcaattctccaggggaagtttctcaagctctcacacccaggtacccctcctctagatgctttctgattcctgcatcacatcctcaacattgagaacaccgtctgagccccgccaccccttctagaagccatccgggcaatggctgatttattctacaaagtctctatcaggtgccactgtgggtcacgcctggtgcgaggtgctgcatgcacctcaatgcaccctataaaccttccctcacctcccctcaccccactgtttctcccatagtcccccaggctcccccttggctgggaccaatccctaagtgtcggaattctttctttcctgatccgtgtgccctgctagcgcaccaaacccaagaaccagcacagggcctgggatcgagaaattctgggtgattgatgggtgaggaagtgtgggaagaaagcacagacggtggatggatgaaagtgtggacaggcaggggatgcaccacgccttcagcgagtgtctattgagggcctgctgtgcaccaggtcctgtgccaggcatgggggatcctgcagccaagaaaacatagaaacctctgccctcagaactgtaggagagacaagaaatgaataagcaagtaattattaaaaatatccagtggcggcggagtgcagtggctgacgcctataatcccagtgctttgggaggccgaggcaggtggctcacctgaggtcaggagttcaagaccagcctggccaacgtggtgaaaccttgtatctactaaacataacaaaaattagccggacatggtggcagatgcctgtagtcccagctactcaggtggctgaggcaggagaattgcttgagccccggaggcggaggtggcagtgagccgagatttcgacactgcattccagcttgggtgacagagtgagactcagtctcaaataaataaataaatccagtggtaagaattatggaacaaaaataagccaggaaaggggaaagagtgatggaggtgggatgggcagcttagatgctctctgggaagggacacctgtgcacggactgaatatagtggggaaagcggcctttgggacatcccctgagaccagggattggtgtttaaggagcaaggaggaggaggccagcttgattctgtggctgaacaaaggagctgaggtagagatgagatgcaagaggtgaaacagggatgtggacaggtggtcagatgggagcagaggtggatccaggtctggactggagccctctctgactccccaaggcagtaaagaagggttatctgctggccacagcccaggtccattcctgaagaccagcccagaccccactggcattcccagtcccagctccctcttgcccctcttccccatggcaaattcccaacagtcgatgccacctttgccgcacccatgggcctgcaggcctgctctgccctacgagtctcctgcttgagtacagacagggttggggtaccagaagggagaaggagtgtcagagagagggggatctgcaggatgacagcctgacctctaggctccggggtttccccacagccccagagatgtcacccaccctgataaggacaccaagggagtcccagtgacttcctgtctacccgctggcaactccgccacgcctgacacccatgctccatcccccatgacctctggcctcaggg

SEQ ID NO: 1242929 - DNA, 4001 bp, Homo sapiens
cctgtgggtgggatagcactcccctcctctccagaccctctatgctccagagcctggcctccatggactgcctcatttgggggtcagcaagtggaaagtggactggaggtcagagggcaggaggagggcagagtgggcatttgcccccaccccgcatggctccttcagcccctgctggctcaccgtgagcaaaccaccgccatttccctcctgtagccacagtctggctgtagaagcccagggggccactccctcctggcccctttagacctcacggtgctgaaggctgccccaggtgccagcctgcccagtgaccaccctccttgctccccgtgccctgcccgcacctttgtcacgtgtcccttcatgccaggccctccattgcatccaccccttgctcagccctaacagctgggtctcacatgcgagcccccaccacactgtgtcactcctgcagactgtgagccttttgagggcaggggccaagtggtaccagcaggagcagagggcaccatcgatgcttcctgaatgaatgaatgaatgaatgaatgcgcaaatggagaatggagactaacacatcactgtccacacaggaagtgtgcagaccttcctgtgtgtagacctctcagagctccttgctcaatcaaatggctgctgctctgccccaaccagagcacccacatcaccatgggggaaacagcatcacctggaggaggcttgaaggcccaaccagcgatgacagctgggacctgaggacgcccatgagccctggtcacagctgccatcggtggctccgttcattcatctatcaagggctgcctggtggcctgctctgtaccagggcctcccggggccactaggaggacagtgctgtcatctcccacccttttttgagccagggactgattcactccactgaatcttccaatgtttgaaaagaagagggttatttgaagaccaaataagttgatctatgtggccaaagtcacgcgaccacacgctggacacacagggagatggacatgcaggcccctcaccgagtcaggagcaaaaagagagtggcctgcaaggccctgagacaggagcactgaggagggagcactaacgggggagcacctccctctgtccgagagggttgctaagacgccacagaggccaagaagggtaaatggagctggctaagtgggcaaggggtagggggacagctttcctgggagagaggccagcaaaggcaaggcccgggcacttccatggcctctggagacgcaccatgtgtttgtgtgtgagacgggagagtgacggggaggagtgtggatcctggctcaggccactgaggaccaagaggttgtggctgagactgggagagggagccggtgtggggtgacatgtgcgggaggagaggtccagaagaacgaggtgacagaccttcctggcctcagcttccagagtgtctgaatcccgtccccaggatctcacaagccagctggagaattgcctgcccggggccaacccctgtctcagagccaggcctgtcagggagacacagcccaggttggggagtcagggagcaccctccgacctcccctatctccagggcactgtggagcaacaaagggaacctgagaccagtcctgagcaaggtttagtggaaggacaggactgacccaaagggacagggctagagaaggtgctgaggcggccacggggggtatcggaggacacatcccagacaccccaactcctcaccttctccagtccctgcgtctgtccctggatccctccctcggcagggcagggtcggcccagcgtggcaggaggggatgaggtgccagccactcacctgaggtcgggagcaggaggagcaggagcagggcccccaggcccctgggcgtcgccatccttggccagccttgcccacgccaggagctctgtggctgtctggccctctggccccaggctctgctgagctggcctgcccccaccctgcagccccaccactctggcttcctgtgtcctctttctcacccttcctgctcgatggcgccattggttgggttgtgaaaggtgagtgtggggaactgggcagtgctcccagtctcaccgcaccctgggtccacctgcagagggagctgctgagcccacccaggtatgtgcccccggggccccactggggtgggatctacggggctaggggctgggtggccacaggggcctggctcagagcggatccctgggaactgtggtgagcacaggctttggagtcaggcgcacctactcagacccctcctctcacaagctgggagcctctctgagcctcagtttcctcctctgtaaagtgaagatggcaatggggctgcctcctaaggctgtgtcagggtttgatgagacctgcaacaagctgggcacagagcctggctctgggcatgaggacgaagacccagatggtgcctatggcttgaaccaggctggagggtgtgggaggagagcaggagctggccctgcagcctgagcttcccccaccagcctggataacaggacggacccagaggcagggtagcgggaagacagcagtgcggccccgggggctggtcaggcctgagctaacatccatcctggccacttcctggccgggtgaccttgcatgcactgtctgtcaccctgagcctcccgaggtgtgtgatgaaatcatggatgacgcaggcggagccgcctgtggccattacatcatttctgatcatcagagctgtgaaattgttgtctttacaccccaaatggtcactgatcaggtgggaggtgggggtggcaaacactcctgggcttcagcctaaaggaattagggcgccagccactcgggccaactctggaggccccacggatgcactgtgcatgaggccatggccacttggcaattggaaggtgaagggcatcccaccaaggtgtgtggttgctggcatccccctctggcccacggggctggcactagccctactcagccttgggattgaactggggagccgctcagcccctgctggcctccatttcctcctcctcccactcagtgtctcctgctgagccctctgggtctgggaaggggtagggaggggatgtcagggtcactcatggtgtgggagcaggtgggaattcagcatggagcagcaggtcagagcccagggcttcctgagccccagaaacttcctctgcagggagggctgcgaaggcagatgaatggctgggcctgccactgctccacacctggccagccttctcctggaagatctgcagacctccctcccagctgcaggtgagggtgaggtggggcagtggacttggatgtgctgggcccatcgctgaagccccatcctggcacctgggccctcagagaggctcgcaggtaccagtgtgtgaagaagcgcctgggggtgagcagactgagattccgagcagccagcccacctgggaagtgggcagagggcaggtgcaggggaaggtcaggcagggctggaaggagggccaccttttcctaaggccccttccctgaaacgccccctggggaccagggactagcctggagccactcacagaaccctgagaccccccccaaccccagggccaacaaaacagtagtgtcccttcctgccgcctcctgccccagcttctcccaatggctccagtgggcagggcctcaagtcctccagcgagacccagccagcattcagccctcagctgctccaatccatttcccaagctaaagggatgtttccagatgcacgcctggccacatgctggcagaaagggcgatcccactgtccaaagccccacagcctgggaaagtgcatgataataaccatcggggtaaaaggatcagcatggaactgttggtgccctgtgcagggcctacctgagaaggtgagacccaacccaagacccctccccactacctgagccagcctcagatgcagaaacaaaatgtttgagaagcaggagaattgcggaggaacggg

SEQ ID NO: 1242930 - DNA, 4001 bp, Homo sapiens
agctccagccacaatggcctttgttcagttcctctaagctcattcccacctccaagcttttgcaggcacagtgccttcctcctggttcagtcttcctccaagacctcccagcggagggcccctcttctagctgggctccactcaaatgtcactcccggaacagtcatctcaggtacatacacccctgtcaccttcttttacatcaccccatcttattttcctggccgtcctcaccccaatcggatttcatagccatttgctatgggtttgtttaatgtttgtccactcacttccccagccccgggagagcaggggttttgtccgttttatacaaggcacccagttctgtccctggcacgtttcttgaaataacatattaatccagtaaagattctgagtttatctttctaacaaaactgcctgtcttgctgcctgtgcccccaaatggcggctccttcctcctggaatctccttcccttcccaactcagctgacccctttccaggcttagagcagggagcagatagcaaactgttcactccacagtcttagataccaaactggccgggagggcttccaaacgacagatgccaatttgcattctatttacatgtcatttgcatgcagtttaactcaaagcctggatcctccgcaagcccgagtccccaccgaagaaacttctgaattaagaaggttccttggctgaagtgccggggtttttgtgccagatccctcccccacttctcttgtctttgcggggtcccccagggctttctgggctctgttcaggtgccccccggcctggtgcagttgggcggccaatgtggcgcgtgggctggggccccaggcggggacgccgctgcccgccacactccaggggcctttgtccgcgctccaaggagccgcccccttagcgaacgggggacggaaagggaggactggctaggcctgggtgtgacagagcaaggacggaggagtgaacccgctgcacgggggagatttctggggcaaggtcgttggccccttcccaggctgttcaaccggctgcccggggccaaggcgggtgcgggctcctcccgcgcgctcccttttcggcctaagcgctagggaccccgggatgtgtggggtccttgtggggctggaagcctgtgtcccccaaggagaggggaccgagaacaggtctagtccttatctccagcctagccgcctcttccagaggtccaagtgccccctgtctggaagggaaacgccactgccccccccgccattgtatgcagccgccccctcctccccacccctccccgtcattcgtccccagcccaggtctcagctctgccatctcccaccgccgtgtccccccctccccttgctgagtaatgcgcactcaagccggctgcgggcttgacccccagcccccgcgacaggtgcggctgttcacccccaaagtccagcccttgtgcccccggctgcgtctgccctgtccacagtcagcccccaacgcggccccaggaccagcccgcagctcctcacacatgacgagtcactaggacacggctgggctcctttaccctcccagctgcccttcacctgtggtcgcccccacaccctcctgggagacttggatctctacctggtccgggcacagtctccctccccccgtaaaggtccccagatcctcccctcccccgcccacccctctacggctctgctctcgtcgcaccgtggttcccctcgcccagattccacatctcccccagcaataaactccctggcttgggttgggggggcgcttagaaaaacacaagaagcggaccccccaattctcccaaatccacggcgggaaaagtttctggggtccccacagcgtcctccactgcatcggcgcagctcgcacttaccgacccccgcggccccgcagcgccgacgctccagctggccttcggcccgagtcacatctctgcggcgcggccgcggcccccgctccacgcacgcccgcctgcgggtccagcttcactgcagcgcctgccagagtcgctgccgcgcgaggcgccccctggcccggcccgcgctgctgcagcggccgcggccccgcccccgcccccgcccccggccggccccgcccccgggcctccgagccccacccccggtcccgccggcggttccgcgcggggctaggcgccgtctgcatgcacccccggagcccaagctcgtagcttctagcccggatctcagagacgattcccccgacctcgtgcccccaattcggggacattccccccacaacgtcagtgcgcccgtaagcagtccagacgagccgggcaactccccagggtagatccatttgcgggaacactcccctagccaatacacttaccgagggaggtatcgcgacccaggggtcccagcgcggaagccttcctgcccccaggccacgctccaaggggggttcataagcagtaacttccccgaaacacaccagcaccaggtccaggacgcagagaggatcgatcccgcccggtgcctctcgaagtcaccaacgccccggtatacacctaggcgcacacacaccgctaggcctcctccaggcaggttcctcctggacacactcttctctctcctcactgcccaactcccagatgtcgttgtccgtttacgcacactgggaccaacacccgcttccttggcccctcgaaacacacacgtccagtcggtgcacccctcacgtgggtccctacgcaggatcgccaccacccctaccgcacacatcacccacgtacgcacatgtccactgcccttcagggctcacacactcagcggcccgggccactggccgtgcgctccgcagacggtcagggcacagcccggacgcgtgtccgctgggcggccgtgggacctgcttgaaggaggggtccggggcagccgtctctgagtccccctcaccccgtcctagtcctcaggcctctccgaggtcgcattgcttcgaccaggcctgggagctgcgctccggcaccccatatggggctggttccctgggtgaccttcagaccatcaaaccctggcagtctcaggtggccccccgccaaagccagaaacagacctttgagcagcatcccttccctgcactccagattctcagggtgagatttcctttctccctccgcggtgcgccccccaatctctacccccgtcgccgcaaccatcccagccacataagaccaaaagggataggacggacccctgctcccctctcccgggggctgcaggaaggggagatgcagaacacctccttctgggaatagtggcagcccctgatctttggggaccgtggcccttccagatactcccatccctccctgccagcctcccagttccggtccggttaggccacatcccccttgggcacgcatctctgggataccttttattatattcaagggaaaatggaaaggaagaaccataatggcagtttttcgccccactcctggtttatttgcatggatcctcagagcccagaacagttccaggcacagtaggcgctcattaaatgtttgcgggacgacccaaagtgtgttcccgccagactgcgcaattggaaagtggatgggcactgtcacctggtggcagctcttggaactgacgccgagatccttttgtcaacgtgggcaagttcactttcgtgagccacatgtcctcaacgtctgcaaaatggagatctttttcatcgcacatgcctattggggttgttgtgaaggtctaacacgtgctaacatataaagtgcttcacgcagggtctggcatgtggaaaatccttaatatgagctgattaacattgcagttacggttatattccctttcccacttgttttacagaggaccctgactgtgatggtcagtttcactttgggtgatgataccacagggagcacagagtgaaaatgaaggaggacattgagtggcaggtgcattccttccctccaaaaagttcaaacacccatggatgat

SEQ ID NO: 1242931 - DNA, 4001 bp, Homo sapiens
ggcctctaaccaaccagttttgatcacgacagttcaaaacagaagcagaaaaaccaaagctgcacaaggagaaggcaagccagaaataaaaagaaaggactggggaaatgtggctctcgcaagaagggcactgtttaagctggcaaggggaagcaaggctgtctcccaagaaggaagggtttcaatgaggctatctaagctggtctggccagcacccacagccggggaactgagactcacagtgagaagagaatgagaagggatgcgcttgaatgaaactaccacagaatgtaggtggccaaaaaaactcaactaactcaggagtaggatatgggggtgtggagcttctgtctcagaaatcagagatgtccctggcccagtgaccaagaaatttgcccacctgcaatcatcaatacacacccctgctggaaacccttcctggttcccaactccagccaaaacgcaccatgacatcctaatcccagcacacaagactccagtccaccttttctgtctcattcacctcccacatccctctgttagtgttccactacagcaccagcccccttccccaaatgcccagaactccccaacttcctgcggttgctcacagcactgctcccacttggaaggctctcacgtattctgcctgctaaaaaatcccaacacattcttaaagaatccggggaaggggactcaggctcagagaacaacgtggcagtcagattcctcaaggcaaagacagtgcccttctgtcctcatcatcctcaagcctcatggagccagcacaggagttgctatttagcaaaaggcagaggtaattcctggaacccctgccagctcaggaaccagagaaatcagctgtaacgtgataaaccaggaacgcgttaatcccagctgtgttttagcagggaggctgttgcgtcaaggagggccagctccagcctgccagacatcaacagcctgtgttctctgcccggcccacctctgggccagggaggcacagaaacaaagccagcctcctcccggccagctttaaacttagccctgcaaggagtccgcaggagactggactctgacttgtccagctcactgttttgagtcagcagaactgagtgtctcaacaaggtctcaggaggcccaggagctcattaaaacccccaagtccccactggaatgggaccaagtgtcatgatccccctgaagcttactgccatgcattcatgggacactagtgacccgggtgagggcaagatcaaggaaccctccttcccacttctattctcagtcagactctctctagcaagcagctaggtgattattagcttcttacaaatcttaggagtatttactttttaagataacccctcctggctctgcctcctgaattccacccaggctataactctctcctaggtcctagggacccctctatcacccaccccagacatcctggttgtggggaggcagaaatccttcctggctgtgggctcaccttacatgaagctataaactcaagccaagatcctagccagccggccgaccaccaagatgaagaaagtcccagggcccccttaccaaagcccgacaggcccaactctctggttccccacctcggtgactgtccccagaccacagaagtggctggtcggccaaggctccagaggggcctaaaggaaggaattctgccgactctcttccgggaatcaggattggcaaagaccctaaaggccaaagacacggagaaagagactggggaacagaaccaactttccgcagagccccccccaccccgtctcccctcctacctaaaatggtttccctcccaccgcccccatcccaaccctcttccgttttacttttttccaagaacttatcactgagactctattgcttctttcttcattcgcttatgttcctctctccactggaccttggttccacgagagtagggcagacacacaacgtgcggtgcctggcagcacggcccgctcaacaattgacgaattcaattcaacaagtgaaccgtattgcaaggcctcactgagtgcccggtgctgggcaccagtaagtgaacgggcgggagggggcattctctcgttttagccaggcttggctgactgaggagctggccatgggggtggacgtcgtgggaaggaccccagctggggctgctgcggtttttcccttgctcagcggccccagcctccccggggcccagcgcgcgctcacccgctgcagctcgagctcgatctcgccggccttgagcacgatgggtccccgcacggcgtactccaccgccttcacctgcgggttcatggactccagcgtgaggatgcgctcgcgccggctgcgctcgggccgcaccttgagcaccgccgaggcctcggcggccgcgctgctctggctgcggccccaggagctgggggtccggggaccacagccccgccggaccagcgccgccgcccgctgcatcgcgcgcttgcggagagaaaccctggcacaaaaagagaaaaagaacaaacacgtcgcgcactgcccaggcgtgcagcactcccccacacaagcccagccaagggctctttcagcgagcggtgccagcctggcttcggcgctggtgcccatcccccggcgacccggaccctccacggcgccgctgaagcaccaacgcacacccaaccggctttcgcaaaggctgcgcccaaggcatgcatgcaacgtgcctgtcgcccctggtaggccctcgccgcactcggttagctcgcgcgcctggagcagctacccggccccggcgcccacagccgcatccccgcgcccggcgcccgcgccgcccggcccctgcgctcgcacacccaccaccgtcggggccgccccgggcctgtgcgctgcctcctgggccctgtagttcccctggctgctccggagcggctgcggagagtgacgcgaactacaagtcccacagcgccccgcgccgggccggaccgggaccggacagtaggcgggagcgttcgtccgaacgtggccggggctgggcgggctctttgtcccagttgaggggctggagagcctggaggggcggggcaggggccgtgctctctgtcgcgtctgcgaagctagagctgttggcagcctgtccccagtggcgcgtccgcccccctaccgccctcactgcccgcacctgcgaggacgcaggctgctggatggtgcagtcatcgccccgagtttcatcatccaaggccacacggtgcctgcggctgcccaccagagctggcaggaaggcgggtgaggagtctgggacttggccacgccgccctgactaccgaacgccagcttccttctcagcaaaacggggatctgcccacggcctctgagggttgttgtgagacttcaaggaccatctgccaagtggtcaggttttcccgaccactccatctgacctcagacctccatcacttccgttttattttctgcctaccatctgaaattatcttcggttactttttactggcttatggtttacctcccccgactaaccgtgcgagctccagaggggcagaggcagtgtctttcttgttcatggcattcgcagcacctctaacagttcccgccacagaggagccactcagtaaatatttgttgaagaatgaatgcccagcacaagggggctattatgtttggtaacggtgtctgctggcgaaaggctccctggcttgcccagagcaagagcagggcaagactaggaggtggcgtagggtggcgcaaagggagttctggaagactcggggtctaatggagacaccaaaatctacaaaatcaaaaatacaaatacagaatctacaaaatcccgtctaggtcccagattctccatgtgcaaaatgagttaaataccctctaaggtccttccccttggaaattctgtgagtctgggtgttttcaaccagaaaaacagcccagagctcccacatcccaacacacacacactcacattaggtttatgaaag

SEQ ID NO: 1242932 - DNA, 4001 bp, Homo sapiens
ttgctatttagcaaaaggcagaggtaattcctggaacccctgccagctcaggaaccagagaaatcagctgtaacgtgataaaccaggaacgcgttaatcccagctgtgttttagcagggaggctgttgcgtcaaggagggccagctccagcctgccagacatcaacagcctgtgttctctgcccggcccacctctgggccagggaggcacagaaacaaagccagcctcctcccggccagctttaaacttagccctgcaaggagtccgcaggagactggactctgacttgtccagctcactgttttgagtcagcagaactgagtgtctcaacaaggtctcaggaggcccaggagctcattaaaacccccaagtccccactggaatgggaccaagtgtcatgatccccctgaagcttactgccatgcattcatgggacactagtgacccgggtgagggcaagatcaaggaaccctccttcccacttctattctcagtcagactctctctagcaagcagctaggtgattattagcttcttacaaatcttaggagtatttactttttaagataacccctcctggctctgcctcctgaattccacccaggctataactctctcctaggtcctagggacccctctatcacccaccccagacatcctggttgtggggaggcagaaatccttcctggctgtgggctcaccttacatgaagctataaactcaagccaagatcctagccagccggccgaccaccaagatgaagaaagtcccagggcccccttaccaaagcccgacaggcccaactctctggttccccacctcggtgactgtccccagaccacagaagtggctggtcggccaaggctccagaggggcctaaaggaaggaattctgccgactctcttccgggaatcaggattggcaaagaccctaaaggccaaagacacggagaaagagactggggaacagaaccaactttccgcagagccccccccaccccgtctcccctcctacctaaaatggtttccctcccaccgcccccatcccaaccctcttccgttttacttttttccaagaacttatcactgagactctattgcttctttcttcattcgcttatgttcctctctccactggaccttggttccacgagagtagggcagacacacaacgtgcggtgcctggcagcacggcccgctcaacaattgacgaattcaattcaacaagtgaaccgtattgcaaggcctcactgagtgcccggtgctgggcaccagtaagtgaacgggcgggagggggcattctctcgttttagccaggcttggctgactgaggagctggccatgggggtggacgtcgtgggaaggaccccagctggggctgctgcggtttttcccttgctcagcggccccagcctccccggggcccagcgcgcgctcacccgctgcagctcgagctcgatctcgccggccttgagcacgatgggtccccgcacggcgtactccaccgccttcacctgcgggttcatggactccagcgtgaggatgcgctcgcgccggctgcgctcgggccgcaccttgagcaccgccgaggcctcggcggccgcgctgctctggctgcggccccaggagctgggggtccggggaccacagccccgccggaccagcgccgccgcccgctgcatcgcgcgcttgcggagagaaaccctggcacaaaaagagaaaaagaacaaacacgtcgcgcactgcccaggcgtgcagcactcccccacacaagcccagccaagggctctttcagcgagcggtgccagcctggcttcggcgctggtgcccatcccccggcgacccggaccctccacggcgccgctgaagcaccaacgcacacccaaccggctttcgcaaaggctgcgcccaaggcatgcatgcaacgtgcctgtcgcccctggtaggccctcgccgcactcggttagctcgcgcgcctggagcagctacccggccccggcgcccacagccgcatccccgcgcccggcgcccgcgccgcccggcccctgcgctcgcacacccaccaccgtcggggccgccccgggcctgtgcgctgcctcctgggccctgtagttcccctggctgctccggagcggctgcggagagtgacgcgaactacaagtcccacagcgccccgcgccgggccggaccgggaccggacagtaggcgggagcgttcgtccgaacgtggccggggctgggcgggctctttgtcccagttgaggggctggagagcctggaggggcggggcaggggccgtgctctctgtcgcgtctgcgaagctagagctgttggcagcctgtccccagtggcgcgtccgcccccctaccgccctcactgcccgcacctgcgaggacgcaggctgctggatggtgcagtcatcgccccgagtttcatcatccaaggccacacggtgcctgcggctgcccaccagagctggcaggaaggcgggtgaggagtctgggacttggccacgccgccctgactaccgaacgccagcttccttctcagcaaaacggggatctgcccacggcctctgagggttgttgtgagacttcaaggaccatctgccaagtggtcaggttttcccgaccactccatctgacctcagacctccatcacttccgttttattttctgcctaccatctgaaattatcttcggttactttttactggcttatggtttacctcccccgactaaccgtgcgagctccagaggggcagaggcagtgtctttcttgttcatggcattcgcagcacctctaacagttcccgccacagaggagccactcagtaaatatttgttgaagaatgaatgcccagcacaagggggctattatgtttggtaacggtgtctgctggcgaaaggctccctggcttgcccagagcaagagcagggcaagactaggaggtggcgtagggtggcgcaaagggagttctggaagactcggggtctaatggagacaccaaaatctacaaaatcaaaaatacaaatacagaatctacaaaatcccgtctaggtcccagattctccatgtgcaaaatgagttaaataccctctaaggtccttccccttggaaattctgtgagtctgggtgttttcaaccagaaaaacagcccagagctcccacatcccaacacacacacactcacattaggtttatgaaagttggggcagcagtgtaggggagaaggtagacctgagtcggaatatccacagttgcatacagccgtgcactgcttaactgagtttgtactacctcgtcttcgtaaagcctagtttccccatgcgtaaagtcagggtaacacctacctcatactgtgattaaatacattggttgccaataaaagaggaaagtaggtggggagaacaacagaaaccgaagatatctttgagtattcctatgtctgcaaactggcttggtccaccaaaggcgctggaaagttatttgggctctcatgtactggttccacccccgcacctttgtctacactaggtcttgatggccaggtattcagtctctaggtaaaagtcttccccagtgagcttagctcctccttcagtgtcgtcgttatcaactgcccagttgagacacaaacataaccctccacctccaaaacacgcttgaccttgacttgcatgtaatgtccatgcagtcccttgctgtccacccacgtgtcagtgtactatgctcttctgttatctctgtctctgatcagtagggacaggggaggaggggcttagagaggtgatcacaaatctatttccacaactgagaacaacaagcacacagccttcttatgtgtgctcccacgtcatcactgtgaaaaacaagtcgagtgcctaatatgccctctgccaacccgtctctctgagattgcatgaggaaaaaagcttcattgatttcttgtgaaccactgtacaatttgcaaagcactttcttacccaaaagcacaggcagt

SEQ ID NO: 1242933 - DNA, 4001 bp, Homo sapiens
cacagaccctaagcgccgcgcgtgttctgtaccccaccaagctcctaggtgcacagaataaaccctccatccaacccctcccacctgggatagagaggaccaagttatcaaccccgccccctgctggcgcggagcgaactacagaccccgcagggcgtgcggaggcggcacccagaccccgcgtcccagcttgagagctcagctagttggctgaccccgccccctacgagcccgtcgtgtgcaccacacactttgctctacgcccagccccaactacagacccggctcctctcagtcagagtacaccccaagtgcttgggagtgaggacgctgcctggtgggcccaggctccgctgtgcctggggaacttggggctcgccccacctcgagccaaggggccgtggagagtccttcacccctacacgcgcgcgtgcacacacacgtgcacacacacacgcacacacacatgttcacacacacacaccctctctcacgcgcgccgtgtgcaatgctgaattctggagagtaggcgcgtccccccgcgggccagcgcgtaggagctggcaaagaacgtgcgtagggggaaaggtaggctcccaagaagctcccagacggacgtggactgtacagcccctccctagcctttctactgcgggcgctgttgccaagtcctaggtgcacgtgggcagtgggccgcacacgctcataggcacgcgcgcttttctgcgcacttcctcagactgctgtagcggtgcccacggccagccggagtcctcacatgtcctcaggtggtgcacacgcatgaactgcggcaggtgcacagccctgcgtacctgcaaataccagcacggtcgtgcacgcgtgccctgacgcgcgcctctcgggacggacgctgctggagccgggggaagttgaggcgaactccaagaggcctcgacgttcctgggtaagcgccgcggagcgcggagccgcagcgccccctggtgcccctcctgcacttcgccgctgggctccctcccgctttccctctccctctctagcctgatccctctcccgctctccctccggtcgagtctccctcctccccggcccaaggagccctgatctccctctgggacgtacctgtagcccgagaaggtcgaggatgcagtggggcgcgctgcgcgcacgagcatctcggccgcctcagcagccaccgggtttagcgggttcccgcatgctgcggccccagcgcgctcccctggctgtcccgcgctgtccgcatcgcccccacggggggcggctatcccagccggaggctctgcagcagggctctaacggggcggaggagagaaggagaggcagggtcagcccaccaacgaggggagggagggttgaggggaaggctgcagtctgcagtgctcacaagcccccctatgcgcccaggggggctagacaagaggggggaagctgaagcccgatgcccacgacgcccccagtgcggatcctcagcccctgtggctgatagcgggagctccactccagggtgcacaggagaatgggagccccaggttggccacccacgagaagctaactgggcacctccacccgcaccccctaccacctccccagcgccggctgctgggagttgtgcgaccgggagctgctgagcgagggaggtagggagagaaagaggaggtaacgagggtgggggggcgctggctgagtttgtgacgagccagcagtaggagagggggagggaaggacgcgggctcccgcggtcccggttccccgagggaggtggatctttcccacgcagcgaccctcttgtgatcctgccgcttcctccctcttcaggcctcccacctccccccttcccaagggggcctcccaggcccggcgtcccgcgctagcactcaccgcagcctctctccacatagttctcagcagtggccgctcctggtcatctccagggctgatggctgcggccgcgattctcagcgctcacccggtcccatgatccggccaagccctaggagctcccctccaagatccctagctccgcttcctgccccactccggacggcaactgcccggtcctctgagcgcgccggagcaccctctccgcaacccagctccgggctggtgtgtttgagggcgagtgtgtgtgtgagtgtgggagcgcgctcgcgtgtggccggggatccccgcggtccccggccgagagaggcgcgggcggggaaaggcagctccctccgggcccttcgctgctgggccagctccgcgccgggcgttcggctccccacttcccagcgggagtccggtgagcgcctggacaccctggttcacagcactggcaaagccgggttcccggggcgtctttctgctgcggtcgcctccgaggaagaggagaaggaaggtagcggcgccctccacaccaacttagggacttgttctcagccggcgagacgcagtagcccccgctcaagcccaagaggcttcgagctccggcgggcgaaagcgtctcctgcccgcagcctctctcctaggtgggtcgagacagaccccgcagtccctcggcggcgacgcggagcgcggccacccgttccgagagcgcacggcggcaaataaggccaggataggtggctggctggcgacgggggcgcctgcggcggcgcgcgctgctgtccgtggtgttggaaccacgctctccgcccgctcccgggcgtctggtgcggctgaagaatcaattattcagatctctgctaccgcttcctcctcccccagtgcctcgcgctgggtacagttatccccctccacgcacaggcgcgccgacacacacacacacacacacacacacacacacacacacacagagtctgctccaatgcttctccctgtgcctcgccacccccgtacgggaacccactcctctgatctcagggagccagaatcctaaaagcaaagacatctgcatttcccacatgcttccttctaagttctaccaaacagaagcctccctgaggctgccacttctaagctaccagaagaggtgagccagagaacatgggacggcccgggtgtgtgagggcttggttgacttgaattctagcgactgggcatgaaatacatggtcaagggaggagctctgccccttttatattcacctgtatctccaacgcctgtctgcctttcaggccttggaaggaaaggggtcttaaattctaagaggttttgcaatgactgttccaaccctgcctcctccacttaacctaatgtcacctgctgcggtctaaatgtgtgtgttcccacccccaaattcataggataaaatcctaactcccaaggtgatggtattaggaggtggggactttaggaggtgacttcatggcttcatgagagtaaaatgggatttgtggtcttataaaagagatgccagagagtcagctaggtccttccaccaagtgagacttaatcaagaaggcatcggcctatgaacaggaactaggccctccccaaatactgagtctgctgctgcttcatcttggacctcccagcctcaagaagtgagagaaataaacttctgctgttgatgatgttttgctatggcacctggatcaaactaaaatatcacttttggacattatattacttccctttattgatcactaatctggaaatggggggcagtaaaaacatctacttctcaggattattttgaaaagaaaaggaagtagccttaataaaggggtcaacaaggtctggcacatagtagatgctcaatcaacatcatgcaccttgaagtagcctggaagcaggggaacttcttccaagaatgtggatgtggctgctgaaatggagacaggagaggggcacagtgtgtggagacaaatggattcattattgagctggttgttctatgctgggtttcctgggtttttgtttttgttttttttttaatccaaaagacagagaaagcgtgagggaaatgctggaaagtaaattaaaatgggggattgtat

SEQ ID NO: 1242934 - DNA, 4001 bp, Homo sapiens
cccatagtcgccactgacggtccctgcaaggtgaagagtgagaggcagggccgcggtgagcaaggcgaccagaagaaagggattaccaacttggcttcctgctctaggagccaggcatggaactcagcagcaggataggctgctgggatcacggactccattccgagtccccgacgccatccacatccctcgatccatctctaactctatccacaactccaattcgagctaattctccatcccccagccccttctcgcatccagcttcctcatcccctgtctccaggcacttccccatccccatctctgtccatatcccccaccgcattccccaagttcgccgcgggccacagaccctaagcgccgcgcgtgttctgtaccccaccaagctcctaggtgcacagaataaaccctccatccaacccctcccacctgggatagagaggaccaagttatcaaccccgccccctgctggcgcggagcgaactacagaccccgcagggcgtgcggaggcggcacccagaccccgcgtcccagcttgagagctcagctagttggctgaccccgccccctacgagcccgtcgtgtgcaccacacactttgctctacgcccagccccaactacagacccggctcctctcagtcagagtacaccccaagtgcttgggagtgaggacgctgcctggtgggcccaggctccgctgtgcctggggaacttggggctcgccccacctcgagccaaggggccgtggagagtccttcacccctacacgcgcgcgtgcacacacacgtgcacacacacacgcacacacacatgttcacacacacacaccctctctcacgcgcgccgtgtgcaatgctgaattctggagagtaggcgcgtccccccgcgggccagcgcgtaggagctggcaaagaacgtgcgtagggggaaaggtaggctcccaagaagctcccagacggacgtggactgtacagcccctccctagcctttctactgcgggcgctgttgccaagtcctaggtgcacgtgggcagtgggccgcacacgctcataggcacgcgcgcttttctgcgcacttcctcagactgctgtagcggtgcccacggccagccggagtcctcacatgtcctcaggtggtgcacacgcatgaactgcggcaggtgcacagccctgcgtacctgcaaataccagcacggtcgtgcacgcgtgccctgacgcgcgcctctcgggacggacgctgctggagccgggggaagttgaggcgaactccaagaggcctcgacgttcctgggtaagcgccgcggagcgcggagccgcagcgccccctggtgcccctcctgcacttcgccgctgggctccctcccgctttccctctccctctctagcctgatccctctcccgctctccctccggtcgagtctccctcctccccggcccaaggagccctgatctccctctgggacgtacctgtagcccgagaaggtcgaggatgcagtggggcgcgctgcgcgcacgagcatctcggccgcctcagcagccaccgggtttagcgggttcccgcatgctgcggccccagcgcgctcccctggctgtcccgcgctgtccgcatcgcccccacggggggcggctatcccagccggaggctctgcagcagggctctaacggggcggaggagagaaggagaggcagggtcagcccaccaacgaggggagggagggttgaggggaaggctgcagtctgcagtgctcacaagcccccctatgcgcccaggggggctagacaagaggggggaagctgaagcccgatgcccacgacgcccccagtgcggatcctcagcccctgtggctgatagcgggagctccactccagggtgcacaggagaatgggagccccaggttggccacccacgagaagctaactgggcacctccacccgcaccccctaccacctccccagcgccggctgctgggagttgtgcgaccgggagctgctgagcgagggaggtagggagagaaagaggaggtaacgagggtgggggggcgctggctgagtttgtgacgagccagcagtaggagagggggagggaaggacgcgggctcccgcggtcccggttccccgagggaggtggatctttcccacgcagcgaccctcttgtgatcctgccgcttcctccctcttcaggcctcccacctccccccttcccaagggggcctcccaggcccggcgtcccgcgctagcactcaccgcagcctctctccacatagttctcagcagtggccgctcctggtcatctccagggctgatggctgcggccgcgattctcagcgctcacccggtcccatgatccggccaagccctaggagctcccctccaagatccctagctccgcttcctgccccactccggacggcaactgcccggtcctctgagcgcgccggagcaccctctccgcaacccagctccgggctggtgtgtttgagggcgagtgtgtgtgtgagtgtgggagcgcgctcgcgtgtggccggggatccccgcggtccccggccgagagaggcgcgggcggggaaaggcagctccctccgggcccttcgctgctgggccagctccgcgccgggcgttcggctccccacttcccagcgggagtccggtgagcgcctggacaccctggttcacagcactggcaaagccgggttcccggggcgtctttctgctgcggtcgcctccgaggaagaggagaaggaaggtagcggcgccctccacaccaacttagggacttgttctcagccggcgagacgcagtagcccccgctcaagcccaagaggcttcgagctccggcgggcgaaagcgtctcctgcccgcagcctctctcctaggtgggtcgagacagaccccgcagtccctcggcggcgacgcggagcgcggccacccgttccgagagcgcacggcggcaaataaggccaggataggtggctggctggcgacgggggcgcctgcggcggcgcgcgctgctgtccgtggtgttggaaccacgctctccgcccgctcccgggcgtctggtgcggctgaagaatcaattattcagatctctgctaccgcttcctcctcccccagtgcctcgcgctgggtacagttatccccctccacgcacaggcgcgccgacacacacacacacacacacacacacacacacacacacacagagtctgctccaatgcttctccctgtgcctcgccacccccgtacgggaacccactcctctgatctcagggagccagaatcctaaaagcaaagacatctgcatttcccacatgcttccttctaagttctaccaaacagaagcctccctgaggctgccacttctaagctaccagaagaggtgagccagagaacatgggacggcccgggtgtgtgagggcttggttgacttgaattctagcgactgggcatgaaatacatggtcaagggaggagctctgccccttttatattcacctgtatctccaacgcctgtctgcctttcaggccttggaaggaaaggggtcttaaattctaagaggttttgcaatgactgttccaaccctgcctcctccacttaacctaatgtcacctgctgcggtctaaatgtgtgtgttcccacccccaaattcataggataaaatcctaactcccaaggtgatggtattaggaggtggggactttaggaggtgacttcatggcttcatgagagtaaaatgggatttgtggtcttataaaagagatgccagagagtcagctaggtccttccaccaagtgagacttaatcaagaaggcatcggcctatgaacaggaactaggccctccccaaatactgagtctgctgctgcttcatcttggacctcccagcctcaagaagtgagagaaataaacttctgctgttgatgatgttttgctatggcacctggatcaaactaaaatatcacttttggacattatattacttccctttattgatcactaatc

SEQ ID NO: 1242935 - DNA, 4001 bp, Homo sapiens
aaatccagcatctgggctacggcctcctggtccgtgtcgtccccaaacacgaggccgtggatgcgtgccccggacatgaggtcgcacacgtgcgtgatgaggctcttggggtcggtgcggttcatcagcagagctaccacgttcacgtccaggggcagccccgccgcctgctcggggccccacagtgttcgaagttcgcgctctgtcacgtcgtggctgtgacccagcatcaccgcaatatttagcgcggggggacccttctccgccgccgcgctcggcgccggaccgcgccagaccagaagggccggcagcaccagcagggtccaatagcccactctgcccatagtcgccactgacggtccctgcaaggtgaagagtgagaggcagggccgcggtgagcaaggcgaccagaagaaagggattaccaacttggcttcctgctctaggagccaggcatggaactcagcagcaggataggctgctgggatcacggactccattccgagtccccgacgccatccacatccctcgatccatctctaactctatccacaactccaattcgagctaattctccatcccccagccccttctcgcatccagcttcctcatcccctgtctccaggcacttccccatccccatctctgtccatatcccccaccgcattccccaagttcgccgcgggccacagaccctaagcgccgcgcgtgttctgtaccccaccaagctcctaggtgcacagaataaaccctccatccaacccctcccacctgggatagagaggaccaagttatcaaccccgccccctgctggcgcggagcgaactacagaccccgcagggcgtgcggaggcggcacccagaccccgcgtcccagcttgagagctcagctagttggctgaccccgccccctacgagcccgtcgtgtgcaccacacactttgctctacgcccagccccaactacagacccggctcctctcagtcagagtacaccccaagtgcttgggagtgaggacgctgcctggtgggcccaggctccgctgtgcctggggaacttggggctcgccccacctcgagccaaggggccgtggagagtccttcacccctacacgcgcgcgtgcacacacacgtgcacacacacacgcacacacacatgttcacacacacacaccctctctcacgcgcgccgtgtgcaatgctgaattctggagagtaggcgcgtccccccgcgggccagcgcgtaggagctggcaaagaacgtgcgtagggggaaaggtaggctcccaagaagctcccagacggacgtggactgtacagcccctccctagcctttctactgcgggcgctgttgccaagtcctaggtgcacgtgggcagtgggccgcacacgctcataggcacgcgcgcttttctgcgcacttcctcagactgctgtagcggtgcccacggccagccggagtcctcacatgtcctcaggtggtgcacacgcatgaactgcggcaggtgcacagccctgcgtacctgcaaataccagcacggtcgtgcacgcgtgccctgacgcgcgcctctcgggacggacgctgctggagccgggggaagttgaggcgaactccaagaggcctcgacgttcctgggtaagcgccgcggagcgcggagccgcagcgccccctggtgcccctcctgcacttcgccgctgggctccctcccgctttccctctccctctctagcctgatccctctcccgctctccctccggtcgagtctccctcctccccggcccaaggagccctgatctccctctgggacgtacctgtagcccgagaaggtcgaggatgcagtggggcgcgctgcgcgcacgagcatctcggccgcctcagcagccaccgggtttagcgggttcccgcatgctgcggccccagcgcgctcccctggctgtcccgcgctgtccgcatcgcccccacggggggcggctatcccagccggaggctctgcagcagggctctaacggggcggaggagagaaggagaggcagggtcagcccaccaacgaggggagggagggttgaggggaaggctgcagtctgcagtgctcacaagcccccctatgcgcccaggggggctagacaagaggggggaagctgaagcccgatgcccacgacgcccccagtgcggatcctcagcccctgtggctgatagcgggagctccactccagggtgcacaggagaatgggagccccaggttggccacccacgagaagctaactgggcacctccacccgcaccccctaccacctccccagcgccggctgctgggagttgtgcgaccgggagctgctgagcgagggaggtagggagagaaagaggaggtaacgagggtgggggggcgctggctgagtttgtgacgagccagcagtaggagagggggagggaaggacgcgggctcccgcggtcccggttccccgagggaggtggatctttcccacgcagcgaccctcttgtgatcctgccgcttcctccctcttcaggcctcccacctccccccttcccaagggggcctcccaggcccggcgtcccgcgctagcactcaccgcagcctctctccacatagttctcagcagtggccgctcctggtcatctccagggctgatggctgcggccgcgattctcagcgctcacccggtcccatgatccggccaagccctaggagctcccctccaagatccctagctccgcttcctgccccactccggacggcaactgcccggtcctctgagcgcgccggagcaccctctccgcaacccagctccgggctggtgtgtttgagggcgagtgtgtgtgtgagtgtgggagcgcgctcgcgtgtggccggggatccccgcggtccccggccgagagaggcgcgggcggggaaaggcagctccctccgggcccttcgctgctgggccagctccgcgccgggcgttcggctccccacttcccagcgggagtccggtgagcgcctggacaccctggttcacagcactggcaaagccgggttcccggggcgtctttctgctgcggtcgcctccgaggaagaggagaaggaaggtagcggcgccctccacaccaacttagggacttgttctcagccggcgagacgcagtagcccccgctcaagcccaagaggcttcgagctccggcgggcgaaagcgtctcctgcccgcagcctctctcctaggtgggtcgagacagaccccgcagtccctcggcggcgacgcggagcgcggccacccgttccgagagcgcacggcggcaaataaggccaggataggtggctggctggcgacgggggcgcctgcggcggcgcgcgctgctgtccgtggtgttggaaccacgctctccgcccgctcccgggcgtctggtgcggctgaagaatcaattattcagatctctgctaccgcttcctcctcccccagtgcctcgcgctgggtacagttatccccctccacgcacaggcgcgccgacacacacacacacacacacacacacacacacacacacacagagtctgctccaatgcttctccctgtgcctcgccacccccgtacgggaacccactcctctgatctcagggagccagaatcctaaaagcaaagacatctgcatttcccacatgcttccttctaagttctaccaaacagaagcctccctgaggctgccacttctaagctaccagaagaggtgagccagagaacatgggacggcccgggtgtgtgagggcttggttgacttgaattctagcgactgggcatgaaatacatggtcaagggaggagctctgccccttttatattcacctgtatctccaacgcctgtctgcctttcaggccttggaaggaaaggggtcttaaattctaagaggttttgcaatgactgttccaaccctgcctcctccacttaacctaatgtcacctgctgcggtctaaatgtgtgtgttcccacccccaaattcataggataaaatc

SEQ ID NO: 1242936 - DNA, 4001 bp, Homo sapiens
ccccggccgggtgcggcgcgctcacctttcatgccagggccccgcagctccacctcggctgatacatgctggagccaccgtcgcccagtgtttgtctaaactgcttatctcacccggggctgctcggcggcggcagctcgggcccgctggggaggtggagcttccggggccccggccaagaaacacctgctgctgtcgccgccgaggacacacccaaacgcaacgccgcccactcccgggccactggctcgctcccggctccctgacctcagccagcgggaggtgtcgggtttcagccgcaaacacacaggcgcgcgcgcgcgcaccgacgggcgcccggatccacccgcccaggcacacgcccctccccggcccggccggccaggtgagccggggacaccagcggggccgcggaggtgccacccccacactctcgggagcccctggctggactgctcgggggtcccggggaccttggtggctaagaccggccacttaactcttaaagtagtgcagcaccctcgccacgtgagcggagccctgtctcgcagctgcgtcccgggaacctagaacagtgcctgacacagagcaggcccaataatgggcggacgggtaactccgtgtcctggaggccttttggagaacaactttctgggcgctggtggcgcgtggggtggggggaggcgacacaaaacagactgtgtacccaagccccaccccccccatgcctgaccttattaccccaactagaaaaggctgaatactaagaacttggcctcaaaattccataaggcaccccaccccccagttttaagtaacttttgggaaggccacaattgcgggccgctgcggggggtgttctttaaagaacccgcggcccaggggctggagaacccacggaggcgccgcttcgccagggggatcattaagtagctggggttgcggtcagaggcgaggtcgcccgcctccagaaactggcacgacccattgcgcttctggccccagcgcagcgcctccccattcctggcaccccccaccctacctcacccaggcacttgactggaatgactcagggagcgtcctgaaattcctgggcacccacaggcggcgcggagagggactgaaggccccagccttcccaccccccggctccgcccaccccgccccgccccgccccgcccccaccccatcgcggcgggcgcgtccccaggaagctcggggttaaaggggcgggcctcgggggcaggggtcggcgagcctcccctgccgccttctggcgccctgggctgtaacccccccgggcggctctgaggccccggggtcgctccctcctcatcctcttccaacacccctctgatctagcgcgtccctacttctgagccctggggcaaaccagcaccccctgggcggccgccccagcgctgcgctgcggtgcgggtttcgactttcagccccctcgtgccagccccaaacctgccccgggacatgcccgcgccaggcttggcaggcgcgcacgctgccgtccccgcgagcccgcctcccccgccttcctccctccccctccccgcgccagcccggattgcgacgggagcgagcgctgggcgcctgccaccccccatccatctgttcccgatgacgctggcgggcctagagcgttcggggcccgcgccagcggggagcagaaccagcctgtgtgccctccggggggcagggtctggcgggctccctcaggccccacgctccccgctcgacctccgaccgagcgcgcgccggggcccggaggtgggggcgcacgcgggccggccccccgccttgcacaaggctccgggcagaccacaaacgaaaagggaaacggaccggcgaggccgggtcgggccgttactggctcctacctgcggacgctggccggccctggcacggcgcgggggtgctgcttccccgcacgacccgccagctcaccggcggcgccccccttgcggccttggccggacgctataatttacgcaccacacggtggctcggccgcgcgggcccgggtaatttatacccgcactggccggcggattcacccggccccaggcggccagggctgggagggggagggggagggggaggggcgcctccacccccactgggagtcacgggcggggggaggggaggatagggaggtgttaggaaggaatggacgacgactggccccgagccttaaaaacaaaattcacctccgggactggcccaacccctttcccacctggattacaagctgcggggggaggggaacagcatgcaaatgaacctctcgcacctggccgggtagacacctaggccccacctccaggtctctcacccggacacggtgccaccacctactcccttcttccttggagaggcccttgggccaggggtgaaggtggggttaggtttctccacctgtttgagcaggaccacgacggccaaccacaaaaacgtgtggagtggccactgggaggtgcatcactcggctttttagagccggccaatccctccggcgtatacatctagctcccctggattgcgagatgggtggtctggtcccgtttcacagatgaggaagttgaggccctgagttgctcaagatcatgtgcacacaggtgacatgcaagctgcgccccaaactgctcacacctggaagtcactccccttcccaacccagtaggcctaggggagcgaggcgctgccggacaccccggcaaccgccggggggcagcagcgagccgctctgtgagtcctggccgggaaacgctggcggccaccaggcgggctggcaagggggagatggatgacactcactgtcagtgcgcccggcccccggaaattagtaatccggagcacggcctccgagtttaagggtgggaattgctctcctgcagccggcgcgctcctcgctaacgaggtttgtcgcttgactcctaatttcccagcactggggctaaggctggcctccctccatttccctccaggcctgctcctcctcctctctcttcctaagcagcgccctacccacagccccgcgcccccagatagtgcgagcccttcctgggcacagctctctttccctggacctccttcccaccctccactcccatttgcctggaaggagctaggtaggtgccagggccaggcctacggaggcacctcccagagcaggacacctgccctggggatgctgcacgcggtgctccttaccacggactgtgctttgtgccaaggcaacaggatgctggtgcctggtgcgcgtttgctcacaccctgaggcccctgccaagctaaactgtgcctccaagagcggaaggcaggctcccagcccctcacctgcctcaggtacctgcttcagtgacacctaggtgcaaactctagccctacctccacaagccctggaacctattagacctgcaccacaaaagagatttaaaatttaaaagctttcctaagggcatggtagctcacgcctgtaatcccagcactttgggggggccaagataggcatattgcttgagatcaggagttcgagaccggcctggacaacatggcaaaaccctgtctctattaaaaacaaaaaaaaattagccctgcatggtggcgtgtgcctgtagtcccatctacttgggaaagtgaggtaggaggatcccttgagcccaggaggcagaggtcgcagtgagctgagattgtgccactacactctagcctgggcgacagagtgagaccctgtttcaaaggaggaaaaaaaaaagaaagctttccatctcagatgaacatgagacaccttaaacctactccctgagctcaggaactaagaggggtgtctggagacgggagtcctaggaggatccaccagaaagaaagggacgccttgaaccacagagggtgggcggtttttcactcaacaaacacactaaaccctgggctgtgtttcacacttggttttccagaaacaaaactgaaaattccagtaagccttcagc

SEQ ID NO: 1242937 - DNA, 4001 bp, Homo sapiens
gcctgcgccctgggcccctcacctgtggcgtggcggctgagtcaggcacagcctgtgcctcaggttctgccgtccctgctggtggaggcggccgtaaacacagggtgagcaacactgaagtgccccaagcttaagcaacaccgagggaggccagggaaggctgctcacctgggttcccccttccacccctgccgggaggcgggagcacggaatcccagaggagaggacgagacggccgaccagggggcacatttcacaacgcccccaccaagaccttctctctgcccctttgtcccccgccgcctggaaatcggcttaggcgggttcgcttccacccggagtgcggctgggccttttgttcaggcgccttttacaaaaggagccctctttccatttggtggccccgctttttgtttccaaaccccaacctgtgtggccgctacccctcaggccccagataaggcaccgcagcggggagcaagggtttagtgtgttttaaacgcactttgtacaaaggctagtttgtaagagccaaaccgactcaactccggctggcatccaccgcccagctgggaacccggcaggtgctcccccaccgccagcacgctgccctcggaactcagacgggcactgcggccaggcccccggcccaccacgtggaaagggcgcagcctccactcccccatctaatgagggtgtcgcggtgtcccttccccccatctgggaaccccctccctatggcctgcgcctcgagtctccaccgcacatttctaagtgcccccctggtcccccacccggcgctggggaggggaggcggaaagctgggggtgggcgggcgcagggagggtgagctccactcccgctccgcctccatgaagggaatttaattagcctgctagagaggcgggcgggcggccgaggaggtgtctctggtgctgcaatataattgaatcggctccactcggtcgggccactcgccgcccatcagcgcggccgcagggcccgggagggctgggggcggggaggcgcatccaggcggagcaggaagggccggggagggaaaaaggccagtgcgggtggggggcggcggatgtgcaatccctctcccacctccgaggctggggcagccatcttctgcgggggggaggggaggggcagggagccgctccgccgggggtggggggagagagaggagagaagcggccgagcccggggcgcgcccttcctcgggaagcagggcgtgggggtcacaaacccggcaggctgcggtcccgccctcccgaccaactcccccgagacaaggggtcggggagggggaggggagcaagacaagaaccctaaccggcgcggccccagtagcgagcaccccccccccccacacccccgcttcctcggccgtcgccagcacctgccgcgggggcgcacagccacccccattcgctccctcccgcgtcgccgcaaagttttcattccagctctccagcgcccgcagctctcggagactccccccgccacccccatccccccactttacctgccctctagcccgcacgcacttaaacgcaccccccccatcccccgctgagcgcactcctgagcccggagcccccgagtccccgcccgcagccaggcctcccaggctgcgacccgcgggcggaggaagggggtggcctttggtcgcctgcccgccctcccggctcttatcgccgctaacactccggggaagttgcccgggagccgttggcggccgcccccgcgaaacccgcgaacttgcaggaggacagtgcggtggggggaggggggaggaccccgtccccggccgggtgcggcgcgctcacctttcatgccagggccccgcagctccacctcggctgatacatgctggagccaccgtcgcccagtgtttgtctaaactgcttatctcacccggggctgctcggcggcggcagctcgggcccgctggggaggtggagcttccggggccccggccaagaaacacctgctgctgtcgccgccgaggacacacccaaacgcaacgccgcccactcccgggccactggctcgctcccggctccctgacctcagccagcgggaggtgtcgggtttcagccgcaaacacacaggcgcgcgcgcgcgcaccgacgggcgcccggatccacccgcccaggcacacgcccctccccggcccggccggccaggtgagccggggacaccagcggggccgcggaggtgccacccccacactctcgggagcccctggctggactgctcgggggtcccggggaccttggtggctaagaccggccacttaactcttaaagtagtgcagcaccctcgccacgtgagcggagccctgtctcgcagctgcgtcccgggaacctagaacagtgcctgacacagagcaggcccaataatgggcggacgggtaactccgtgtcctggaggccttttggagaacaactttctgggcgctggtggcgcgtggggtggggggaggcgacacaaaacagactgtgtacccaagccccaccccccccatgcctgaccttattaccccaactagaaaaggctgaatactaagaacttggcctcaaaattccataaggcaccccaccccccagttttaagtaacttttgggaaggccacaattgcgggccgctgcggggggtgttctttaaagaacccgcggcccaggggctggagaacccacggaggcgccgcttcgccagggggatcattaagtagctggggttgcggtcagaggcgaggtcgcccgcctccagaaactggcacgacccattgcgcttctggccccagcgcagcgcctccccattcctggcaccccccaccctacctcacccaggcacttgactggaatgactcagggagcgtcctgaaattcctgggcacccacaggcggcgcggagagggactgaaggccccagccttcccaccccccggctccgcccaccccgccccgccccgccccgcccccaccccatcgcggcgggcgcgtccccaggaagctcggggttaaaggggcgggcctcgggggcaggggtcggcgagcctcccctgccgccttctggcgccctgggctgtaacccccccgggcggctctgaggccccggggtcgctccctcctcatcctcttccaacacccctctgatctagcgcgtccctacttctgagccctggggcaaaccagcaccccctgggcggccgccccagcgctgcgctgcggtgcgggtttcgactttcagccccctcgtgccagccccaaacctgccccgggacatgcccgcgccaggcttggcaggcgcgcacgctgccgtccccgcgagcccgcctcccccgccttcctccctccccctccccgcgccagcccggattgcgacgggagcgagcgctgggcgcctgccaccccccatccatctgttcccgatgacgctggcgggcctagagcgttcggggcccgcgccagcggggagcagaaccagcctgtgtgccctccggggggcagggtctggcgggctccctcaggccccacgctccccgctcgacctccgaccgagcgcgcgccggggcccggaggtgggggcgcacgcgggccggccccccgccttgcacaaggctccgggcagaccacaaacgaaaagggaaacggaccggcgaggccgggtcgggccgttactggctcctacctgcggacgctggccggccctggcacggcgcgggggtgctgcttccccgcacgacccgccagctcaccggcggcgccccccttgcggccttggccggacgctataatttacgcaccacacggtggctcggccgcgcgggcccgggtaatttatacccgcactggccggcggattcacccggccccaggcggccagggctgggagggggagggggagggggaggggcgcctccacccccactgggagtcacgggcggggggaggggaggatagggaggtgttaggaaggaatggacg

SEQ ID NO: 1242938 - DNA, 4001 bp, Homo sapiens
gaagcctccggttcatcatcccaaccccatccagtatgcacccggcaaatgtttattgaagacctactatgcgctagacattactgggaggcagcagtgaacaagaccaaccgggctggccctcacagagtgacatcctatggggagtggggactataagctagtgaccaaaaacaggccccagaaaatgtcagggagtgccaagtgtggcagggagataaacgcagtggtgagatccaaagatggagaccctccctccaacggggagctcacaaggttgtccctcctcagtatcctgacatggaaggcaggtgggagagtcccagtgaaaggagcccctgaagaaggaggtggggcggggaagggcattccagacagaggatgcagcctgtgcagaggcctggagcttttcactgggttcgcttcacagcttcctccctctgccctctaaaccacttaggccactggcttatttagggcaaactaagggtggaggtctgctgtaacccacccttgagcacacacatatgtgtggtgtccacactgaggagctaggcatgcagggaggagttttaaccttggagaaagaggtcaattcactcaggagggtgtccatgcctggacacccgctcagagataccacgtctttcgggccagctctacctgctgtgtggcacaaccagctgtccggcagctgtcccctgggccctgccacagcccggctgtctgcctccaaaacacgcactccagcccaggctgcctctggagggtagaggagggggtccaggcaaaggggacagtctgatctgccttctgaaaagtcagtcccccaccgaacctaataggagccttgtgctaagctaagccctcctggactcctcgacccggagtttgcccagctgtccccagttccctagcctgcctctcccaggagggggccaggatacagagggctccctggcgtctggcaataggggtgcctctgggcgggtgcggctttccgggagcccgcgggactcccccactccccactcccgtctgggaggttcggcgtgggttggcgatgggggtggaaggctcccgggtctgtggatctgcggcaggaggggcggctggtagcaggagtccctgcatcacccccacccccaggggcgttccggggtgggtgggggcatctagtgccccgcgaaaggaagaggaggagggggcgagcgtggagatgagttcaggagcggaaagcagcgcgcgcccctccgaccggcagcgggggtgggcgccttcccggggcgcgggagcgtccccaaagccgcggggcgtccgcagcgggtaggagctctgccttgcacctctccacggcggggcgtcccgcacgtccccccatgctggtccccggccccggaacggcgcgcgccccctgccccggaacgtcgcccctagccaggcggagcgctgggagctgggcccaggcggcgggaggagggcgaacgggtccggggctcgggcctcgatggccgcgccgccccgggggagccggagccgagctggccgccgcccgcgcgcactcaccaagcccgctgagctcctcctcgcacgagtaccagatgccggtgtggaaattcctgaagaggaagcggtcgtcgccggtctcccagctgtagagcgcgccgccaggggggccgttccccgaggcggtggcggcggcggcggcggcggcgggggcggcggtgccgttggccgtggcgttggcgcccgagttggggcagttggcgcgcccgccctggccgcagcccggcttggggacccgctgcgtgccctggcaccagtgcgtggtgaggaaagcggtggtggcgaacagcagcgccagcaggttcagggccacggccaggagcgctcggccgcggcggctagtcttcatgccgcccgcgccgccgggacgggactgcaccgccggggagctccgcgcgcgaagttggcagctggcgccccgcgtcagcggccgctgcccgccgcgccccggggctcgggtgcctgagatcggcggcggcggacgcggcgcgggcccatgccccccccaaccccggggtgggggcgcggcgcggggggcgtgcggggcgggctggcggggcgggcggcggtggaggagcggctacggcgcgcccggagcccggagcgcgagtgcacctcggctaggagccgctggcgcctggcagcggccacggcgcagggacgcgcgcccctccgtggggagacacctgcaggcggccggcgacactgttccggagcccgcccgcacggggagagggggccgccacgccgggcgcgggcgggggcctgggagtggagggacgcccccgaaagaaatccgagccagggtgagggtctgagacgcaaggagaatcccaggcaaggcgctcctgagaaaagatccccacggcggacgtggggcaacaaaacccgccgggagcgggcatctcatgagacccagagaggccctgccccaggagacaagggcagagcctgctggggctccccaagagggacacggaccagcaggaccctgtcccagaaggggatccccaaaaggacccccgcaccagaccctgagaaaggagtttttccaaaggttctaaacagcagagcctgcagggcttcccacagccagggagctgcaagaccccctggataagacaacccatgctggacttggagtggcagaatctgtcaggaggcgcccctcctggagtattgggttatagggtttgaaacgtttttctgtctcctgggtgtcacctccagcatctgggaagagctcccctccaaggatgaaactgtcatctgggctcccaaccatggcatgcaactgcaggaagagtggcaacagggtaccccagacagcccactgcacccacctgagatcccaaacagcagaaccctaggagggcccatgccggccacaaagttattgcagctaccaggcagtggtgccctacaggggctgccaaccctgctcacatgcacaccatgtgaatgtgggtagaatcttcaagattcgggtgggggcagggtggccaaacatactgactttgggatcaagcatatctagggcttgaccagctgtgtggctttgaacaggtcacttaccctctctgagcctcaatttccataactataaaaaagggaggaccccccccccttcaaggtatatcacagtgggctgctgtaatgagatcatggctgcaaaaagcatttggcacacagtagactcaattaataattcactgttactgacatctgaaccaagatcagttgaccaaactcagacaaacctcttcaggctctcctgtgcaacgtggaaactgtgtgcaaccccgtccccacctctgctctaagatgaccacgctccctgaactcccttcgcgctgcacagcacttactgcccagatgctcagggcgtgcaacaattaattgcatgttgattataagagctcatttgaattctgcccaagctgagaactgctccgacaacccccggcttgccgagtggcaggccttgcagaattcaaggttaaccgattatgaattgccttactcctgtgggtgagccggcacccactgtcagctgctgctaatctgccggggggtaggtgagaggaaaacgttgtgggcaacgtccctggtaagagcaggcacgaaggatggccaagggtctccaaacttgcttttagagcccttttctggcactgtgcaagagattctcaactattttgaaagagaggacctccatgtgataatggtggcattgagagtattggttgacagagaaaatacatcatcgccaaacagctgtaaagaatccagtagcatcttttttttttttttttttttgagatggagtctcactctgtcgcccaggctggagtgcagtggtgcaatctcagctcactgcaacctccgccttctgggttcaagcgattctcatacttcagcctcccgagtagctg

SEQ ID NO: 1242939 - DNA, 4001 bp, Homo sapiens
ggctgggcacggtggctcatgcctgtaatcccagcactttggcaggctgaggcagatggatcacttgaggtcaggagttcgagaccagcctggccaacatggtaaacacccatctctactaaaaatacaaaaagtagccgggcgtggtggcatgcacctgtaataccagctactcgggaggctgaggcaggagaatcgcttgaacccaggaggcagaggttgcagtgagccgagatagcaccactgcactccagccaaggcaacagagcgagactccgtctcaaaaaataaaaaaataaaatgggggtaataacgcctgtcttgcagtgttgtggtgatgtgaggattcggttgcacagcaatgtaaggagcttataaatagcacatagtaagagctcaagtcatttgtactattacaatttttttagaagaacataatggggatatatctaatggagactggaaatacagcccaggggctcttgacgaggtcaaggctagagatagagtcaacagggagaaatgaaattgtgagggtacatatgatttctgaaagaaaaagtagcgaatagaagatggaactaggaacacatccccatggcttgccttccaggtcacactagtcatgtggtctcccaagacccacactttagagaaggaactacggaccaggcatgggcagtcagacatggacccatgacccaagtctattcaatgagactcaacctcaggacttttgcaggaactactgggaaagagaagctctctgtctcttttctttctctctttctttcttttttttttctttttctttcttagacagggtctcactctgtcacccaggctgcagcacagtggtgtgatcatagctcccagcaacctccacctcctggattcaagcaatcctcccaccttagcctcctgagtagctgggactacaggcatgcaccaccatgcccagcttatttttatattttttgtagagatggggtttcaccatgttgcgccggctggtctcaaactcctaagctcaagtgatcatcctctctcagccttccaaagtggtgggactacaggcatgtgcaccatgcccagccctagaagccttctatttctaccacgtttgaggctagaaggatgtaaagatggaattgactgaatcaccagacagcaagagccttcctgagagtgaacccagtgccaagagaggcagagccaagagatggaggaagattgcgtcctgatgacattgtttgagcccctagatccagccatgcctgaggctgccggtcctttgttctttcaatcacgtgaaccaattaattctttgtctttgcccatgccagtttgaggagaatttccatcacaaccaggagtccttatcttcagcttttcttgtcaaacatgtccttttctagctctctgcctttgcacaagttgttccttccacctggaatgtcccggggacatccaagaaatactatttatcaaataaaacaaataaacagaaaattctgagtccccacttgctccctgatgaagaacccagatgctgaaacacccactatcattcctagcgcaacagtgcttttagagtttcagagaacttttcttttcctcttcttccctttttttcttttcttttctttttttttctcctccctaccaaaatatcacatctcctgggcaattccttggattgttgtaagagaataatgtgctcttggcagcctggatgttgttaaaacaccccctggcaccgcacactcagagcctcccagcccttcgctggcccaagggccaccaggcagcggggagcaaagcaggaaattcagagagcgctgagcctgcaggagggtggccgcccccaggaggtttcatccccaacccaacagtctttacctcggagatgctgatgctcctatcgctgggtttccagcccctgttggtgctggcagggactgcccctcatcatggcgctgctcactgactcagctgcctcccccacgcagcccccacaccccagggggtgcgttcaaccctgcccacgtgggccccgggccaggacgcttcccccgcccctctcctcacagcagggcccagctctgctctttcagaagtgatgggagatgggccagagcttggaggtggggatgctccggaagtaacttaaccatggggaaataggcacgggtaccccgatgcctggcggggttgtggttctttctttcttttcttttctccttctttctttctttctttctttctttctttctttctttctttctttctttctttctttctttctctctctctctctctttcctttctttctttctttctttctttctttctttctttctttctttctttctttctttctttctttctttctttctttctttctttctttctttctttctttctccgtctctctctgtctctctctctccccgcccccctttcttttctttctttaagaccgactctcactctgtcacccaggctggagtgcagtggcaccatctcagctcactgcaacctccatctcccaggttcaagcaattctcctgcgtcagcctcccgagtagctgggattgcaggcacccaccaccatgcccggctaatttttgtatttttagtagagattgagtttcaccatgttggccaggcttgtctcgaactcctgacctcaaatgatccacccaccttggccttccaaagtgcagggattacaggcctgagctgcacccagctggcttgtgcttagatagatatagatatagatatagatatagatatagatatagatatagatagatatacagatatatagattttttttgagacaggatcttgctctttgtccaggctggagagcagtggcatgatcatagttcactgcagccactaactcctgggctcaggccatcctcctgcctcagcctccgtagtagttgtgactaaaggtaagtgccaccatgcccagctaatttttttattttttatttttgtagagacagggtctcactatgttgctcaggctggtctcgaactctcagcctcaagtgatcctcccgcctcggcctcccaaagcgctgaaattataggtgtgcccagccgagttgtgcttttccagctagattgctagatttatttccttatcttcttactgggctcgggagcatccgtctgagagtttcagcccactccagccaaggaaattaataacaataacgattgttcttgtcgttataattgtcacaataagggctgacagttatgaggtctttattatgagccaagtcaaaaaggaggatgttgatgtcccgcccaatctcctaggctctctttttagagtttctgtctttggaggattgtctttgggcaaccagagcccattttttctatctttgttcagaaaatgggaacttatatttctctcttagccgccatcaatgcatgactgaccagcagggtcctgtcctgtggctctggctaagacaactctgagctgtgacccacactacaaagcccccatggggtcagactggcctgacagcaccccttgctttctgttctcccttccctgtcctacagcttcaattcccttaccagtctccccagggagcatttccttcaccaatgactttgcacccaaatcctcatcctatgctgcgcctctagataatctgatcttagacacaaaaatttatgtggattatatccccgaatcttcctaacagcctgcaaggtagcaacgtatcacccgttttgcagacaacaaaactcagcttctgagggattaagcaactgctctatacacctaggtagtggcatagtctagattcaaactcatgcctctctgcctccaggaaccatggtcagcaaggaggctgtcgtcaggacagagtggccacttggagaccatattctccctctgttagcaggttgttgccaccggtctggctgtggggcgtaggattccctagtcaaggctc

SEQ ID NO: 1242940 - DNA, 4001 bp, Homo sapiens
ccacgaaagagcaaacggtgacaaaagtttctgtagaaaccaaactcctggagcacttttataatgtccacttatctaagaaccaccacaatacagaactttaaagagagaaatcaacaatatgttctcacttaaaatgcgctggatgtcatgacccaccccactaacgtcctggctaaatgatgaaaggacgttcagccttttccttcctttttcattttctctttaaggaaacactgatagttcctaaaataagcaccattaggaagagaatacttaagttcactcatttgacattcccacaaaatcagtacctgaaagcaagctacctaccacaaaataagcaccattatgagaatacataagttcactcaccggatattcctacaacgtcagcacctgcaagcatgctacctacgacttaagcaacccctaagtacgggaagatgtttaaaaaccaaagttaactcgaaattttatggattagaaaatgtatgtctactagctacggtcagaaagacacgtgagaactattaaattataacaaatgctcaagtgtctgaagaaatagactgaactactgatgcacgaacacagtgagttattccaagcaatctgaataaggtcaacgattttacagcaatgaaaattctctaaacgtgtcgctgacaaaggataaaagtgtaagcttcactttaaaaagacacaaatcaatatagtctcctatcacacattaagtgaggaatcctaactttgtggcactttgtaaactttagaagcgtacacaatgctaagggtaaaacagatcttggtattgatagccaagtttctgcccgatcacaaggctgcaatgcatcttgggattccttcaggacggttgggggccacggacagtttaaaccgtaattacagtttcaatagtagaaaacgcagcagaagacgctctctcggctgggcctaaggtgaaaggaaaactcggccattcgtcctccccaactcctgggatctctaaacgcccacccaaatgactcctggctccatctgtcctcattctgcgcctcgtggcagggatccgccgcggcccccactccgttccatacggttcccatctcaagtgggtaactgcggactccagagcagggcaggggcgcggaggggcggcactcgggtccgggtctttgggcgcgctgcccgctgtccgctccccgcccggccaccgccgcgggccgccccgcgaaggccggctcccgggctcggggcgccccacccaggcagacggcgccactgtcagcgccccacgtgccgaccgggccccagggccgcgcgcccccggaccgcacccctacgccatgtgggctccggcgcccggccggacttcctcccgcgtcccgggcctttacccgcacggcctcccgcgccgctgccggctccgtggttattggcggcgccgccaactgggggtggcggcgctgccgggccccgcaggaaggacggcacgaactcggcggcgtggacgttgggcacgaagggcttggcgttgacgttgagttgccggctgaaggccgcgctgaggttctcccgctgggcctcggccgccgccgccagggagccgccgccgccgcaagggcccggcccgggggcttccatgtccgcctggtcccagcagtcaggcgccgagtcgctgctgctgctgccgctgctgctcccgccgccgccgccgccgccgccgccgccgccactgcccggatccatgatcgggggggccgtgtgtgtggtggacagagagcgggaaatggaggcaggggcgcccggccggagaggagtgggcaacgctgactgagggaaggcggcggggcagaagggccgggagctagcgacaaagatccccggcgtcgccgcggcagcagctccagtcccgactccacactcgcgacgacgacagaggcggcggcggcggcagctcaaccctcctcctcgtgtgtgtgagcggatctcctcccacccaaccacctccgacggcctcacagccaaccccacccccggcgcggattgacccctcgccgccacccgtaccttcgcctcggtagttctctgttctggccgcccccgtttccggctatttagcgcggcgggaggtggaactacaagttccggcagcgcccgcgctaccccgctgcggttttcccgggggccgacgggagtcgaagttcagggacagggcgcaaccggaagcggctccggctcccggcaggcaacgcgaggaggcggaggtctggtggccgctcggcggccccacctgtcacctggtgggggggcagcggcaggccctggttggtgcagctctgtgctgggccgaagaccgagagtattttagcccataggaggggtccactctggcctgctggacacaggctgggggaaaacggacagcatctataacatggggaagaaaaatacactcagctcccgaaaattcttgtactctcttttcaccacctttcctgcgttctctgcctcacagtctccgtaccttattctctctccaccttctttctcctcacccccagccagattttgcccttcatttcaaagccggtgcagattgcaaagctgatttcattttatgtaatcatttcgtggaagaaacaataaaaccgtgagatattccggcttaaaactgcagtgtggctcataaagcgctggggcccaggctctgcccaggcagaagggattgttaactggaaaatttcaatgactcaccgtttgtttgactagtcatataaagccttcacccaaatttttccatcctttcctcctccccgccaaagggtttgcaaattaaacagaggattgccgtattccatggtgtatccggcttacctaacagggttattttggtgagtctagcttccttatgcaccattacgtgaagtggtttccttttgaatggtctgatttgctcaagaattcccatagtacttttcatcgactgcatcttacacttacagattaggtaaacctgggaaaagaacaaaagcaaacgagaaatacttaagagttcgcatttaggcccttcatgaagtaggaaaaaatgttgctctgagtacctgttaagctttcctgtaattcacccatgtggagcccaagacagagaaaaacatattgttagtatttttctgaaaggagtctagacagggtgcaactaatctgcctagaaattacagactaaagaagcacatacatagaatagatgtttctgaacaaccttaggttgttaaaaaaaaaaaaaacctaacaaaatccagatctagatctgtattttaattttcttttttcttttttttgagacggagtcttgctctgtagcccaggctggagtgcagtggcgcgatgtcggctcgctgcaagcccgcctcccgggttcacaacattctcctgcctcagtctccggagtagctgggactagaggcgcccgccatcacgcccggctaattttttttgtattgttattagagacgaggtttacaccgtgttagacaggatggtctggatctcctgacctcgtgatccgctcgtctcggcctcccaaagtgctgggattacaggcgtgagccaccgcgcccggccgatctgtattttaattttaaacatctgtattgtaaagataaaagagaactcagcctaatgagataggtcaaaaacgaagctgtcaagtatttttcaaaagagtcctaggctacagtaatttgaatttaatattaaactaccaagctttagggattaaaaaaacacataccggccaggcgcagtggctcacacctgtaatctcagcaatttgggaggccgaggcagatggatcacgtgaggtcaggagttcgagaccagcctggccaacgtggtggaacccccgtctctactaaaaatacaagttaggccgggcgcggtggctcacgcctgtaatcccagcactttgggaggccaaggtgggcggatcacgagat

SEQ ID NO: 1242941 - DNA, 4001 bp, Homo sapiens
tttaaaaagacacaaatcaatatagtctcctatcacacattaagtgaggaatcctaactttgtggcactttgtaaactttagaagcgtacacaatgctaagggtaaaacagatcttggtattgatagccaagtttctgcccgatcacaaggctgcaatgcatcttgggattccttcaggacggttgggggccacggacagtttaaaccgtaattacagtttcaatagtagaaaacgcagcagaagacgctctctcggctgggcctaaggtgaaaggaaaactcggccattcgtcctccccaactcctgggatctctaaacgcccacccaaatgactcctggctccatctgtcctcattctgcgcctcgtggcagggatccgccgcggcccccactccgttccatacggttcccatctcaagtgggtaactgcggactccagagcagggcaggggcgcggaggggcggcactcgggtccgggtctttgggcgcgctgcccgctgtccgctccccgcccggccaccgccgcgggccgccccgcgaaggccggctcccgggctcggggcgccccacccaggcagacggcgccactgtcagcgccccacgtgccgaccgggccccagggccgcgcgcccccggaccgcacccctacgccatgtgggctccggcgcccggccggacttcctcccgcgtcccgggcctttacccgcacggcctcccgcgccgctgccggctccgtggttattggcggcgccgccaactgggggtggcggcgctgccgggccccgcaggaaggacggcacgaactcggcggcgtggacgttgggcacgaagggcttggcgttgacgttgagttgccggctgaaggccgcgctgaggttctcccgctgggcctcggccgccgccgccagggagccgccgccgccgcaagggcccggcccgggggcttccatgtccgcctggtcccagcagtcaggcgccgagtcgctgctgctgctgccgctgctgctcccgccgccgccgccgccgccgccgccgccgccactgcccggatccatgatcgggggggccgtgtgtgtggtggacagagagcgggaaatggaggcaggggcgcccggccggagaggagtgggcaacgctgactgagggaaggcggcggggcagaagggccgggagctagcgacaaagatccccggcgtcgccgcggcagcagctccagtcccgactccacactcgcgacgacgacagaggcggcggcggcggcagctcaaccctcctcctcgtgtgtgtgagcggatctcctcccacccaaccacctccgacggcctcacagccaaccccacccccggcgcggattgacccctcgccgccacccgtaccttcgcctcggtagttctctgttctggccgcccccgtttccggctatttagcgcggcgggaggtggaactacaagttccggcagcgcccgcgctaccccgctgcggttttcccgggggccgacgggagtcgaagttcagggacagggcgcaaccggaagcggctccggctcccggcaggcaacgcgaggaggcggaggtctggtggccgctcggcggccccacctgtcacctggtgggggggcagcggcaggccctggttggtgcagctctgtgctgggccgaagaccgagagtattttagcccataggaggggtccactctggcctgctggacacaggctgggggaaaacggacagcatctataacatggggaagaaaaatacactcagctcccgaaaattcttgtactctcttttcaccacctttcctgcgttctctgcctcacagtctccgtaccttattctctctccaccttctttctcctcacccccagccagattttgcccttcatttcaaagccggtgcagattgcaaagctgatttcattttatgtaatcatttcgtggaagaaacaataaaaccgtgagatattccggcttaaaactgcagtgtggctcataaagcgctggggcccaggctctgcccaggcagaagggattgttaactggaaaatttcaatgactcaccgtttgtttgactagtcatataaagccttcacccaaatttttccatcctttcctcctccccgccaaagggtttgcaaattaaacagaggattgccgtattccatggtgtatccggcttacctaacagggttattttggtgagtctagcttccttatgcaccattacgtgaagtggtttccttttgaatggtctgatttgctcaagaattcccatagtacttttcatcgactgcatcttacacttacagattaggtaaacctgggaaaagaacaaaagcaaacgagaaatacttaagagttcgcatttaggcccttcatgaagtaggaaaaaatgttgctctgagtacctgttaagctttcctgtaattcacccatgtggagcccaagacagagaaaaacatattgttagtatttttctgaaaggagtctagacagggtgcaactaatctgcctagaaattacagactaaagaagcacatacatagaatagatgtttctgaacaaccttaggttgttaaaaaaaaaaaaaacctaacaaaatccagatctagatctgtattttaattttcttttttcttttttttgagacggagtcttgctctgtagcccaggctggagtgcagtggcgcgatgtcggctcgctgcaagcccgcctcccgggttcacaacattctcctgcctcagtctccggagtagctgggactagaggcgcccgccatcacgcccggctaattttttttgtattgttattagagacgaggtttacaccgtgttagacaggatggtctggatctcctgacctcgtgatccgctcgtctcggcctcccaaagtgctgggattacaggcgtgagccaccgcgcccggccgatctgtattttaattttaaacatctgtattgtaaagataaaagagaactcagcctaatgagataggtcaaaaacgaagctgtcaagtatttttcaaaagagtcctaggctacagtaatttgaatttaatattaaactaccaagctttagggattaaaaaaacacataccggccaggcgcagtggctcacacctgtaatctcagcaatttgggaggccgaggcagatggatcacgtgaggtcaggagttcgagaccagcctggccaacgtggtggaacccccgtctctactaaaaatacaagttaggccgggcgcggtggctcacgcctgtaatcccagcactttgggaggccaaggtgggcggatcacgagatcaggagattgagaccatcctggctaacacggtgaaaccctgtctctactgaaaatacaaaaaattagccgggcgtggtgtgcgggcgtctgtattgccagctactcaggaggctgaggcaggagaatggcgtgaaaccaggaggcggagcctgcagtgagccgagatcgcgccactgcactccagcttgagcgacaaagcgagactctgtctcaaaaaacaaacaaaaaaagcgatccacctgcctcagcttcccaaagtgctgggcttatcggtgtgagccaccacacccggcagagtttgcctctgcttaataggaagttttggttatagcctattattatacctgaagacctcactgaatcatacttaacaatgtccattttaaagttggtattaagtgactgtcagatttacagagaacttaacaactgttatgaaaattagaacttcatttatgcgagacctgtattgctattgaataaaagattttcatcttatattcacaagaaaaaatacaatgtgttctaaatgaaatgccttctctttccagattttcactccccacccacccacccctaagaaaatgtcaacacaatcagctgactcaaataatgaactacacatccttctctaagcattttgtctttgaatactactctcctccatgtagcactcctacagcactgaatgat

SEQ ID NO: 1242942 - DNA, 4001 bp, Homo sapiens
gacttgattccagtccaatttggctggaatctgaactcagaccttcctcaaagtctgggttcttcccttgctagttgacttttagcatgccacttgacccctcagggcctcgattttctcttcaggaaaatggggagaatattacccatctcctaaggtttctgtaaaaattaaataacatgttgtattaaggatcttagcacagtcctagctattcctcattccctacctccaattccacacttcagccacttacttcacatttgctgttctctgtccaacagtcctctttgccaactggctgcctaaatccaacctttaagttttgtctcgaacattattttattttatttttgagacagagtctcactctgtcacccaggctggagtgcaatggctgaatctcagctcactgaaacctctgtctcccaggttcaagtgattctcctgcctcagcctcctgagtagctgggatacaggcatgcgccaccacgccaggctaatttttgtatttttagtagagatagggtttcaccacgttggtcaggcgggtcttgaactgccgaccttgtgacccatccacctcagcctcccaaagtactgggattgcaggcatgagctgctgcacccggcctgtcttggacattattacctcttggaacctcccctgaccctcacaatatggcttaagagcacagacgctgaaaatagcctgggttcaaatcaattcttagtcacttattgcccccagaaccttaggttacataatccctctctgtgactcagtgtcttcctctgtaaaatgaggacgataacagcacctacctcataggtgaggatcaagtgaatttaatctcctgtttaacggagtttaatcaagtgaggatcaagtgagtttaagctcctaaagcttctagaatagattcttagaacagcaatgtggccgggcgccgtggctcacgcctgtaatcacagcactttgggaggccgagaggtgcggattgtctgaggtcaggagttcgcgaccagcctggccaacatgatgacaccccatacctactaaaaatgcaaaaattagccgggcgtggtggaacatgcctgtaatcccagttactcaggaggctgaggcacgagaatcgcttgaacctgggaggcggacggaggttgcagtgagccaagatcgcgccactgcactccagcctgggccacagagagagactctatctcaaaaaagaaaaaaaagaacagcacctcacccatgaagtccctgataaatgtcagcttttagcattatcgctaattgtcctgatacgcagatctcgagttgccctaggctatctgcaccgaatgaatataccatgagggtctgttgatctcaggagtctccagtctggctctaaagtgtctttcctgctctaatcctatcctccaatgtaaaggaaacattcttttaagcctgaagaatatccccaatcctgttcgccattaccccaaaacacacacagggacaaaacgggacatcactagattctccccctccccccgccaactccatcggactccagggccctgccaggcctgagggaccccagattagccttaccgccgtgccccaactcaatcaacaggcctccggtacttgcacagccccactccattcccccgccctgcccccagctccatcagcccccgggccctgcgcccgcccgcccgcccgccaggccaggccgcccgctgaccggtcctggagctgtaggtcgggtcgctcccgaggctcctcatagaagctgatgcccgggtgcgtggcgagggcccgccagagaaactcctgcgtgcagggttccaaaggcagcgggaagggcggcactcgcgtctccagccggctccacagcgctggcagacacaggccatcgagcccctccagagcgacttcgtccaacaacgactccagcgcgtccattgctacttcagtcggcggcgcccggggcgcatgcgcaacgcaccgccaagggccttggtccatcgcgcctgcgcacaacgatccggggcccggggaggtgggtcagacccagggttcggaggaggagttccagcgcgccggcatgacgtcactccccgggggcgggctcagtaagtggagctccaccgtcattggtccggggccccgcagtaaccaggggaactgcaaacagtgtagaggccgcttccggttcgagctcccggaaccgccgcctctagggatggacggtgagtgtctgtgggcccctccgggaggtcgggctgttattctcccatccctcccgaccgcgctttgggcagaatcctaggccatgaacccctggaccaccacttcctgacccaagggggtctccgaaatgagggatagggaggcttagtggtctggaacgcggaggagagcctgggggagtggtcagtgctgtgaccattctgctcggctgtggtcgtgaaggaaaccggtactggccgggagctcagtgaagggatgtagggtggggaaggagaagtagaggtctgaggagggtcttgtgaatgttgggatgtggaactgtcggatttgggagttgatatgaaaacaagcttgatcgtgggagtgcaatcgtcaggtgctgggaaagggaattggtgtggggggtgaagggagtttaggaaatactccctttctgtgccttggcgttaataataatagctccctttaacaaagtgctttccagtaccaagaactctgtaagtactcttgggcaacacctcgctaagcttcataccagccttttgagttcagcgttgttccattttacagatgatgaaactgaggctcagaggtgttaaggaacttgcccaaagtcaaacaaccagcatgtagcagagtgagtgagaaacccagacaccctgtctctggagctgaattatggagcttgagatttggaccggttttgagggtccctttattccagaggttgtaaatgcagatgtctgcagaggagagtctagtgagccggattgaggctgtaactgaaaatcaattcctcacctgaaaggaaagctgctcaccaagcaccagctgattgtcctcttggggtacttctcaaaaacagggttggccagtcactctgaaggccagagacagcttgtgggcccccatttagggatccctgattagagtcatggtattgacaattggaagcaaatggaaaataggctattctgatatctcactttgcagatgggaagactaaagtctagagagactggtagggtctgggctagagtccagatcatttttctaattacagcactgtccctcacttctcgggaatttgttcctggggaatccacattctttttatattcactgaatgtagtgtggagaaaatgtttttaattgaacattctgtcatatgcttaaaatatatcttttccctttgtactttagaggtactataaaatgtgctttaccattttgccttctggaaaggtcaatgtaatgttgctatagaacatcagtcctcaaaccttttaagccttgggacccctgtatgctcttacctcaaagagctttgtttatttatatttatgatatttaccatatcgaagatttaaactgggaaaatcttaagatgtccattaattagttcctttaaaaataataaaaattgggccgggcatggactcgtgcctgtaatcctagcactctggaaggccaaggcaggtggatcacttgaggtcaggagttcgagaccagcctggccaacatggtgaaaccttgtctctactaaaacttagccggacgtggtgacacatgtctgtaatcccagctacttggaaggctgaggcaggagaatcatttgaagccgagatcttgccactgcactccagcctgggcaacagggcgagactctgtctcaaaaaaacccaataataataataataattggccaggtgcagtggctcataataatcataataataattggccatgtgca

SEQ ID NO: 1242943 - DNA, 4001 bp, Homo sapiens
gtagtcccagctactcaggaggctgaggcaggagactcgcttgagcccgggaggcagaggttgcagtgagccgagattggccactgcactgcccaggcgaagaaaatgtcatttacaactggtgctcagcctcccctggagaccatcacagcctcctgaagaagctgacaacccagggaggtgcctttatttctgaggaaagacgcagctggtgccaacaccagcagaaaccgtattccctttccatatcactcagcccagcactgcctggcaaatgttcccggcttgctgttttgtaactgtaatactttgtacaaacaggtcaaggacctgcagcctggggcctggaccaagtccagaaacatgttcggtttggccccaaaaacaaaaaaaaattgagatatggtctcactctgtcccctaggctacagtgcagtggtgcgatcaagggtcactgcagcctcgacctcctggactcaagcgatcctcccacctcagcctccaaagtgactgagactacagttgtgtgccaccacgcccggctgattttgtttagtttttgtagcgatgaggtctcaacatgttgccaggctggtctggaactcctggactcaagcgatcctcccgcctcggcctcccaaagtgctgggatgacaggcgtgcgtcactgcacttcttttttaaatcaggaagtttcacagcatcttgcttcccttgaactgggcggcaccaaatacgggggctggggcctcccttagaatggggtacgcacgccctgccgatgcacacagtcccgctggaactctctgcctggacccttatgaatgtccctaaaactgtaattctgaggacctcaaaatccatgtcctttccttagcaatggcgacattctaccccctgcagagccttgacagctttcggcgagatctggaaaccgccagggacgcctccctgtctgcgcctccgcccgcccagtgccctgcgctgcgcacccgcccggggcgctggcctggcccggccgcgcgaccacctcgggcgaatgacacgccgggtccccagacgggggctccggcgccgggcgggcagctccaccaccgcaggcggcgccgcgagaccgcggtccttgcagcggggcagcaggtgcggggtgggccaggcgtcccggggccctgcccgctgcgcctcagagccgcgccccaggctctcctcggcgccggcccgggcaggacgcgatgccctggaggcgtcaggggcgcggccggcccagcccgagcgtggaggccgcggcggacgcaggcctggccctgcttacctagcgctttccgcacccgcggccccgcgcccgctccgcgccagcctcagcgcctgcgccgcctccgctcgagcccggcagcgcggccttaggcacctgcgcaacagacaccgcgtcagcggtcgccaaacgacggcccggcgccgcccgctgcccgccccgccaggcccgcgtcccccggcccgcaccgccccgccgcacccaccgaggcctcggcgggcgcaggcggctcccagcgcggcgaggctgcggcggccgagcagccctcggcccaccaccatgacccgggccgggctggactgccgagctgcccaggactgcaaaacaccggcgtcggcgcgtcgcagccaatcagcgcccgcctcgcgctgccctcagccaatcagcgtccacctcgcaccgtccgccaaccaatcaacgcgctcgcgctcaacttgttttgtccgcgagccccgactgccacgggccgggagacgggcctgggagcggcggcggcggcccgagagctgcgccgggagagctgtgccgcgagcctccgcctcttttttggcaccgcacagtggatccctggaggccgagcgccacgccgcccgggtacccggcagatcgcgaggtggaacgggccgtcgctgcgggggacagcgttccgaggcagttggtcctctccgggatgccgtaggcatcagctgaccggcccagcccacgtgactacaggggcacttgatgggaatcatggcagcatccaggccattgtcccgcttctgggagtggggaaagaacatcgtctgcgtggggaggaactacgcggaccacgtcagggagatgcgcagcgcggtgttgagcgagcccgtgctgttcctgaagccgtccacggcctacgcgcccgagggctcgcccatcctcatgcccgcgtacactcgcaacctgcaccacgagctggagctgggcgtggtgatgggcaagcgctgccgcgcagtccccgaggctgcggccatggactacgtgggcggctatgccctgtgcctggatatgaccgcccgggacgtgcaggacgagtgcaagaagaaggggctgccctggactctggcgaagagcttcacggcgtcctgcccggtcagcgcgttcgtgcccaaggagaagatccctgaccctcacaagctgaagctctggctcaaggtcaacggcgaactcagacaggagggtgagacatcctccatgattttttccatcccctacatcatcagctatgtttctaagatcataaccttggaagaaggagatattatcttgactgggacgccaaagggagttggaccggttaaagaaaacgatgagatcgaggctggcatacacgggctggtcagtatgacatttaaagtggaaaagccagaatattgagttatttcttaacaagtttcgagagagaagggagcaagacaagagcaagcaacggctattaaatgtcacaatcctttaattagaaaccatttattggccggacgcggtggctcacgcctgtaatcgcagcactttgggaggccgaggcgggcggctcacgacgtcaggagatccagaccatcttggctaacagggtgaaaccccgtctctactaaaaatacaaaaaattagccgggcgtggtggcgggcgcctgtagtcccagctactctggaggctgaggcaggagaatcaattgaacccgggaggcggagcttacagtgagctgagattgcgccactgtactcctgggcaacagcgagactccgtctcaaaaaaaaaaaaaaaaaaagaaaccatttattttaaaaatgattagattgctatgcctcaactcatagaagatgaacccttcaagaaaacgtgaagtagaacgggtgggccagaaatgaaaacaggcaagtaaagtatttcttcggaaaacattttatcaaaccaaatgttaaaaagactttccttttgtaaaactggattagagaagacttttcagtgggttatctctaggatgatcagtagttcagcacttaaaaactgcagagaaaactgaaagttatgttccagataactttccgttgtttaccaaattttcttagatttggtcatcatcaggaagcatttgtaaaaataaaaatctccacaaattactggcccatctcggacttgctgaatcaatttgataggattaatctccagtgaagctgtgtttacagggcattccaagtgattcttatcaggaaatgtgaaaaacactcctgtacataatcggttaatttaaaattttacttaataagtgaacaagtaatgaagatttcacctgtttacttagggtatctacccagacccatcgattctgagttcgggagatgattttgaaattactgttttccaaataaaggtgctcccttctaagtggcttacaagggtaatttttttccccccagtaatgacgaggagggatatttcctccttgtggggcttcagaccttagtctttgacctttggccttctgagcactgtgctgtgttaacacagttaatcagcaactgtacttcccaaccggagataaggaggctttgtggaagttgaatagcctgggactgctgcttttgctcttgcctgcaccctcctctgaaaaaacatccaggcaagatgcacagcatagctgtcaatgcctggaggagtcctttgggcttc

SEQ ID NO: 1242944 - DNA, 4001 bp, Homo sapiens
tccccccccaccctcttgccgcggcgggaaaggggccgtgccttagcccaggacagcttggctctcacgtggtcgttgcagggctccactttctgggcaaactccaggttgctaagcgtgtgctcgtggccgcagaacaccttctggaggaagagcgctcggtgagcgcgcacgcggccaggaagcggggaaagtgcttgcgccgggggcctggcctcccctgcccggtctgccctcaggtgggcattcactctgcacccctagcacagtgagggtgcggagcgtgggggctgtgcccacgggagaagaggggagggcccaggcccgctcaccgtctcggggggcagggtacccagctcggccaggctctggtacatctgctgggcgctgccctccaggcacgagccgcagccggccaccgacagcgcgtcgcctggcgggggagggcgggtcagagcagatggggcggggccggcgggaggcggggtgggcgcgctccgcgctgcgggtacccgagaacagggcgggtgggtccgggcaatcgtcctcccacaggaagtagctcatgtggccggcggtgtggccgggcgtcaggaggcaacgcacgtggatggccccgaactgcggcggaggagcaggcggacctgtgagggcgggtggacccggggcgccctccccgcccctcccgggagcgcgcgctcacccgcagctcctcgccgtgcgccagcctgcgcgtcagcgagaagatgcgctcgtccgcgcccagcaccgccagcccgggacgaagccgcgccagctccgggtttccccgcgcgtggtccctgcgggcgggcgggcgggggccgggttaggtcgggttgggacaaggcggcgtcctcgtgcctccccgcgccccgccggcgctcaccagtgatggtgggtggtcagcacagcggtcagagacaccccctcccggcccacgatctccagcagctgaaagggacgggagtgacggtaacacagacggtcccggtggcccactccctccatatcgggatccgccgcgctcactgccccaggccggccagagccccggggagcgccggggagcggggacccagcgggcggtgactgcgcccagcgcgtgcagggaccgccaggcagcagcgaaagggcggaggccagaggtgccgtaacttcagggagccccaagataaacaaggaaccccagccgccaatgacttccggagagcagagcacgtgggggctcgctcctaccaggggggtcggggaggctctcgggggacacggccgggtccctgcggcccgcggcctgccctcaccctcttgggcacagccacgtccacggccaccgcctcgcgcgtgagctcctcgatgaccaggtacatgtagttgtcctcgagcacggggatgaccttgaccttcatggtcacggagctcggccaccggtgcctgctccaaaacaggccccccagcccacggtgccccttcagggcggggcccgctctccacaccctaggaagggctgtgcgaagcgggctcggtcaacacgctgggggccaaaagagaagcccggctccccaggaactccccggcactcgcgtggaattccacgcaccgggctccagcaggagcggaacccggccggtccccaaccagccccggctccgcccccagtccgagccccagtccccaaaggccacgccttcctcccaggccccgcccctcggccccccgccctgccgccgcaagacccctgacccgggacagccgcgttcccccgccgcccgcctcaccggcacggctgtgctgaggacccgaaggacagactgacggaggcggggcctcggccgccggtcacggggtccggactgagcgcggcgctgggctcgggagccgccaaccgcccccctccgcggacgcgccccgcccccgcccccgcccggcccggatcctgcgcgcgatgagaccacaaggcccgccggcggtgcgcgtgcccggtggggcgccacgcgcacgctccgaccccgccgcgcccggcgctggcacctcctccaggaagccctcccgacgccccggctgagccagtcgtttccgagttctccggcccctgatggggacgtctgcgcccctcttctcaggccagaggtgcagagatatacttcccccgtcccggggctcagccagcactgctaggtacacagaaggtgtccagcgagtgtagctcagggcatcctgcgggcgggctgccgctccgttccgcgtgctcgtccgctgcgcccaggctgggcgctttcacgcacctggttccatctgcacagggtatgtgcagggggcgctgggccgcattccccagatggggaaacggaggcatggagagaggaagagctatcctccctcctcagcaaccaccggtctggccggcccctgtgggcggtgccctgggagtcacctgggaccaacagaggccttggcaacgcacttagcagtgccagtggcagcagcagccatggggaagccgggcgtggaggcagcaccgggctcggagctggccagggttccctagcctatggagcacgcagccaccacaggccccaggcctggacctccctctcggcgggtggagaatgtgagtcctctgggacttgccgctcctgccatggggttgaagtctgcccgttcccccaaaggccaggagggtgcaggttcctgcaccctgggcctaatttcagccaggagagggacttttacagctcagccaggcagggaggcgggactggtgactgcatgggagtggggccacagcccagcctgggacccacctggggaatgggtggcggtacctccccaggttgtgctacgagccaaggactggctgccaggagctcctgggggcaccgcagtgtgggccaccagcttggaagcagaggtcccaccagatctagcgctcaataaggagcagcagctgcaggtgggtgtggggccccagcgtgctcgtgaggagggagggtgccagcagggcccacagacgccacctctcacctggccacccacagatctccaaggagctggtcgacattcagatcacaacccaccacctacatgagcagcatgaggctgaaatcttccagctgaagagtgaggtgagcagccgtgtgaaccagcctcagtgcatgggggacggggggtgcaggcccaggacacgtgccctgcatgggcatgcacacgcacatggcatctgtgggtctcagcctgcctctgagtgctgcgcgcccctgagcgtgcaccgggtgaatgttcacctaccccaggtggcccgcgggcaggtgcacctgctcatgccagttgtcccacagatccttcggctggagagccgggtactggagctggagctgcgaggagatggcaccagccagggctgtgcagtcccagtggagtctgaccccaggcatccccgggcagcagcccaagagctcagacacaaagcccaggtgcctggacactctgatgaccacagattccaggttaccatgagcatatggagagcctggctgggaaaggccagagggaagcctcagcaggggcctcagtgaaactggggctcacccaccccttagctttccctgccctcccttccattcaggtgcagcccaagaacaccatgaaccccgagaatgagcagcacaggctggggagcggcgtgagtgtgcagccacctagctcaggggagagggcagcaccagagaccccaagcctagggtctcatccagccagccctgtgtgccccacagctgcagggggaagtgaagtgggcgctggagcatcaggaggcccggcagcaggcactggtgacgcgtgtgtgagtggccatctcacctggggccccatcctggagcagagagaacccctgatcgtgggcctgctgagcctcacccccgtgtcttcagggcaaccctgggccggcagctgcagggagcccgagaggaggccagggcagccgg

SEQ ID NO: 1242945 - DNA, 4001 bp, Homo sapiens
cgcgggagcatggcgccgaggggtgggcgggcaggcaggcacttaatgagcagcctcccccaagccagagatgctcactcagcccaacacgcagtccccagatgccttcctaagggtccacgtaacggtggaggccccgggacaacagccatactcacgccacccgcaggaaggggttgtagaggcgctcctcgcccagagtcgacggcacagtgggcacgtcatcctcatccctcttctggagtgaccacaggccccggtcaccattaggccttgtctgagagccccccccaccccgaagcctgttccctccccccccaccctcttgccgcggcgggaaaggggccgtgccttagcccaggacagcttggctctcacgtggtcgttgcagggctccactttctgggcaaactccaggttgctaagcgtgtgctcgtggccgcagaacaccttctggaggaagagcgctcggtgagcgcgcacgcggccaggaagcggggaaagtgcttgcgccgggggcctggcctcccctgcccggtctgccctcaggtgggcattcactctgcacccctagcacagtgagggtgcggagcgtgggggctgtgcccacgggagaagaggggagggcccaggcccgctcaccgtctcggggggcagggtacccagctcggccaggctctggtacatctgctgggcgctgccctccaggcacgagccgcagccggccaccgacagcgcgtcgcctggcgggggagggcgggtcagagcagatggggcggggccggcgggaggcggggtgggcgcgctccgcgctgcgggtacccgagaacagggcgggtgggtccgggcaatcgtcctcccacaggaagtagctcatgtggccggcggtgtggccgggcgtcaggaggcaacgcacgtggatggccccgaactgcggcggaggagcaggcggacctgtgagggcgggtggacccggggcgccctccccgcccctcccgggagcgcgcgctcacccgcagctcctcgccgtgcgccagcctgcgcgtcagcgagaagatgcgctcgtccgcgcccagcaccgccagcccgggacgaagccgcgccagctccgggtttccccgcgcgtggtccctgcgggcgggcgggcgggggccgggttaggtcgggttgggacaaggcggcgtcctcgtgcctccccgcgccccgccggcgctcaccagtgatggtgggtggtcagcacagcggtcagagacaccccctcccggcccacgatctccagcagctgaaagggacgggagtgacggtaacacagacggtcccggtggcccactccctccatatcgggatccgccgcgctcactgccccaggccggccagagccccggggagcgccggggagcggggacccagcgggcggtgactgcgcccagcgcgtgcagggaccgccaggcagcagcgaaagggcggaggccagaggtgccgtaacttcagggagccccaagataaacaaggaaccccagccgccaatgacttccggagagcagagcacgtgggggctcgctcctaccaggggggtcggggaggctctcgggggacacggccgggtccctgcggcccgcggcctgccctcaccctcttgggcacagccacgtccacggccaccgcctcgcgcgtgagctcctcgatgaccaggtacatgtagttgtcctcgagcacggggatgaccttgaccttcatggtcacggagctcggccaccggtgcctgctccaaaacaggccccccagcccacggtgccccttcagggcggggcccgctctccacaccctaggaagggctgtgcgaagcgggctcggtcaacacgctgggggccaaaagagaagcccggctccccaggaactccccggcactcgcgtggaattccacgcaccgggctccagcaggagcggaacccggccggtccccaaccagccccggctccgcccccagtccgagccccagtccccaaaggccacgccttcctcccaggccccgcccctcggccccccgccctgccgccgcaagacccctgacccgggacagccgcgttcccccgccgcccgcctcaccggcacggctgtgctgaggacccgaaggacagactgacggaggcggggcctcggccgccggtcacggggtccggactgagcgcggcgctgggctcgggagccgccaaccgcccccctccgcggacgcgccccgcccccgcccccgcccggcccggatcctgcgcgcgatgagaccacaaggcccgccggcggtgcgcgtgcccggtggggcgccacgcgcacgctccgaccccgccgcgcccggcgctggcacctcctccaggaagccctcccgacgccccggctgagccagtcgtttccgagttctccggcccctgatggggacgtctgcgcccctcttctcaggccagaggtgcagagatatacttcccccgtcccggggctcagccagcactgctaggtacacagaaggtgtccagcgagtgtagctcagggcatcctgcgggcgggctgccgctccgttccgcgtgctcgtccgctgcgcccaggctgggcgctttcacgcacctggttccatctgcacagggtatgtgcagggggcgctgggccgcattccccagatggggaaacggaggcatggagagaggaagagctatcctccctcctcagcaaccaccggtctggccggcccctgtgggcggtgccctgggagtcacctgggaccaacagaggccttggcaacgcacttagcagtgccagtggcagcagcagccatggggaagccgggcgtggaggcagcaccgggctcggagctggccagggttccctagcctatggagcacgcagccaccacaggccccaggcctggacctccctctcggcgggtggagaatgtgagtcctctgggacttgccgctcctgccatggggttgaagtctgcccgttcccccaaaggccaggagggtgcaggttcctgcaccctgggcctaatttcagccaggagagggacttttacagctcagccaggcagggaggcgggactggtgactgcatgggagtggggccacagcccagcctgggacccacctggggaatgggtggcggtacctccccaggttgtgctacgagccaaggactggctgccaggagctcctgggggcaccgcagtgtgggccaccagcttggaagcagaggtcccaccagatctagcgctcaataaggagcagcagctgcaggtgggtgtggggccccagcgtgctcgtgaggagggagggtgccagcagggcccacagacgccacctctcacctggccacccacagatctccaaggagctggtcgacattcagatcacaacccaccacctacatgagcagcatgaggctgaaatcttccagctgaagagtgaggtgagcagccgtgtgaaccagcctcagtgcatgggggacggggggtgcaggcccaggacacgtgccctgcatgggcatgcacacgcacatggcatctgtgggtctcagcctgcctctgagtgctgcgcgcccctgagcgtgcaccgggtgaatgttcacctaccccaggtggcccgcgggcaggtgcacctgctcatgccagttgtcccacagatccttcggctggagagccgggtactggagctggagctgcgaggagatggcaccagccagggctgtgcagtcccagtggagtctgaccccaggcatccccgggcagcagcccaagagctcagacacaaagcccaggtgcctggacactctgatgaccacagattccaggttaccatgagcatatggagagcctggctgggaaaggccagagggaagcctcagcaggggcctcagtgaaactggggctcacccaccccttagctttccctgccctcccttccattcaggtgcagcccaagaacaccatgaaccccgagaatgagcagcacaggctg

SEQ ID NO: 1242946 - DNA, 4001 bp, Homo sapiens
ggtcaaagcagccgcgaacgcactcgccacgcttctcatccccgctcgagcctcgcctcttggcaaaggcggcgccggccacacccacgtgccgctttcccacgacccaaccgggaaggaacggaaaacccaagggatcccagtcggaccaggccctgctcttcctggtaccccagctaccttggcaaagtgtgcctgtagacaaaggcgcatccccggtgtagccggccctctccttccctgggcgggacccctcccccgcaggaattagaggcattacccaggttactacccccacccccaaatagaggcccccaaaatgtccctcagccagataccccacgtgcaatcaggcgctggtgcaggctgtggtcgaggttctcctgcccagacctggggcggggggctgtgtcaccccaagccggcagaggctgtggggtgatcctacagcctggaccgccgcctcctcatgcccttcgctcatccacgggagcccagcccaggcaaactaacgcgcactcggctttcaagggcacaaggttgggggcgctctcaagtccggctcccaggactacggaaggagaacccccagtcaaggacgcacgcttctccatcaagcctccgaaactttgaggggctgctggtgtgcagcgtctctcccgctgacaggtgcgccccgcggcagggccacacgcagcggcatggaaacttgtgcgcccaacggggctcctcctcttgtgcccggccgccctccgggcccctccaggccggccaggggaggggagcccactcccccggacacgtgctgccgcggcccggctaacccgcaggaacgtgggcgcctggtaccttggtgcccggacaggtgcaaacccccgggaggtcgtagaaggtgcgggggaggggtaccccagccagcctggagccccgcaccggcgtccgcctcctaattcattcacaaaacaggagccgccggggaggagggaggcgaggctggaagaggagaggatgcaggaagaaagggaggaggggtcagtggggagggggctgcaggaacggccgccgggaagcccggggctgccgccgcccccaacccgcctccccgcgccggacgcggcgcccgcagggctgggagctggccgggtgcggggggctcggcgagaggcacccctgccacccggcgcgccccggcctcggcgcagccccgcgcggccctcccctcctgggtgccggccggcccgcgctcaccgtgccgccggctgccgcgctccggagctcagcaggcccgcggcggctccatgcccctcctcccgctccgctccgcgccgccgcgcgctccgactgccgcctgcccagccgagccgcccttaagtacccggcgcgtgcccgccaggagaggcgcctcccccggccctggggccgggaaagttgaccagagtgggagggcccccgcgggcgcacccccgaccccgcgcggtcccagggagcgccacaagccagcgctcggcggggacgcctagtcccgggtggacgcggctccggctcgcaagactcgcagcccctgcgccctctccgaagctgggtcccccgagtggggccgaaggccacgcggctctgcaatcgccctgggaccagctgccaaggcaagacggtcattgggctcaacctagaacctgaagcgtcgttaactttccagataccacgcagggacttccaaaattgttactctccctccccgcccccacgccccgctctctaacccgcaaaacctactcaccctgcaaggaaggcgagctgagagcactcttccccgacttctgcacgcgaaggggcagttcgctgtctagggggctcccgaaagccaaggcagcaaaaccttcctgctggcaggaaagaggcgctgaagagaattgtcaaatgtaaaaaggctggtcaaagaaggtgttaacaattgtgacagcttagctttgaattccgcagtggggcgctgatgactttaaggcggtttgcaaaagctgcaaacggttttgtaggaaccttggaggttccggtgtcttaaagccaaaacaattcctcctcttctttttcacacctttatttccgacatccatgacctcctaaattcccaactgaccttatcgacagtagttttcaggtccctaaaagatagtgctagactcgagtaaagtgagatgaagtgagttggggtgcactggggtggggtgagatcgaggaggggggagagttgttagcagagacaagaagtttagaaccagctgaaggcgatgagtttttacatctcaggaaaacttgaagagaaattataattaataactagtttttaaaaaatgagtggccgggcgccgtggctcaagcctgtaatctcagcactttcggcgttacgggcaccatgcccgtaatcccagctactcgggaggctgaggcaggagaatcgcttgaaccccgcaggtggaggttgcagtgagctgaaatcgcaccactgcactccagcttgggcagcagagcgagactccgtctccaaaaaaaaaaaaaaaaaaaaaaaaaaaaaaaaccaaaaaacagagtttacctgttttccaaatacacctgatataatttctatcacttcttcccaagctgcaacaaatttataggcacctgagctgcagtctataaacttctcctctcgcaagttttaggggctcagggacttgcctgcccaccattgctcagtctgggccacagacctcacacctcagtccccgcaggcaagcaaagaccccaggcacacctactccacacaatcccatcttacattattggccaggcacagtggctcacacctgtagtcccagcactttgggaggctgaagatggaggatcgcttgaggccaggagttcaagaccagcctgggcaacaaagcgagacttcccccgtctctacaaaaattaaaattaaaaaattagccagggccgggtgcaggctcacgcctgtaatcccaacactctgggaggccgaggtgggcggatcacgaggtcagaagttagagaccagcctggctaatatggtgaaaccctatctctactaaaaaatacaaaaattagccaggcatggtggcacgtgcctgtagtcccagccactgggaaggttgaggcagaagaatcgcttaaacccaggagacagaggttgcagtgggccaagattatgccactgtactccagcctgggcgacagagtgagactccatctcaaaaaataaaaataaaaaaaaaaagaaaaagaaaagaaaagaaaaaaaaaaaaaacattagccaggcatggtggagtgtgcctgtagtcccagctactagggaggctgaggcaggagaattgcttgagcccaggaggtcaaggcaacagtgagctatgatcgaaccactacactccagcctgggtaacagaacaagacgctgtctcaaaaacaaattcctggactccagcagcccttccgcctcagcctccctaggagctagtcctataggcatgctatccagcccagctgccaatgtgttttgaacttcagatggcctgaggggccctaccagagccattcctacttacacaaagatggagaagaagccttaggttggtggaggggagggctctagagtctgccagtaagccccagtgtcttcatcccacagatgggattgctaggcggactgataggaagtttgaagagattggctgagggtaagcgctcagcaagtgttagtaaaccagacagcagcatcctttgcccatgccacgggttctacatggccatccctctagagcactcagtgacagcaagttcaaggatcagtgtttgaataaaagaaaactgcctggccgggtgtggtggctcacacctgtaatcccagcactttgggaggctgaggcgggtggatcacctgaggtcgggagtttgagaccagcctggccaacatggtgaaaccctgtctctactaaaaatacaaaaa

SEQ ID NO: 1242947 - DNA, 4001 bp, Homo sapiens
cgtacaggccgaaggacaggtagtgcttttccgtgtggatgaactggtagcccgtcacataggctgccaggatgccacccagcactgccagggcaaacaggctggtgcccaccacacgcagggctgtcgtcagctgcaccggcatctggcgagagaaggcaggagatgaagggtcaggcaggaggcagcatttccagtccgtgggagcatgggtgttctctgttactagtggacatgacccactgatcaaaaccgttaccgcttactgagcataagacttggtagactcagaagccagactactggggttcagatcccagctctgccacttgatgtctgtgcccccttacgtcatctgtaaaatgtgggttgcaggactaacctcaaggcatctttgagggttaaatgggcgacacatacaaagcccttagtgtagcactggggtagacaagccaaggcccagagggtcacgtgacatctggctggtgggtggcagaactgggctctacctggcccaaagcgctgaagaggtaagcttcaagggggtgagcctgaggcagctctgggcacctgagggccagggaggcagccagtggcctaagagcttccccctaccctgcacccactcctggaggggatattcaccagtaaagtgcagccaccagtaagacccaagaagaaagtgcaggagcaaaagaaacagcaaacaaaggggcattgggaaaaagcagcagcttccctttctcaagacagttattagagaaactttccctgtgtcctccactttctcaccttttacttgagaggcaggaaagaaagggaaagcagggggagaggcagaccaggaaatgcaagctggggagtggacagcctcctagagcccagggctgaagaaagcacagggaactgcagccaccactgcagcagcctccacagtggctgcctgggcatcccatccgcttggtcctagtgcccgtgcagcatgcgtctctgtgcgtgtccccctgcccagccactcctggaaacaatgcccggtttccatttgcaactaagtcagggctcctaacatctcccctgttggaaacagctgtattttataacagcccaggacttggcactagagaattgggtttaagacagcacttctgcctcctggctgcctgaccttgccccagttctctgagacttggtctccccatagcacaatgggagttctaatggattcctgcctcatgtctcaggtaagtcatttccctaaaaatggaaacacttccggccccgaagagctaccctagtggtgagggtgactgtggtttcctccagagcaggtggggagggggatgtgagggaggggaaagaaaaggtggcaaggatggctgccggccttcccattctgacccacactatctcctctctgccacctgcctgatctagagaaccccatgttcactgaggtctacagacaatgatgcctcgcttccaagcttgctccaactcttaggtctcaggaaacggagcccccaaaacaaacacactttcctgtcgggacgcctctcacgtagaagggacgaagaacacgcagtcactgcctaaatcgacctgagactccggcactagcagccttccagcagcgttggcccgaaaagagctgctggcagcctagcctctccgggaagcgcggcctccgggcgctctgccccaccgtcccggggagcccgccgtgtgcttccttcacaggactcccagccctccctgttgccaccctactgctcgcgcctgcggcccaggagtccccaggcctgcatccgcagcctaggagcgcccccattcccctccggagcttacatgctgaaggggcgcggcgggacccccctgcctgcctgcgctctgggtaggggaagggggcgccaaggccagcccagcaacctgggcgctggcgccccgcctcggtgcagtgccggaggcggcgcccaccaggtcaaagcagccgcgaacgcactcgccacgcttctcatccccgctcgagcctcgcctcttggcaaaggcggcgccggccacacccacgtgccgctttcccacgacccaaccgggaaggaacggaaaacccaagggatcccagtcggaccaggccctgctcttcctggtaccccagctaccttggcaaagtgtgcctgtagacaaaggcgcatccccggtgtagccggccctctccttccctgggcgggacccctcccccgcaggaattagaggcattacccaggttactacccccacccccaaatagaggcccccaaaatgtccctcagccagataccccacgtgcaatcaggcgctggtgcaggctgtggtcgaggttctcctgcccagacctggggcggggggctgtgtcaccccaagccggcagaggctgtggggtgatcctacagcctggaccgccgcctcctcatgcccttcgctcatccacgggagcccagcccaggcaaactaacgcgcactcggctttcaagggcacaaggttgggggcgctctcaagtccggctcccaggactacggaaggagaacccccagtcaaggacgcacgcttctccatcaagcctccgaaactttgaggggctgctggtgtgcagcgtctctcccgctgacaggtgcgccccgcggcagggccacacgcagcggcatggaaacttgtgcgcccaacggggctcctcctcttgtgcccggccgccctccgggcccctccaggccggccaggggaggggagcccactcccccggacacgtgctgccgcggcccggctaacccgcaggaacgtgggcgcctggtaccttggtgcccggacaggtgcaaacccccgggaggtcgtagaaggtgcgggggaggggtaccccagccagcctggagccccgcaccggcgtccgcctcctaattcattcacaaaacaggagccgccggggaggagggaggcgaggctggaagaggagaggatgcaggaagaaagggaggaggggtcagtggggagggggctgcaggaacggccgccgggaagcccggggctgccgccgcccccaacccgcctccccgcgccggacgcggcgcccgcagggctgggagctggccgggtgcggggggctcggcgagaggcacccctgccacccggcgcgccccggcctcggcgcagccccgcgcggccctcccctcctgggtgccggccggcccgcgctcaccgtgccgccggctgccgcgctccggagctcagcaggcccgcggcggctccatgcccctcctcccgctccgctccgcgccgccgcgcgctccgactgccgcctgcccagccgagccgcccttaagtacccggcgcgtgcccgccaggagaggcgcctcccccggccctggggccgggaaagttgaccagagtgggagggcccccgcgggcgcacccccgaccccgcgcggtcccagggagcgccacaagccagcgctcggcggggacgcctagtcccgggtggacgcggctccggctcgcaagactcgcagcccctgcgccctctccgaagctgggtcccccgagtggggccgaaggccacgcggctctgcaatcgccctgggaccagctgccaaggcaagacggtcattgggctcaacctagaacctgaagcgtcgttaactttccagataccacgcagggacttccaaaattgttactctccctccccgcccccacgccccgctctctaacccgcaaaacctactcaccctgcaaggaaggcgagctgagagcactcttccccgacttctgcacgcgaaggggcagttcgctgtctagggggctcccgaaagccaaggcagcaaaaccttcctgctggcaggaaagaggcgctgaagagaattgtcaaatgtaaaaaggctggtcaaagaaggtgttaacaattgtgacagcttagctttgaattccgcagtggggcgctgatgactttaaggcggtttgcaaaagctgcaaacgg

SEQ ID NO: 1242948 - DNA, 4001 bp, Homo sapiens
ttcctccagagcaggtggggagggggatgtgagggaggggaaagaaaaggtggcaaggatggctgccggccttcccattctgacccacactatctcctctctgccacctgcctgatctagagaaccccatgttcactgaggtctacagacaatgatgcctcgcttccaagcttgctccaactcttaggtctcaggaaacggagcccccaaaacaaacacactttcctgtcgggacgcctctcacgtagaagggacgaagaacacgcagtcactgcctaaatcgacctgagactccggcactagcagccttccagcagcgttggcccgaaaagagctgctggcagcctagcctctccgggaagcgcggcctccgggcgctctgccccaccgtcccggggagcccgccgtgtgcttccttcacaggactcccagccctccctgttgccaccctactgctcgcgcctgcggcccaggagtccccaggcctgcatccgcagcctaggagcgcccccattcccctccggagcttacatgctgaaggggcgcggcgggacccccctgcctgcctgcgctctgggtaggggaagggggcgccaaggccagcccagcaacctgggcgctggcgccccgcctcggtgcagtgccggaggcggcgcccaccaggtcaaagcagccgcgaacgcactcgccacgcttctcatccccgctcgagcctcgcctcttggcaaaggcggcgccggccacacccacgtgccgctttcccacgacccaaccgggaaggaacggaaaacccaagggatcccagtcggaccaggccctgctcttcctggtaccccagctaccttggcaaagtgtgcctgtagacaaaggcgcatccccggtgtagccggccctctccttccctgggcgggacccctcccccgcaggaattagaggcattacccaggttactacccccacccccaaatagaggcccccaaaatgtccctcagccagataccccacgtgcaatcaggcgctggtgcaggctgtggtcgaggttctcctgcccagacctggggcggggggctgtgtcaccccaagccggcagaggctgtggggtgatcctacagcctggaccgccgcctcctcatgcccttcgctcatccacgggagcccagcccaggcaaactaacgcgcactcggctttcaagggcacaaggttgggggcgctctcaagtccggctcccaggactacggaaggagaacccccagtcaaggacgcacgcttctccatcaagcctccgaaactttgaggggctgctggtgtgcagcgtctctcccgctgacaggtgcgccccgcggcagggccacacgcagcggcatggaaacttgtgcgcccaacggggctcctcctcttgtgcccggccgccctccgggcccctccaggccggccaggggaggggagcccactcccccggacacgtgctgccgcggcccggctaacccgcaggaacgtgggcgcctggtaccttggtgcccggacaggtgcaaacccccgggaggtcgtagaaggtgcgggggaggggtaccccagccagcctggagccccgcaccggcgtccgcctcctaattcattcacaaaacaggagccgccggggaggagggaggcgaggctggaagaggagaggatgcaggaagaaagggaggaggggtcagtggggagggggctgcaggaacggccgccgggaagcccggggctgccgccgcccccaacccgcctccccgcgccggacgcggcgcccgcagggctgggagctggccgggtgcggggggctcggcgagaggcacccctgccacccggcgcgccccggcctcggcgcagccccgcgcggccctcccctcctgggtgccggccggcccgcgctcaccgtgccgccggctgccgcgctccggagctcagcaggcccgcggcggctccatgcccctcctcccgctccgctccgcgccgccgcgcgctccgactgccgcctgcccagccgagccgcccttaagtacccggcgcgtgcccgccaggagaggcgcctcccccggccctggggccgggaaagttgaccagagtgggagggcccccgcgggcgcacccccgaccccgcgcggtcccagggagcgccacaagccagcgctcggcggggacgcctagtcccgggtggacgcggctccggctcgcaagactcgcagcccctgcgccctctccgaagctgggtcccccgagtggggccgaaggccacgcggctctgcaatcgccctgggaccagctgccaaggcaagacggtcattgggctcaacctagaacctgaagcgtcgttaactttccagataccacgcagggacttccaaaattgttactctccctccccgcccccacgccccgctctctaacccgcaaaacctactcaccctgcaaggaaggcgagctgagagcactcttccccgacttctgcacgcgaaggggcagttcgctgtctagggggctcccgaaagccaaggcagcaaaaccttcctgctggcaggaaagaggcgctgaagagaattgtcaaatgtaaaaaggctggtcaaagaaggtgttaacaattgtgacagcttagctttgaattccgcagtggggcgctgatgactttaaggcggtttgcaaaagctgcaaacggttttgtaggaaccttggaggttccggtgtcttaaagccaaaacaattcctcctcttctttttcacacctttatttccgacatccatgacctcctaaattcccaactgaccttatcgacagtagttttcaggtccctaaaagatagtgctagactcgagtaaagtgagatgaagtgagttggggtgcactggggtggggtgagatcgaggaggggggagagttgttagcagagacaagaagtttagaaccagctgaaggcgatgagtttttacatctcaggaaaacttgaagagaaattataattaataactagtttttaaaaaatgagtggccgggcgccgtggctcaagcctgtaatctcagcactttcggcgttacgggcaccatgcccgtaatcccagctactcgggaggctgaggcaggagaatcgcttgaaccccgcaggtggaggttgcagtgagctgaaatcgcaccactgcactccagcttgggcagcagagcgagactccgtctccaaaaaaaaaaaaaaaaaaaaaaaaaaaaaaaaccaaaaaacagagtttacctgttttccaaatacacctgatataatttctatcacttcttcccaagctgcaacaaatttataggcacctgagctgcagtctataaacttctcctctcgcaagttttaggggctcagggacttgcctgcccaccattgctcagtctgggccacagacctcacacctcagtccccgcaggcaagcaaagaccccaggcacacctactccacacaatcccatcttacattattggccaggcacagtggctcacacctgtagtcccagcactttgggaggctgaagatggaggatcgcttgaggccaggagttcaagaccagcctgggcaacaaagcgagacttcccccgtctctacaaaaattaaaattaaaaaattagccagggccgggtgcaggctcacgcctgtaatcccaacactctgggaggccgaggtgggcggatcacgaggtcagaagttagagaccagcctggctaatatggtgaaaccctatctctactaaaaaatacaaaaattagccaggcatggtggcacgtgcctgtagtcccagccactgggaaggttgaggcagaagaatcgcttaaacccaggagacagaggttgcagtgggccaagattatgccactgtactccagcctgggcgacagagtgagactccatctcaaaaaataaaaataaaaaaaaaaagaaaaagaaaagaaaagaaaaaaaaaaaaaacattagccaggcatggtggagtgtgcctgtagtc

SEQ ID NO: 1242949 - DNA, 4001 bp, Homo sapiens
gcttagtcaactgaagcagcaggagtggagaaggaaatgataaatttataactggttctgatcaattaattgtaaaaagcgctgcactccaaccagccctctgctgtacatttgacatatttctacctttaggtcagacctccattcttcctgatgaaataacgaagacaccgtcttcctgacagttgatactgtacccacaggctgcgggaaggacatcacaaacgcaggcagagggcctgccataggtgtttaccaagggtgattcatgggctcagggaataaaagatattcctatcagttgagggccagggctttatggctaccagctccgggaaccctccctctgataccccaggcactgcaagcctgctcagcagagagaaaacacacaccagggagaagggaccttctagccaggcctctgtggccccgctctcctctccagtcgcaatgggacaggctccccagcctcaggggagctgagtgggtgctgagctgggccctgagctgggcccagagacaaacgcctgatcttgacagccccagggcgtcagtgtctggtgtgtgagcattctggggtgacctgggggtgaaagtagagcccctattgaattgcctggggcctgcagttgcaccccgcacccctgatttcatctagactgtgcctgtatctgggaggttttacggagactagtgggaacgatgggggatcaatgcagccatgctggagtgggacttctctgacctacccaccacccatatgtgggaggacctctgggaaaccagtgacgtcccaggcagaaagccagccagttcttggcacaagagtgcccagaaacgtaaagatggataaattcattatttcagcaaacctgcattgaatctgaaaagtctgggaataaaactcgggaaagagcaaatgcatcctcaaagcactctagggtccagcgtttttccagctggacttcgcggtggctccactttccctcctccatcccctcctcccgcccctgccttttcctaccctatccagctgcagagaggttctagccatgtgtgtcccagctgctgtccacgcccatgcctggcacgtttgctgagggaaaaaactcaggcacacacaggctgccgcccactcagactttattcaaagaccacgggggtacgggtgcaggaaggggaggaggggctggggggaggcccaaggggcaagaagcatggccaccgaggctccagcttaacggtatttggaggtcagcacggtgctcacagaagccaggaacttgtccagggaggcgtgcaccgcaggggtgaactcggcggggaggtgggcggccagggtcaccagcaggcagtggcttaggagctgtgcagagaagagggtcagtggggccgagggcccaggcccgcagccgccgcctgcgctacacctcccgcaacccgcgtgatcctctgccctgcgaggaaggcgccatctcgcccctcgacccagatcgctcccggcccgccgctcaccttgaagttgaccgggtccacccgaagcttgtgcgcgtgcaggtcgctcagggcggacagcgcgttgggcatgtcgtccacgtgcgccacggcgttggtcagcgcgtcggccaccttcttgccgtggcccttaacctgggcagagccgtggctcaggtcgaagtgcgggaagtaggtcttggtggtggggaaggacaggaacatcctgcggggagaagcagagtgaggggtggggtttgggtccggggccaggacggttgagggtggcctgtgggtccgggcgggcgaggagcccgggtcggagcaggggagggagcctcacctctccagggcctccgcaccatactcgccagcgtgcgcgccgaccttaccccaggcggccttgacgttggtcttgtcggcaggagacagcaccatggtgggttctctctgagtctgtggggaccagaagagtgccgggccgcgagcgcgccagggtttatgcttggggcgcgggggcacgcccggccgggcggcgctcattggctggcgcggagcccggggcgcggcctggaccgcaggggagtcccgggcggggcctgcgcggggccgggcggcgggctcggcctcccctgggggtgcacgcggggcgggggccaggacgtctccaccctccacccgccactccactcccgcccatcccgctcgcccgggggcagggcggtagcggcgctggcggggccggcccgttggggtcgggcgctgtcggctcgtgcaccccggagcgcagcgccaccctttcctttcgggcgccggagcgtccctagcgagggagaaagtcagcccgcacccccgccccggcctggcacgcgctggacgcgcatcgactccagcgggatcggggaacacacgggcgagcgagtgcgagccgggaggcttcgcccaatcctggggcggagaggaatgcgcgcacccggacgccctggcccataggaactcaaaagaatttctgcgcagagcccctcctgctctccagcctcgcttcctgcagctccctttccctctggcgatagtcactagtgtgcttgagtgacaggcaccgggaaggaataaacaccaggacgcaaaaagcacggggctgggctgggggcggctccagattcagactcctctacccggggttgtggggtggcgcgtggggtggtgggtgctggctaagccccaagtcatggactcacagtttgtgtgactgactctcccactggcctagaggtcgtggttcactgtgacacccccagctctccaaatgctatctgatggaagacttgctaggtaaatactggttaaacaggtaaacaaagcaatagctggaaccggctggagcattcaacctcctctgggaggtaggcagtcctctaaccatcacacaagtacacacagaggtgcagacctcatcacaggccctgaggaagtctggaggtgtggacgaggcattcaaggtgaccagggttagtctgagggcttcctggaggaggtgagacttaaggatatgtattaggtggaggaggtggaggagggaggaggcttggctcggggaggggaaaggacagaggagacaagggccctgtggttggagaatggaggtggggagatgttggggtgatgaggctggccagctcctgcagggtgaggaaggaaggggtggacttctggggaagggtgggaggtgcaggagtgccagtgggtgcatccctgtgcatgaaaagtgatgttttttggggggatggtactgaggagaaaacagcctgagaaatcactgataagtcatttcctgggggtctggcagaagatcttgctttgaggagtgcatcaggtcagcacccttcagcctgctccctgccctgtctccccaggcccttactcaggccctgccctgggtgtccaggagcaagccagggtaagctgccttgggcagagaaggaagtagctccgaccagcttagcaatgcttcccccgttggatcttctcatttcccctccctgtctgccaccctcttctgactctgcccacagcctgaaggaaaaaaaaaagataagatgtgggggcttttttttttttgaggcggagtttcgctgttgttttccaggctggagtgcaatggtgtgatcttagctcactgcaacctctgcctccttggttaaaatgattctcctgcctcagcctccggagtaggtgggtttacaggcatgggccaccatgcccggctgattttgtatttttagtatagatggggtttctacatgttgatcagggtggtctcaaactcccgacctcaggtgatcctcccacctcggcctcccaaagtgctgggattacaggcgtgagccaccgtgcctgtcggattttagtttattttttaaagtgtttctgctgaaataacaatgctctgggctgtgaggcgcaggaagagcgggtggtggagaggggagggaactccccaacaa

SEQ ID NO: 1242950 - DNA, 4001 bp, Homo sapiens
tcagggtggtctcaaactcccgacctcaggtgatcctcccacctcggcctcccaaagtgctgggattacaggcgtgagccaccgtgcctgtcggattttagtttattttttaaagtgtttctgctgaaataacaatgctctgggctgtgaggcgcaggaagagcgggtggtggagaggggagggaactccccaacaattcagagaggtccatgtccagaaggaaagcagtgacagggtcctctccaccctccccaaagctcaatccagtactgtgagtgtggagggggaggcttgctgtggggcagggactgggttggaagtgctgctcatgttcctaggctggctgagagccagatgggctgtgcaacttcccagcatggattccaggacttcagcaccggggacagggacgtttccagaagttgctggcagcacaggaagcagaagaccaggaggtcccagaggccctgggtggggcaattagctgggagctcagggctgggcacacagtgagttctgaatgcaccttacaaactgcaggagacgtgcaggagtaaggccgcaaggtgctctgctgaagagtctccccaggtgtgggctgccggctgtgagcatcccagccccttcctccttccccactgactgggctgctctcagagggtcaccgtgacacaggaagtgtgagtagggccagcaccctcactccagccacctaccctctggcaggaaggggtgggaatgagagaaatgttctggcacctgcacttgcactggggacagcctattttgctagtttgttttgtttcgttttgttttgatggagagcgtatgttaactgggttcaaccagggagatttcaaaggagggtggcgatgctgggactccctgagtagaaccctggatgcctctctcctccccagcttctgagccactgcctgcaggcctggcacctctcaggacaggggatggttcagcaccttctcttgagcaggcccacctcagcttcccctcccatactccctgcagttctccctccccagccccatgcagctgcagagaggtccttggtctgagacaggtaaacacctccattgttggcacattccgggatagagagaacccaggcacacacaggctgctgcccactcagactttattcaaagaccaggaagggccggtgcaaggaggggaggagggcccgttgggaggcccagcgggcaggaggaacggctaccgaggctccagcttaacggtatttggaggtcagcacggtgctcacagaagccaggaacttgtccagggaggcgtgcaccgcaggggtgaactcggcggggaggtgggcggccagggtcaccagcaggcagtggcttaggagctgtgcagagaagagggtcagtgcggcccaggcccgcagccgccgcctgcgctacacctcccgcaacccgcgtgatcctctgccctgagaggaaggcgccatctcgcccctcgacccagatcgctcccggcccgccgctcaccttgaagttgaccgggtccacccgaagcttgtgcgcgtgcaggtcgctcagggcggacagcgcgttgggcatgtcgtccacgtgcgccacggcgttggtcagcgcgtcggccaccttcttgccgtggcccttaacctgggcagagccgtggctcaggtcgaagtgcgggaagtaggtcttggtggtggggaaggacaggaacatcctgcggggagaagcagagtgaggggtggggtttgggtccggggccaggacggttgagggtggcctgtgggtccgggcgggcgaggagcccgggtcggagcaggggagggagcctcacctctccagggcctccgcaccatactcgccagcgtgcgcgccgaccttaccccaggcggccttgacgttggtcttgtcggcaggagacagcaccatggtgggttctctctgagtctgtggggaccagaagagtgccggcccgcgagcgcgccagggtttatgcttggggcgcgggggcacgcccggccgggcggcgctcattggctggcgcggagcccggggcgcggcctggaccgcaggggagtcccgggcggggcctgcgcggggccgggcggcgggctcggcctcccctgggggtgcacgcggggcgggggccaggacgtctccaccctccacccgccactccactcccgcccatcccgctcgcccgggggcagggcggtagcggcgctggcggggccggcccgttggggtcgggcgctgtcggctcgtgcaccccggagcgcagcgccaccctttcctttcgggcgccggagcgtccctagcgagggagaaagtcagcccgcacccccgccccggcctggcacgcgctggacgcgcatcgactccagcgggatcggggaacacacgggcgagcgagtgcgagccggagggcttcgcccaatcctggggcggagaggaatgcgcgcacccggacgccctggcccataggaactcaaaagaatttctgcgcagagcccctcctgctctccagcctcgcttcctgcagctccctttccctctggcgatagtcactagtgtgcttgagtgacaggcaccgggaaggaacaaacaccaggacgcaaaaagcacggggctgggctgggggcggctccagattcagactcctctacccggggttgtggggtggcgcgtggggtggtgggtgctggctaagccccaagtcatggactcacagtttgtgtgactgactctcccactggcctagaggtcgtggttcactgtgacacccccagctctccaaatgctatctgatggaagacttgctaggtaaatactggttgtaaacagataaacaaacttggctctgggtagggaaaggacaggggagagaaggcccctgtggttgcagaatgtaggtgaggggatgtggggtgaggaaggaaggggtggacttggcgagggggagggtgggaggtgcaggagtgccagtgggtgcatccctgctcatgaaaagtgatggtttggccaggctcggtggctcacgcctgtaatcccagcactttgggaggccaaggcgggtggatcagctgaggtcgggagttcgagaccaggctgaccaacatggagaaaccccgtctctactaaaaatacaaaaattagctgggtgtggtggtgcacgcctgtaatcccagctactcgggaggtggaggctggagaatcctttgaaccagggagttggaggttgcagtgagccgagatcgtgccacagcactctagcctgacgacacagcgagactctgtctcaaaaaaataaatacataaggccgggcgcggtggctcacgcctgtaatcccagcacattgggaggctgaggcgggcagatgcgaggtcaggagatcgagaccatcctcgctaatgcagtgaaactctgtctctattaaaaatagaaaaaattagccaggcgtagtggggggcgcctgtagtcccagctactcagctactcgggaggctgagggaggagaatggcgtgaacctgcgaggtggagcttgcagtgagccgagattgtgccactgcactccagcctgggtgacagagcgagactccgtcacaaaaaaaaaaaaaaaaataataataataaaaataaaaaaataaagtcatgattttttggggggatcatgatggaaacatagtaataatcagtgagactgtggaatggcgcagagctgaatgaactggctgaaagggatgcaggggagacacttcactgagaataggaagttgtacacaggtatctacagtatgatggtatttttgtccaaaaagagagcctgtggcagtagttgtagatgtagctgtgttccctcagcatgggatggggcccatgggctgagttccaaacccttcattttggtctcttctgggggtgggtgtgaggagacaggaaagagagacactctcctactttaagtaacacaaaaaagggtgtgtgtgtgtgtgt

SEQ ID NO: 1242951 - DNA, 4001 bp, Homo sapiens
aacaaaaacaaagcaaaaaaaaaaaaaacccccaaaaacaaaaaaacagttgggggatgtagataacgtggggccaagttctccaaactaccgggctggggtcccaggcagtgcagggcaacaggtcactggcactgactgctggggggagtttggccgactcacagtcagggctccacttccagcagctctcttcagacctcgttgctgactgccaggtcagacctgggtgccaggcctggtccagtgctccccacacagacccaggatggccaacccagagccaaccctattcagggtttggagacctccaaggtcccactctttcctcagcccctattctttgtctgaaaagcctggggtggagccctaagattcccttcccagtcctggggagggagaagagggaacctggggaagggagtgccttggcctgggcacctgcagagattgagacacggcagctggggctgggtggaggggtggggtggcaacgaccctgcaggcacccaccctgtgttatgatttcaaaaattatttcaaaaatctcgtgagttggacgttgtttttctattcgataggtaaaggcctgagagctctgggacacgcccagggtcgcacagcttgtcattgagcaggctggaagactaaacctgctctgtctgccaaattgtggccactgaggacttcctcccgacctcatccccagggctgcagggtcacagggagggctaaccaggctagcgcaggtttgccactgaggaagtgtccatgggggaaggaaggggaaaggaacaggtctgcggagccctctgctctgggccaacgaattaggttgcacatttggctctgggacctcagtttctgcatctctctgcaaaaagggccaggattagcatctacaggtcccagcaggaagtggggatggagggagaatgaatgaataaatgcgtgaatggggaagtgctttgcgaacagtatggttggaagcccgattcaagggttgaagtcgaaggccaccctccctacccccgccacatcacagtgctccctctgccccatcgcactcctcgccatgggaggacaaacctccgggggtggggcgcatttgagagttctaggaggctccttttaggtccctgagcttcactggccaacaatagtgacctcgctttgctagctccccaaagaccacacaggcaggggcagatggttcgggcctctgtttattgacaggcacagaccaaggcctgcgcagcacagggctcagcggtatttttcggtcagcaccacggccacaccagtcaggaacttgtcccacgccgcttgcatttgcacggtgaactcgtcctgcaggtgggaggccagcacgacgtggaaacactggattagcagctgcaggagaaggggccggtgagacggggtctgccccgctagggacccccagagcccccccaccccggctgcgcgctgcaccattgccccggccggaaaggcctcaccggaaagttggctgggtccacgcgcagcacgagcgcgtgcaggtccgccagcgggctcagcgcggcgcgcaggttgtccacgtgctgcaccgccgcgcccacagccgccagcatgcgctgcccgtggctcagcagctgcgtcgcgtcctggcaggcgctcaggtgcgggaagtagaccttggtgctggggtacaccgtgaagagcctgcaggaccaggtcagtgaccggggaggagggcggctgcgtggggcttcactagcgcccacaccgcccagagcccggggatccgcacccgaaggaccttggatggcgttggcggcccacgcgcccaaaaccctcatctccacctccctgagctcccggagaccccgcctctaccgacctgagcagcagctccgccccgaattgcgcctcgtggcccgcaatcaggtcccagacctgcgcgatttgggcgcgctcctgggcgctgagcatggcgccgcctgacgtgctctgggggccgcgcccgccgccctggcctccttatagagcctccgggcaccccgcccgtccttatcggcccgagcgcggcgggaacgcggggaccctcggcctgcgccggggaacgtaaccagcccgggttcccgtctgtgtggaggcctcgacctccgggatcccagggtttctggcattgacccacgccgttgcgcgtgggcacctttactgcagactttaggggcatctgtttactcccctcgggtaaagttactgctctgccaggagggagcacatgggaggaaccggagagagaacaccgggcaggaaaccccctactctcttaggagtcggggagggaccggcctcagggacccccgtagctgccagagtcccgggattcggacgtcaggctttgtggaaaagttccctgagccccgacacgcttccaatacgcttagtgaagtgacaatctttgtgcgatatgggaagccgggagacgcacaaacgcccgtccgactcaaggaccccaggagacgccgcgggccggcccgggactgctccgctccacccgggccgcagctccggtgctcaggggctagaacctccccaaggcgccccccaagtgaaccccaggccgcgacgacagtggggacgaccgagttcctgcgaagcccccggacccatcactcagcttctcccctccttccctccaatactgagaacacagagcccagatcgctccgtcctcatccatttattggagtcagggcaggaactgtgggagggtgaagggcaggggaggggccgcagcctgtcctgggggtcccggaggcggcgctcagcggtacttctcggtcaggacagaggatacgaccgataggaacttggcccaggcggcgtgggcctcggccgtgaagtcggcggggaagcgcgcggccagggtgaccagcaggcagtgggacaggagctgggggcgggggcggctcagtgcgggggcggggcctagcccgggccccgccccgcgaccccaccccgccccgccccgccccgcgccccgccccgcgaccccgccccgcgaccccgccccggcccggcccgccccgccccgcgccccgccccgcccagcccctccccgccccgccccgccccgccgggccccggccgccccgcccgccccgccccgccccgccccgccccgcgaccccgccccgccccgcgaccccaccccgccccgccccgcgaccccgccccgcggccccgcccgccccgcggccccgccccgccccgcccgcaccgcgccccgcgcaccttgaagttgaccgggtccacgcgcaggatgtaggcgtgcagctcgctcagcttggacagggcgccgccgatgtcgtcgatgctcttcaccgcgtcgcccacggcggccaccaccttggagccgtgcgcgcgcaactgcgcggaccccgggtgcaggtcgaagtgcgggaagtaggtcttggtctgcgggtggctgaggaagagcctgggacggggggcgggggccgtgagctcccagcagcgcggcctcccgccacggcccacgcgccctgcggccctctccgagcaccgggacacatctgcgaccccgcagcaggccccagcccctcctcgcggggcccgggtgcccaggcagctgcccctcccaggctgccctgggctagaggccccccaggcctctgcagctcccggctgatcgccctgcttccgacgggttctgtgcagcctggtccccaaatctcccgccctccgcctccagcacgcctggtgcccccagcccctccaccgtctcctctggccacaggacctccctcccagccccagactgggttgcccgccaccccttctgcaggctcatgacctcccagcagcgttccagggaaggaaaagctccctggcccctcccaggggatcagatgctgggaatttgaagctgggacagtgccctgatcccagatgctgggactttagaggctgtagtgccctggctgccc

SEQ ID NO: 1242952 - DNA, 4001 bp, Homo sapiens
cacgccattctcctgccgcagcctcccgagtagctgggaatgcaggcgcccgccaccacccccagctatttttttgtatttttagtagagacggggtttcacagtgttagccaggatggtctcgatctcctgacctcgtgatccgcccgcctcggcctcccggagtgctgggattacaggcgtgagccaccgcgcccggcctgtccacttttcctcagtgtcaccttgagaataccatttctgaggaaaagcatctctacatgtgcctagaagactggaacagctacgcatcaaatgttaggggtgtggatgaggcctgcctctaccccgtgtgtgtgtgtgtgtgtgtgtggcatgtctgtgttacacatgtgctcttggatatgacagccatgtcctgttcttgtttacacatgacacagtttgccgcgtgtcaagcggcagctgaaggatgtgctgcacccattcctggacctgggatacacaggaaggtgcagcaagccttgttttcggaagttctacaatgaccatgattggttttatgtggacaaatataaaaaagcttcactctccgtagtgatgtcgggtgacggcaggggtctgggtcggttcctggtccacctcgccagctacgtggctaggtgctggggctggtcccacctccttcaccacaaccccccggcaccccaggtccccgattccaggccacagccgcggcggctgggtgctgcgcaggtaccggctcgcgccgggagggggcgctgttccctaacctgctccgagtcagccccgggcccttaacgccgcccgcgtgcgttcacgctgcaggtgcggagttctcgcggtgggtccgggccgcgtgctcggcgcagagtggggagggcgaagccagccgccctcgggatgggcagagtcggccgtcctcgcagcccgccgcccggggcgtcccgcggccctcacctaccaccccattcgggagggtcaggctgcacgcagttcggtgcccccatggccgaggccccaaacctgctggaggtggaaagaggcgcgcctggatctgggcactgggggtgtgccccaggccctcgcctttccttggggaggggcggcgccttcctctcgcgtcctgacctcgagagagcacggcaagaaggctgctcctgggagaggctttactcaaacacggggaaggtcgcctggggatcccgcggccacccacccacagttcagcggtactcggaaaccagcgccgagataacgtggctcaggaacttgtccagcgacgcctgcagcgcggggctgaagtctccggggtagtgccgggcgagggttaccagcaggcagtggcccaggagctgcggcgagcgctcaaggctcactcgcctgcacccgccccgcacgccccccgcacccaccccgccggggccctcccggggacaggggcccagcacggcagccgctcacctggaagctggccgggtccactcgcagctggcacgcgtgcaggtggctcagcgcggacagcgcgtggggtaggtcgtccaggcgctccacggcgaggctcagcgcgtccgccaccttctggccgtgggctctgacttgtgaggagccggggctcaggtccaggtgggagaagtaggtcttcgtggcggggaaagccaggaaggtcctgcgagaggaacgtgggtgaggcgcgtccggggggcttggggagggagggcccctgggggcgggggcgcccagcctgccgcacctttccagggcctctgtcgtgtagacgccgacgttgctgcccagcttcttccacagggcgcgcaccagcgcccggtcctccgcggacagcgccatccccgcgctggaacccgccgcgccctgcgaccccgctgcgcctgcgcggaccggccaggggtcccgcggcctccagggggcgccgcgccgcagcttcgccgcccgggggtccagggcctcgtcggagatcccgggaccgcgcgcgctcaatctccgacagctccgaccggggccctctgaatcgccctggatccaaggccccccgtcttaggtgttcactatatggtatttagtctctactaaaaacacaaaaattggccgggtgcggtgagtgcagtggcgccattccggctcactgcaacctccgcctcccgggttcaaacgattctcctgcctcagcctcccgagtaactgggatcacaggtgcatgccaccatgccaattttgtatttttagtagagacagggtttcaccgtgttaggctgatctcaaactcccgacctcaggtgatcctcccgcctcagcctcccaaagttctgggattacaggcgtgaaccaccgcgcccggccatgtacattattatagcactgaatttcggcatggatttggcattggaagtcagtttattctgcctcttgattctattgtgacacttgcccgagtctgttttctcatttattatataaaatgagggtgacagtttcttctcagattgtgagaattaaacggataacaactgtgaggtgcctgactcgtagcaggtgtttcttcagggcagtgaacatttattgagtacctgggatgtaacccaagaataatagtaaatgcatatgcagcactcactctgctgtaccccttatatcttttttgttttaaaaaaggtgataaaatagacataaattaccattgtagccatttttcaggtataaaatttggtgatattaagaacacttagtgttatgcagccatcaccactatctaggtcagaactttttcatcatcccaaacgccacctcggtactcattaacagtaactctggccccggcagccactaatccgcttttggtccctatggatttggctgtagcggatattgcatatagatggggtcatgcagtttgtgacctttggtgtccggcttcttttacttgtcaaatattttcagggtgcagctacatcctatcagtgcttcatttctttttgtggccaaataatattccattgtgtgtatagaccaccacattttgtttacccattcatctactgatgtataatttttataattttttttgagatggagttttgctcttgttgcccaggctagagtgcaatggtgtgatctcgggtcactgcaacctctgcctcctgggttcaagtgattctcctacctcaacctcccgagtagctgggattacaggcgtgcgccaccacacccggctaattttttgtatttttagtagagatggggtttccccatattggccaggctggtctcgaattcctgaccttgtgatctgcccaccttggcttcccaaagtgctgggattacaggcgtgagccactgtgcccaaccaccgtgctaatttttaaattaaattaaattagattaaatttttttttgagacagagtttcgctcttgttgcccaagctggagtgcgatggcgcgatcttgactcactacaacctccgcctcccaaagtgccaggtttacaggcatgagtcatcacacctggacaatttttgtctttttagtagagacagggtttcactatgttggctaggctggtctcgaacccctgacttcaggtgatccacctgcctaagcctggcaaagtgctgcaattacaggtgtgagccaccgcgcccggccaatttttataattttttcttaggcttagtcaactgaagcagcaggagtggagaaggaaatgataaatttataactggttctgatcaattaattgtaaaaagcgctgcactccaaccagccctctgctgtacatttgacatatttctacctttaggtcagacctccattcttcctgatgaaataacgaagacaccgtcttcctgacagttgatactgtacccacaggctgcgggaaggacatcacaaacgcaggcagagggcctgccataggtgtttaccaagggtgattcatgggctcagggaataaaagatattcctatcagttgagggccagggcttt

SEQ ID NO: 1242953 - DNA, 4001 bp, Homo sapiens
tccctcccctcttcgtcctgatcgttctgaaatcaggaaatagtacacattcgggagaaataaagaaggaagaccacggaggtcccagggagagccgcggcgggtgggcgccagcactgctcccccctccgcaaaggcctaactgcaccccttctccaccacgcctgggtcccgagtgacccccgctcccgccccgggagctgcacatccctctgcctcttagagaccctggggtcggtgcaaggatccctgcggcccagcagtggccccgagacagccggggcgccctcctcccgctccgcctccccaagcgcccgccgcccacggacaacagagaccaggtggacgctgcttcgttcattggtttattggcgcattacgcggtaagtggggctggggaacctccaggacgggggaggggccgcagcctgtcctgggggtcccggaggcggcgctcagcggtacttctcggtcaggacagaggatacgaccgataggaacttgtcccaggcggcgtgggcctcggccgtgaagtcggcggggaagcgcgcggccagggtgaccagcaggcagtgggacaggagctgggggcgggggcggctcagtgagggggcggggcctagcccgggccccgcccggcgacccccgcatccgccccgcgaccccgcccctccccgcccctccccgccccgccccgccccgccccgcccgcaccgcgccccgccccgtcccgccccgcccgcaccgcgccccgcgcaccttgaagttgaccgggtccacgcgcaggatgtaggcgtgcagctcgctcagcttggacagggcgccgccgatgtcgtcgatgctcttcaccgcgtcgcccacggcggccaccaccttggagccgtgcgcgcgcaactgcgcggaccccgggtgcaggtcgaagtgcgggaagtaggtcttggtctgcgggtggctgaggaagagcctgggacggggggcgggggccgtgagctcccagcagcgcggcctcccgccacggcccacgcgccctgcggccctctccgagcaccgggacacatctgcgaccccgcagcaggccccagcccctcctcgcggggcccgggtgcccaggcagctgcccctcccaggctgccctgggctagaggccccccaggcctctgcagctcccggctgatcgccctgcttccgacgggttctgtgcagcctggtccccaaatctcccgccctccgcctccagcacgcctggtgcccccagcccctccaccgtctcctctggccacaggacctccctcccagccccagactgggttgcccgccaccccttctgcaggctcatgacctcccagcagcgttccagggaaggaaaagctccctggcccctcccaggggatcagatgctgggaatttgaagctgggacagtgccctgatcccagatgctgggactttagaggctgtagtgccctggctgccctgtaaggcccttcaggcctagaacgaaacctttcaccctctgcttgtcagaacctgggcctgtgcctgcccaggtctcagcgagcccagatggttgtgcaactcctaatcgttccctccttaccctgctctcctcactgagagggaacgctatctgtcctcactgtcccttcctcactgtcccctctccacggttccctcctcactgtcccctccccaaggtcccctcctcactgtcctctccccacagtgccctccccactgtctcctctccatggtcccctccccactgtcccctccccaccgccccctccccactgtccccactcacatacctggcctcccacccagtccctctggcagtcccgtctgacactcacctctccagagtctcggtgccgatggtgtcggcctgcgtggagatcttggcccacatggacacaatgatggtcctctcagtcttggtcagagacatggcggcagggtgggcagctgcactggagttgggcctgctcaggactggccttggtagtgctcagcccccagggtccccttatatacagggagctgggcccagccaggctgtggccattggtcaggtgaggggagggggctgcaggggtggtgtttcttatcagatccagtgacaaaggggccctcagggcctggtgggactggggtttgggggctatcactcctgttcctctcctgtggccttacagggggtgttggccagagtctgaccacagagtctaggagagataggggccccaccctcccaggaagtcactcctgcatttgtagtccagttctgcaccgtccttattcatttcagaatcacgacttgggggaaaccagaggagcagggcccagtaagcagcctcctgggaccaagccccacggtcggctgacaccgacctcaggcagccctgcccaaccacatgccagtacccttccactttgtctctggattcctgggtttcctccaagaaagcaagggttaggtccacccagcgctgaggggagatgtactggatctgtcccctgacaagcaggaggaggcagcaggtccggggacaaaggagaattcacctaatgtcatgtgctaataggcattgcaatattgctttccatattagttattgtaacataatgaggcaaatattccttttaatttttttttctttttttgagatggaatctcgatttgtcgcccagggtggagtgcagtggtgcgatctcagctcactgcaacctctgactccctggttcaagtgattcttctgcctcagcctcatgagtagctgggattacaggcacccggcatcatctctggctaatttttgtattttcatagagatggggtttcaccatgttggccaggatggtctcgatctcctgactcctgatccacctgcctcagcctcccaaagtgctgggattacaggcatgagccactgtgcccggccaattttttttttttttttttttttttttttagtagagacggggtttcaccatcttggccaggctgcttgaactcctgaccttgtgatccacccgccttggcctcccaaagtgctgggattacaggcatgagccagcgcgcctagccaatatcttttcaagtattttgtcttttttttgagacggagtctcgctctgttgcccaggctggagcgcagtggtgcgatctccactcactgcaagctccgcctcccaggttcacgccattctcctgcctcagcctcccgagtagctgggactacaggcacctgccaccatgcctggctaattttttgtatttttagtagagacagggtttcaccgtgttagctaggatggtctcaatctcctgaccttgtgatccgcctgcctcggcctcccaaagtgctaggattacaggcgtgcaccaccacgcctggcctgttttgcccatttaaaaattgggtggtttattctcttaaggatgaatttttagaattctgtgtatcgtctggaagcaatcccttgtcagatatgcaatttgcaaatgttttctcttagtttgtagcttgttagttcattctcttaatattgtcttttgtagagcaaaagttttaataaagtccaatttgtcaaaaaattttaaatgaatcttacttagtgccatgcctaggaactgtctgcctaaccacagaacacaaagagtttcacctatattttcttctaaagttgtatagtttatgtttatattgagatctacaatccattttgagatgacttttgtctgaggtgtgaagggcaggtccagattcttctgtttgcttgtttgtttttttgcctacagatgtccaattgttccagcactgttttttgaaaaagctatacgctttctattcagttggcttctcgcacttatttgtaaaaaatgaatggggcataggtttgcgggtccatttctgggctctctgttctgttctgtgtgtctatcctttaccacagccacagtgccttgattaacatagctctgtgatgtcttaaaattgaa

SEQ ID NO: 1242954 - DNA, 4001 bp, Homo sapiens
acccccccaactccccaaagcggggaggagatatttattttggggagagtttggaggggagggagaatttattaataaaagaatctttaactttaaatggtttggagaggcagtgatccccgactgactcccctgagctggagggagggagtgagtcagccagccgcgggggcgggggtgaggctctgactcacacattctcaatgcctggaactcagccggcaaggacctggctggccctaacagttttccagggaagatcttgaggagaaaccccagcatcccgcgcctctgccctctccaccatccccaaaagccccaggttccagactgaagccttcctttgctcagcaatctttattcagttcttcttgggggtgggatgcctcccttcccatgctcccacccctcccatcccagaactccgttgggctcagtgtcctctgttgagggaaggtcttggtgcccagatgcctactctgcaggagagggaggaaccttgtccctttgcgggagtcgctggtctcttctgttgtggggaagaaggaaggtgggaggggcactgtccaccagcactcagagctccattatgtccccagctggggttgcagggtaggggggactgggggtgtcccccagcctcagcagacggagggcctcagggatgaggctgccaggatagcgccagagaagcagctcagagcaagggctcctagaagaggaaatgactgtcagggcatggagctgaggctggcctagctgagcacctcccaccaggtccaggtccccaggggctcctgggttcccagcactttccaaagagccaagatgggaaacaacccagaggtcagctagagctaaaaatggcacgatgaggcagggcctgaggtcagctgtgaggaccgcctgtgattctgcagaaggcctggccagtggaggaacctacctgagtgggggcagggctggggagaaggtcatgggggggctgcagtaggggtggtcattgtgcaggctgagttgagagaagtgggtggccatgttctcctcagacagaaactgcttgcgcagaggctccctggggagagatggcagagaggcaggctgggatactgacacaggaggcagcctgttggggaccagaggtgacagagatcttgttgggagtccctccctgcccccaaactcactgctcctcctccaggcgccgcttggtgctcatgggcacagctcctcggagaggggagctgggaaaaaaagagagcctggtgcaccccaccctcttggccccttcccaaggatctgcccgcctaagcctgcagcatcagccaggagccccaagcccattcctgtctcagctggtgccggtccccgctctcctggaccatccagcagggtacctcggaagtctcgaccctcagccgcagccccagtcccatctcagctcacgcctaagccccgccgattcgccccaccccgtattcatcctgcagaccagtcctgagcacccagccaaagctcctgcggcccttggtcaggcccaccctggtcccctacacgcacctggcgtccaggccccaagtcacccccaaggcggcccgcgggaggcgctgggcccctccctgggggcctcgctgcaagggctgctgcaggatcattgggttttggggtcctgcgggtgggatctgggcgacaggggaggagtctctgagggcgtggccaagagaggatgggcgtggctttaggcgggcacagccgcgaggttctgcgcgggcgcggaagacgggcggcgcgtggcggaaggcaggcttgctcctcggggtgggggagggtatccggcttaagggggctgcggtggacaccacttcttaatgtcgggggtcttcgcggcgctcacctcggctcctagggttcgggacggtacgcaccagccaccttcgcgccgaaggcggtagggcgccacggagaggaaccgctctaggcacgtaaggcctcgtgaggttgcgtcgcgcgcggagcactctgggacttgtagttctggagatggagcgagctgtgccgctcgcggtgcctctgggtcaggtgagacggacgtggtgcgcgttgccttctggggtttgtagttcacgcatggctgggacggggcgggcagggaatcgtgccctgagccctgttttgcctgggctatttgtgggactcagactctgaccaggggggcgggatagtaacccagaagtgcttcaggggcttaacgcaagtcagagagtaggaattataaatcagtacgtttttctatgttggggtagtagaggtactttttttttttttttaattttctagttcttgcaaagcactttttttttttttttgagacagagtctcactctgtcacctaggctagagtgcagtggcgcgatctcagctcactgcaacctccgcctcccaggttcaagcgattctcctgcctcagccctccaagtagctgggactataggcgtgtgccaccatgcccagctaattttcgtgtttttagtagagacagggtttcaccatgttgaccaggctggtctcgaactcctgacctcaggtaatctgcctgccttggcttctcaaagtgctaggattacaggtgtgagccaccacgcccggccaaattttttttttttttttttttttgagatggaatttcactcttgttgcccaagctggagtgcagtggctccatctgggttcaccgcaacctccgcctcccagattcaagcaattctcctgcctcagcctcctgagtagctgagattacaggcatgcgccaccactcccagctaattttgcatttttagcagagacagggtttctccatgttggtcaggctggtcttgaactcctgacctcaggtggtccacctgccttggcctgccaaagtgctgggattacaggcgtgagccactgcgcccggccccacatttttaaattttttttgagacagagtctcactatgttgcccaggctgctctcaaactcctggcctcccagagcgctggattacaggcatgaaccaccacacccggcttaagcactgagtgacagccccatgtaaagctcttgtctatacactagctcatctaattgtgatggaatcttctgtgagctccatttgtcagttgaggaagctggcaggagaggcctgggtgcttgctcagaggtccctgaggcatcacctcaactctccccttcttcagtgtcttcttggagccacccatgggactgcatgggcaggtgctggcttggggcggggccgcctcaaaagaaggctgagaagtcaggacagtgggaggcctggcaggttttgggggaagcagggaggaatctgtggatgggaggtttcatacgtcccaggcaggcctcatccagtctttccctgcagacagaggtgttccaggccttgcagcggctccatatgaccatcttctcccagagcgtctcaccatgtgggaagtttctggcggctggcaacaattacgggcagattgccatcttcaggtaccctctgccgctgtccacccattagccctggcacttggccctcatgggacggatgcccccgtttctgactcctgggtcccctccgctgtccctgcagcttgtcctctgctttgagctcagaagccaaagaggaaagtaagaagccggtggtgactttccaaggtgggtatacctgtggagtctggcttcaggactttgggtgggattggctcactcagttctgcatttctctttagcccatgatgggcccgtctatagcatggtttccaccgatcgacatctgcttagtgctggggatggggaggtgaaggcctggctttgggcggagatgctcaagaaggtaaggagtcgagcttgggaaagggctggggtgcctggacccagagagagcctttgaggtcacctggtattttctcttttgaagggctgtaaggagctgtggcgtcgtcagcctccataca

SEQ ID NO: 1242955 - DNA, 4001 bp, Homo sapiens
tgtttgtaccctcttttagcaccctttgtcattaccattcattgtaatcatacacttatgtaactgtttggttaatgcttgtctccctcaatacactttaagatttcttaaggagagacattgccttgctcattaccccatgcccacagcttagctcagtgtctggcacacagttggcactttatacatatttgctatatcagtgaatgaaatataaataacaaacagagacagagctgtaagaactacaaatactaacctctactcttgccccctctgcagtccattctctgcacaaccagcagagtggtcttcacaaaatgtgttgcagcatgtcacttccctgcttagagttaagtcctcagccctacaccatcgtacagctcatccctctctccagcctcacttcctgtaattacccacccctgctcttctcagccacctacctaccctctctgctgtttaaccacgtcaagctgcctgctgcttcgcttctttgctgttgctgctccctttgtggggaatattcttccccctattttcccatgcctcctggctctctcaccctgcacatctcctttcacaagtcatctaaagagcacctttttttttttttgagacagggtcttgttctatcacccaggctggagtgcagtggtgtgatcatagctcactgcagcctcgaactcctgggctcaagcgattctcctacctcagcctcctgagtagctgggattacaggcacccaccaccatgcccgactaattgtttataatttttctacagacggggtcttgctatgttgcccaggttggccttggactcctggcctccagtgatcctccttccttggcctcccaaagcaatgggattacaggtgtgtgccaccgcgcccggcccaagagcacccaattcaaacttcccacccccaactcatcatcatctcgttttcccacagcaattctcactatttaatattatgttttacctttttactagcttcctgtctgtctccccatcaacatgacttgtgccaagacagggatcttggctgtcaacagatctcgctcaaaagtcttggctgctcaaagtcccctgcatctagaacgattcctgacacatgaactgaagagttcatccaagcaagggaccctaaggagggcttttggagagtgtaaaacgtgcgcaaggcgtgagggcaggacgcctgagcaggtggacgctgcaggtgaagcagccaggtggacagatgagatgcggggatactgggcttctccggagcctggagactggcttcaaatctctgcaaacgggagaccgggccagtgcctgatggcacacagaaggcgctgggtgaccgctgcgaccgcccgcagcccagacgcgggggaggccagcggtgggcaccgccccgcacccttcctggctcacctcagcgcgccggctgcagtctccctgacggccaggctggggtctagcagcagcggcccgaggcggcgcacggcgtctcgtcgcgccaggcccgggagtgccggccgctgctgcaccagccgggccagccctgcgcaggcgcactcgcggacctcggcgctcgggtgctggagctgcggatgagagcgaaaagggtcagaaggcgcgcaatgcgcacgcgcgcggggcaacctcgtctcgcctcccggcccgacggagccctcgcctcaccttttccagcagctccgccgccggcccgtcgtcctcctcgcctccggtcccattcgccgccgcagccgcctcggcctgacagtcgcccgtaggggagaactgaggtcgcttgaagcgcttcgtccggctcttgcccatggtgacgtgcgctgggcggacagaccaccgagagaggagggcaacagcaggcggtggaggctgccgcgccgttaacaaggtccgttgctgctgctcagctgggccggctgacggctgcagcacacatgggcaagccgtgcgcaggcgcacggcgcgtcgtctgccgggtcggggttggggcggggcggggtggggggaactggcgcacggagcgcgcaggcgtggaagagggcataggcggggccagcttcggcaaaggggcggagccttgtgggtttaccgggtaagtaggaggttggactagaatagtaacgccgacccgggcgagaggatcacttgaggccagaagttcgagaccatcttgggcaacataggaaaacactccactccctgtcctccccaccaaaaaaattaaaaattatctgggcatagtggcgtgtgtgtgtagtcccagctacttgggacgttgaagccggaggatcacttgaccccaggagtttgaggctgaggtgagccgtgatcctgctactgcactccatcctgggcgacagagcgagaccctgtctcaatcaatcaatcaagcaaccaataagttagtaacaccggctacaaataatcaaatgtgattaagaatacctaacttgcaaggttattgtaagttctgtaaagttcataaagttctgtaaagtgcctaacaccaagcctgatatatagcaggtactcaaaaagcattaaccacgattttattttgtgtccccagcacctcccatagctcctgtcgtagacagagactagttaatgttttggaacgaatgtgtgtctatatttgataaaacagaatcgcttaagaacctaatctccctgccttagtttcctcatcagtgaagtggggacatcgatagtatatacctcatggagttgttacgaagactaaatgtgttcatatgtttaaggtgctaagaacagagactggcagatactaagcactatgtaaatgtttggaaacgtatttaacaaagagattcttttgcagatatttgttgagtactaggtacagtgctgggcattggaataaagcagtaatcaagacagtttggttcctgtcctctctccctgtccttatggaatttacagtccagggagagatctgttgaatatataattatatgaataactttggttataattgtggtaaatactaagcagagggaaaagtacaggagaatcttaggtggtctttataattagacatgtaacgagtgagtactcaatatatgcatagctttgggtcaattttctttttttctttttgtttttgaaacagagtctcactctgctgtccaggctggagtgcaatggtgcgatctcggcttattgtaacctctgccttggagttcaagcagtcctcctgccttagcctcctaagtagctgagattacaggtatgtgccaccatgcccagctattttttttttattattatttttaggagagacggggttttaccacgttggtcaggctggtctcgaactcttgatctcaaatgatctgcctgcctcagcctcccaaagtgctagtattacaggtatgagccaccacgcccaggctcaggtcaacattctactggagaaaatttccattccatggtaaccctactgtcaaagagttgactgtccagtaagggaaattaattactatggcaaattttagagagtaacagaagtgtagctcatgttgcatttgggcctatcaaagatcaatcttgggctgggcactgtggctcacacctgtaatcccaccactttgggaagccaaggtgagcagatcacctgaggtctggagttcaagaccagcctggccaacatagcgaaaccccatctctactaaaaatacaaaaattagccaggcatggtggcatgtgcctgtagtcccagctacttggaggctgagccaggagaatctcttgaacctgggaggcaaaggttgcagtgagccgagatcacgccactgcactccagcttgggtgacagagcgagactccgtctcaaaaaaaaaaaaaaaaaaaaaatcaaccttggagccactaaatatatgttggtgggttttacttcctgtatattttatcaggccatcgatctgcctgccacccacctagtccaggca

SEQ ID NO: 1242956 - DNA, 4001 bp, Homo sapiens
aattaaagcaagctgtttaaacaaacaaaacagcaaaaagtgcatctacttatccatatacatcagaactttttgacactgtgtaactaaaccaaaataaatatactgaatgctgtgttcaccgtttttctgacggatgagaactttaaaggtaaatgctaatacatacgtgaatttggaaaacagtaccttttgtatatgtagggtcctgcatttattacagagttcaaccaatagaaaaggccggaaaaccacagctgccagtggttttgaattattttcccccttttaaaggcctaacttgatattgagtcttcacacagatggctgatttgaaaaatattaagtaaagcaaacaactattacaaagtaggccttctcatattatgccattttctactacagaaaacaaatgataagtatgtttcagccataataatttttagacacaaatttgtatacctgagaggtatttgtttacaatgttaggtcttcagactgaacagatgggagcggcattcctcatcaaaggaagaccttaaaaatcctccgccaaaatcctgccttttgccatatgatgcaaccataggctacacctgcttcaccaatttgtgtacccaatagtcattctcatggcaacacagccacccagtttcttggaagcagctatggtgaaactgaaaaatgtgccagggtgaattctagaggacatggaatgcaagcttactaaataaatatgcaaatttcaaaataacaactcagaaggaaaactcacttctaaaacattcttgaccatatgaaacaaaaacagacacaggcgctaccacaagctggaactcacgacttcactatcttttcctgcccggatgccctctcctgtgtgatgaagaattatgctcgtgggcagtgaagaacactgctgacacttacataatatcagagcagaaagtaaatacaggaagggccagcttacagcctcatcacgtggtggccagggcaggcggtgctaagggtgatgttgacagatgtgtcaaccaaaacaaagcaaggaagtcttgctaataatggagaggctgccgtcctaaaaccagactgaaggcgactcctgcctgcttcccttctcagtcgctcttggtcagaaagtgcacggggctccaccccgggactcggcaatggctgctcggtccagtgcgacagggaggggcacggcggaaggtggccagggaggagaagagccacgtcctgcttctgggtgtggggccttccgtccacagtgtctgggcggtccccaggtttctcaagccacggccccgggtggcacctgcccgctcctctccctgcagagaggctgcgttcagaaacctcattttgcagcacggatgttttcttacttctagccattggatgcaagcccaattaggaacaccgagttgcctggccgctgggggagaaacaggcttggagggtgaaatgactcgcccaaggtcaggctgctgattactgacggctactgggcaacagaggggcgcccgcgtcggcggggcagggaaggggagaccacagccctgggggaggtgaccggccgagcgatcgcagccgtcagcgggaggaggccacaggacagggcagccggacgtggcatccccagcagagggcggggggccacagcctaggggcgggaagtcggggccgctctcaccggacgctcggggtagacgcggctcaggtgggccttgaggtggcccacactccagccgcggtcgccactcagctccaagtcgcggtggcgctggttggggctcttcaccaggagcgtgacgggctcgggttcggtctcggactccatggcggcggcggcggtgtcggggctccgctgcgctcctaggtgccaggcaggcggcgtctcagccgcccgcaatctctgcaacgacagttcacgtctctggggcgcgcgcccccgcttcgggcgccttttatagaagccccgcgcccggctctgcggacagaacgctctgtggctgccgcccattggctgaggcggaggcactctcccaacgtggcccaatcggcgtccggatccgggtggcagagggcggaccgagcacgtgggcacgggctgatgcaacccgccgcgtctgcgtcacccagaggcgcggctgtgccccgggaacccgggttcggtggccatgtttgggtgcgctgcaggccgcgcggggagcttggtctgagacctgcgaggcccccagctcgggtggctgagggcgcccgaggcagggggtggggagtggggtatcctagcagaccccagtttagcagtctctgcaaattctttcctcacaaagccgcacccccaccctttttcaccccaggtgtcagtgcccacttccccttttcctgcctctgtggccccacgtggaaacctacggggaagcccgtcctacaggggaagcctacccactcgaaccctcaaagaacggctgggcgaccccgagtgcaagcccacctaggagaactccacgtgctcctaagaaagacaacgaaggagcaaggccagattttccttgggctgggaggatggaggcatccaggcagctgttgccaatttccctgggcctcagacttgaacgtttgggacatcaccctaatgatgattgacaagtcagccacagtcctgctcacactggagtccccctcaaaacgcgtcactttataagatactcacacatgcacccgttaaattggggctgagacgaggagggcggggttctccgattcctgaagtgggaccataaaggcctctttattgtaggcgttccctcctcctcctctgtaggaaaaaaaaaaaaaaaaaaaaaggcttgaaaaacaaaactgacattgccccggctccctccttgttccaacccccttgggacatctgttttttcaggtgttgtcaggagcttgtcaaggtcaggaaggtaacaggaggagcctggtctggttggtgggtatattcatctgctgcagctgccataacaaagtgccacaaactggatggcttaagacggggtccccaacccccctgggccacggaccactatgagtccctggcctattaggaaccaggcggcaccgcaggaggtgagccaccagcgaagcttcatctgtatttacagctgctccctatcgctgcattaccacctgagctcagcctcctgttagatcagggggcattagatcctcacaggagccgaaccctattgtgaactgtgcacgcaagggaactaggctgtgctccttacgagaatcgaatgcctgatgatgggaggtggagctgagttgctgatgctagtgctgagagtggctgcaaatacggattaacattagcagagaggtttcactgcacagaggccatcataaatcaattgcttgcagactcatatcaaaacactatcagtgagtggcaagtgacaagctgcatctggtggcaggctttacaatggcaagtgtatgtacttcagttgtacagctgcatctggtggccttaaaagtatgtttgaggctgggcgaggtggctcacgcctgtaatcccaacattctgggaggccgaggcaggtggatcacaaggtcaggagttccagaccagcatgaccaacatggtgaaaccccgtctctcctaaaaaatacaaaaattagccgggcatggtggcacgtgcctgtaatcccagctactcaggaggctgaggcaggaaagttgcttgaacccgggaggtggaggttgcagtgagccgagattgtgccatcgcactccagcctgggcaacagagcgagactccgtctcaaaaaaaaaaaaacaaaaacacaacaacaacaacaacaaaaaaacagtatgtttgagacaacttcaaatctccacgttctgggttaaagtctaggctttaatcctgagatggccacaaaaacactgaaaagcctgctttcatttccaacatcctttttttttttgagacagggtctca

SEQ ID NO: 1242957 - DNA, 4001 bp, Homo sapiens
tagagcctttagctgtgggttcccccttcccactgtcttcctcgtcctcgctgcttccactcaacctcttcccacccttaagctgggtcctgtcctcactcttcctctgcactgggggttctctatctctcccactgtcatccccactgctggctgcctctttctgctcttcctcgctgtctgagtctcccaagagcctctttgcctggcttttctgcttacagctcctctcctccctagctgactttctccggccattgctcctggttctgggtttccaatcccccttttcctcatcctcttctttctcttcctcctccacttcctcctctctctgctctttcttctgggctaggatctcctcttcactctcctgttcactttccttcaggcttttagttcctttatttccctccaccttctttgctgtcctctgaacgggttctgcctcgctctcctcactttcttccctggcctgcttcctactgactgaggccttgcctggtgcctgcttctttaccacaggtttcttcctagtcttccccttgtaccccttttcctcctcctcactgctctcctctcccctctgtgcgggcaggtccctctgccgttcctcatcactgctctcctcaactgcctttgaggctcgccttggattctcctctttggctgggctgacttctgctgccaccccattctttgctgggggtccaaagtagtctgggctggaggcttcagagccggactctggaatatggagaggagagagggttgagacaggctcctcctgtcccttctcccttcacttcggataggttgcctcgagccctgccctgacagttggaggggcagcaggaaacagctatctgtacttgctgttcccggttcctgactcactagccttgctccctcatctaacgcctggggacataagagatgcgcagtgaatgcttcttgagtgaaccaacgatgcagaaggcccccacagcagggaggaagcactaacccgactctgaattgaagcggaacctttttctctccgggtcgctacaaggggtgggaggcctcttgcccttcttggtaaggtccagtttgtcttccctggaagcggcttcatccacctgtgtgtgcgccaagagggcaaactatgcaccaaggctgcgctcaccgcgccccgtcaggcccctcctcctcagcagcaagccccgcctccgcctcccgcggcccaggctccggcccggcacacctgcatcttcagcagctcctcctccaccagccgcttcagtgcctgcttctcctcgggctccaggtggctgcggcccgagtgagctaagtacctccgccgcacgatggaatgcgtaagcgtgctgcagggacatggtgtcaggacggagtcccgacccacccgcgccctttccaaccccatctccaaccccctgggcacctgaggtccgggcggcctcggaagaagctacgggtgaactcctgcatctccttctcccgcgccattttgctcaacccgggattgacggctcccgcctttttttcttctcggcctccgtcagcgcgtttgacagcggctcgcgcacgcgcagtgctgcggcaacgtggggcgagggaccgttggcccttggccgcggaccgcgtgggccgagaactttgccagacgagacttgttttctctgggcagttggagggtctcgcggctcctacccttttttggaacggatcattttaaaagttctcgttagaaaccaattcggcgccggcaccctttgggtgaaacctaatcagcccgcgacgctgcctttctcactggtcacgggcaacagctaggctgctgttatttcgcaaggcagaagagaaaaggcatcctcgcgagcagatgaggaacctcggggataaatccttttgtggcttcaagtgtctaagtacattagagtcaggaacggcgctttccagcgtccgccatttttgtggcgtcaccgcgtcgctgctacgccatccccagcgcagtggctgccgcgctcctgtcccagtgtcccccgggaggtcggcccgtgcggtgacgcccctgagcgcggggtacgccgggagttgtagtcctgacggcacagccttgcagcgtctccggaagtggaggcgggagcggcacggcagccactgcttggggtagcgggagggcagactctgggcgccactcccgggccggtcatgaacgggccggcggacggcgaagtggactacaaaaaaaaataccggaatctgaagcggaagctcaagttcctcatctacgtgagtgctgccgcgggaaggctgtgggggatgaggcctggcgcggacaagatctcagtttacccaggtgtaaagtgggtggggcgagcggccgctggttccggggcccttcacggaggaccgttggcccagcgcaccccttgcccgtgatacaggagcacgagtgcttccaggaggagctgaggaaagcgcaaaggaaattactgaaggtgtcccgggacaagaggtgaggcacgttgcaggggcggagggcgatgtgcttcctaggaaatctacattcggaccccatccccgagtagggccacaagtgcatgggctctttcaagtatccgatgggccagctgggagggacaggtacccaggaggacattgctgcgctggaaaatcactgtccgtgtctccttccctcccctcagtttcctcctagaccgacttctgcagtacgagaacgtggatgaagactcttcgggtgagcaaggtcttcaaaaattggtggagagcatggttcctggtacttagcaagcttcctgggcccccgccttttaggcagtggtggctgatgcagcccccagtggtccttaagcctagttgcttgccttccacctccaccgttctttcattcaggcacttactgagcacctattgtgtttcaggcactgtgcttggcacaggggatacagcagaggcagagataggcaaagcccttggcctcttgtaatttatattctagttgggaagaataagtaaatgaagacaatagactagaattttaggtcataggaaggacttgaaggtaatgaaaacagttatgcggtaatgattatagtagaacaggggttgatgaattgtttctgcaaagggccagatggtaagtaagctttttgcaacatacaatctttgaagcacctactgaactctgccattgtagtagcagccgtaccccataggcaaatacatgagtatggctatgtttctataaaactttataggcactgaaatttgaatttcatatttttccatatgaaaaatttttctttagttttttttttttccaaccgtttaaaagcttaaaagccattcttggccaggtgcagtggcccacgcctgtaatcccaacactttgggaggccgaggtgggcggatcacaaggtcgggagttcaagaccagcctgaccaacatggtgaaacctcgtctctactaaagatacaaaaattagtcgggtgtggtggcgtgcacctgtaatcccagctactggggaggctgaggcaggagaatcatttgaaccctggaggcagaggttgcagtgagccgagatcgctgccactgcattccagcctgggtgacagggcgagactccgtctcaaaaaaaaaaaaaaacgcccttcttagcttgcagaccacacaagcaggcagcaggcaacctctgaatggagtactcaagaaaggcctttcacagagtgacatttgagttgggaccagagaagaaaccagccttccatcctgggcaacatagtgagaccccatctcaattaaaaaaaaattagccatgtatagtggtgtatacatgtggtcccagctacttgggaggcagaaccaggaggatcccttgcctgaaaggtcaaggctgcagtgagccatgatagcaccgctgtgctccagcctgggtgacagagcaagactgtctcaaaagaaagaaaccccatcc

SEQ ID NO: 1242958 - DNA, 4001 bp, Homo sapiens
ggtagctctagctgtccaattttacaagttttcaacagacttgatgaggggtgagctaaaggcggtcaatgctttattgtctgtaactcactggcactggcatttctagagttgctcacgttcccccttttggtgactcacagcacttcaacatgttgccacagccaaggaaaaaaggaaatcaagtcagacaatggaggaatcacaggatttccctcttcacatccccaggtagatgaggtcattcaatgagtgtgtttccaaggctccacaaattcccacaccctcaccagtgtttaaacctgaatgttttatctgataactttttctaatttcaccaagtaagcttatatatgtcttaactgtgaactcctgataagcacaaattttgtcttgtgataatttatttttttcttttttgagacagggtctcactctgtcacccaggctggagtgcagtgatgcgatctcagctcactgcaatctccacttcgtgggctcaagtgatcctccaacctcaaactccccagtagctgggattacagacacgcgccaccccgcccgtttaacttttttgtatttttagtagagacggggtttcaccatgttggccaggctgatctcgaactcctgacctcaggtgatccgcctgcctcggcctcccaaagtgctgggattacaggagtgagccactgcaccggccagcgtttctttcttcaatcacactccaccttgtctggtttgtagcgccatcaacaaaacacagtacgtaaggatggacagccacaggccacgacaaccggctcatcagaagcgattttttttttttttttttttttttttagatggagtcttgctctgtcgcccaggctggagtgcaatggcgtgatctcggctcactgcaacctctgcctcccgggttcaagcgattctcctgcctcagcctcctaagtagctggagctacaggctcacgttaccatgcccggctgatttttgtatttttagtagagacggggtttcactatgttggccaggctggtctcggactcctgacctcaagcaatccgcccgccctggcctcccaaagtgctggaattacaggcgtgagccaccgacccggcccagacgcgatttaaatggcatgacacaggcaggcctcgtgcaaagactgcaaggaggtcccggcagcttttgcagggcaattaatccacccagagcactgcgctcagaaagtaataggtaaacccgcgtccggactaaccggctgcccccacacttgatccctcccagtccgactctgctccagggcgtaccagggttcactcgtgaagtcacgacacccactcaaggggcacttcctatagagataagggcattagaggaagggcagagccccggtcaatgccaacagcccgggaaacagccaagccgggctccaatctctgccggcatcccctgtctgcaccgccgacgcccccagctacgaccccgggggtcacctcgcccagcatagccgtgacgctgggagagggtgggcccaacggggacgccaaagagagccattcaggcctccccgcgcccccggggagacgacttctggagagcggcgtccgcggtttcgccctcccctgacagcccctccacgcccttcttcgtccttctgcccggcctcacccagcttccggccgcccccggccgggtctcccctcagaccggcgcaggggacccaaagggctgtggcccggccaagcccaggtccgaaggcctggaccgaggcagggcccgcgaaggacgcagcgcggtccgagaagccgggcggaaggaaggccccgggagggcgcggacagctcacctgccgcaggtcgctgtcgcctgtccgccagcctccagtcagcgtgcccgtcagcgactccctcaggcgccgcagtccctgcagcccagcggactggcgcgaggccggcgcaacgtgggcacgcagcgcggggcggggcctagagatgacacgccccttgtagctgacacgcccttgccgggggcgggaagcggagtatgtggctttccccaggtctctggaggttgcaggctcaggctctgctcagcggggtaagtaggcgtgcttcggcaggaacactagtgttcacaagagccgaggtgtgtgagggtgcctcagggttgagcacttttcttccccagtgtggtttaatccttgtacatccactcagtgatgtaagaaatagggttgtcaaccgtggcaccacccacttggtcacttgccaatgcaatctgcgaaactgagtctcaactctgacacctcggttaccagtcttgtatctgatctccctgttgcattattcgcattcttcaaacagcggccagaatgacagaatgatttttctttttttgagaccgagttttgctcgtcgcccaggctggagtgcaatgacgtgatctcggctcactgcaacccccttctcccgggttcaagcgattctcctgccttaacctcccgaatagctgggattacaagcgcctgccaccacgcccggctaatttttgtatttttagtagagacgggggtttcaccatgttggccaggctggtctcgaactcctgagctcaggtgatccacccgcctcggcctcccaaatcactgcaattacaggccaccgcacccagcccagagtcattttttagttttactgaacacaaagaaattactgaaatcgtgggccgggtgtggtggctcatgtctgtaatcccagcactttgggagcctgaggcgggaagatcacttgaggtcagcagttcgagaccagcctggccagcatgttgaaaccccgtctctaccaaaaatacaaaaaaattttagccgggcatggtggctcctgcctgtaatcccagctactcaggaaactgaggcaggagaatcacttgaacccaagaggcggaagttgcagtgagccaagatcgcaccaccactgcactccagcctgggccacagagcaagactccaccttgaaaacaaaaaacaaaaacaaaaaaaaactgaaatcagtgcaagtagcagcaacttcagaagtgagttagggctgggcacggtggctcccacctgtactcccagcactttgggaggctgaggtgggtggatcactttaagtcaggagttcgagacctgcctggtcaacctggtgaaaccccgtctctactaaaaaatacaaaaattagccgggcttggtggcacatgcttgtaatcccagctactcgggaggctgaggcaggagaatctcttgaacccggggggcggaggttgcagtaagccgagatcgcgccactgcacaccagcctgggcgacggaccaagacactgtctcaaaaaaataaaaataataaaattttaaaagtgagttaggcaaagaaaatatcaagcggacaaggcctcaagggataagactcatggacatagctttaattatctttgcctgacgcccaatacctgaaaattaagatgttcatgcaagataaagaggtaatttttctcctcctcccagtcatcacccgtagcatccggttaagaggctctccacctcgctcattttggtctaactggatttacacaaactcactgtgcacgtgcctggggcgggcaaacccggaaacgacgccgagtcccgcgggatccaggaggagccaactgcgccggaggaggggtttcggccgacacgtcgggattggcggctgcagccaggggtcctccgacgctgggcttccgtgagcggcgctctgccaggtggggccggagctgcggggagggagttggcgcctagcgcgcagctccatccccgcctctgcagtggactcggccgcagaatcggggtcccgggctcctggaacttgtcccgcccaggccgcggcgaggaggtcactccagccggtgggacccgggccggggggcgggtgactggaaccgggggaggcgggaaggaggaggggatcgggcccaa

SEQ ID NO: 1242959 - DNA, 4001 bp, Homo sapiens
tggaactctgaggcagaaggatcacttgtggccaggagttcaacaccatcctgggcaacaaagtgagaccccctccatctcaaaaaatacattgaataaaaaagacaactgaatagcagttcaagaagtccaagacttttcttgcaggcttttttactggagaagagaagtgtgctcatctctagccatgttcaaatacaactgagcaagcagtgaagacagacaccaaggacagaacctgagacactgaaatgagttcaaagaaggggcctggaatcgactattgttgggacaatgatgagtcctggtagagccttcctattataactgaaataagcacaagactcgcccctgttccctgattgccacctcgctttatatgaggacaatgtgtcccagggctgagaagatgaggattctttagttccataagcagcaccaggagcgggaggggtgaagtcctgagtgaattctaaaatggttctggtgggatttttacagggacagaggctagacttcatgcatcccacagggctggctttaactaatgaaaccttgggtcatccctaggttaccatcaagcaaaaattattccaacactgaacaaccttgaaagcaggtgtcgtgtggataagtggagtcagtcatgtttcctttcatacaggcacaaaaattgtcacctgtaagcttcagcttctatcataaacaaggactgtgaatagcatttgggggtggagggaaaaaaagtaggtgattaagatgcatatgcagaactgtcattttgggaaacctgagagtgccatcagctcccaggtgctttcctctctataaacagcctgaagccttagaagccattcctggaggctggtactggtagctcacacctataatctctgtactttgggaggccgaggctgaaggatcacttgagtccaggagtttgagaccagcctaggaaacatagtgagaccccccgtctctacaaaaaaaaaaataataataaaataatttttttttaaaagaagccattcctgccttggcagaaggccctcaagttcacccaagagagcaccagactataagtctgacagacctgggtataccaggctaagtcactttcaagcaatgtctcactggctctgaagaaactaagatcaagagaattaacatgggcaagatcactcagagagctaatggtcaagttgagactaaacttgagtcattctgaatgcaaggtgactcctcctgtgtccctggctaatcctcattggttcctgcatgtgagattagtatagtgtcaccacagactgctagcaacaaggaaactgaagttatgggctacagaggcactcgtaccacactgcatttatgcatgcagtagagaggttaaactacagcctgtaatttgttgttttagtatgaaaagtgagcaagaggccaggcatggtgactcacacctataatcccagctctttgggaggccgaggcgggcagatcacttgaggtcaggagttcgagagcagcctggccaacatggtgagaccccaactctactaaaaatagaattattagccaggcgtggtggcgcacacctgtaatcccagctacacaggaggctgaggcaggagaatctcttgaacccaggaggtggaggctgcaatgagctagactgatccactgcactccagcctgggcaacagagcgagactccatctaaaaaaaaaaaaaaaaagaaagaaaagtgagcaagattctattatttctgagaaataagtgctcaggcccagttgaagattccgaagttgatgctgcttgtccctaaaacactcaccttggctcactcaaattacacaacaacctgagaagattgttccctggtgagatctatttttgatgactaacagggcaggccaaggctggttccagcaggggaggatggcataccccaccactcagtgcctgaaaagaggcaatcagacctgccagaccttagtggacaatgaagccaggggctccagagcatccctataccaaagggaggtcacaatagggtctgcacatctctatagcacccactgccatagtaactgaagagaaatagactaaactgtgtcaagcatgtattgagtatttaaaatctaagcagttctatctttctgcctactgaaatatattgtgcctcagaaatggtagtgcaatggatagaaagtatgttaacataaacttcctgtaaaattagtaactccataggacaagcctttggtcaatcgaacaaggtggctccaatttctcactctgggcctgcaaggtatctttacacgtttccacaggcctatagagtaaggtattattcctaggcttcttcacaatgactgcccagattctggtggggactgaaattggggaaaggaacaagcccagaccaagaaccagtaactccacatatggttggctcatcctacatagactgtgcctatggtgggacagaactagcagcagcagctattggacttgctcaaagaaggatggtcggctttcccagcactaccagcaggccctgcctacacccaaagagtggtaaggggaatggaatctgcttccttcttatcctctgactcactatcttaatgcacaaggcaccaagagtgcctaaaaaaaggaggtcctcaactgttttcctcccttagtatatagggcctgatttgcacatgaatgacaacgtcccataggactagtcgggcagagtgtccagaaaatatattgcagatgatgtgaaattactagcaattagctgtaaatgcagccctctcttctactctaaacaacttctcagaatgagagccaacttacagggataatgtttaacccaatcaaaccgagactggtcttgacctcctagcctcaacaatcctcccactttggcctcccaaagtgctgtgattacaggtatgaaccaccatgcctggccaaactttttttttttagacagtctcactttttcacgcaggctggagtgcagtggtgtgatcatagctcactgcagcctggatttcccaggctcaagtgatcctcctgcttcagcccccaaagcagctgggactacaggcacacgccaccacacctggctaatttttgtatttttagtaaagacagggtttcaccatgttgtccaggctggtctcaaactcctggactcaagcgatctgcctgcctcagcctcccaaaatgctgggaatacaagcatgagccactgcaccccacccaaacttatttttttaaaggcaaagcattcatcaacttcatggttagtaacaaattgtttggaacacatctcataaccacacttaaagagcagaaaatctaagtgacacagtgattacttagcaaaatgtacactagctttctaggaaagctttctagacactccagctcttcaaagaaacctttcaggattggagcgaagagaaaacagatcaccatgcattaccctgcccagtcaatgtgttaaattttcatagccttgttttctttttttttttttttgtggcagagtctcactctgtcgcccagactggagtgcagtggtgctatctcggctcactgcaagctccacctcccgggttcatgccattctcctgcctcagcctcctgagtagctgagactacaggcgcccaccaccacgccccgctaattttttgtatttttagtagatacggggtttcaccgtgttagccaggatggtctcgatctcctgacctcgtgatccacccgcctcggcctcccaaagtgctgggattacaggcgtgagccacagtgccggcccgacagccatgttttctagtttcctcaccagtatgtaactccccagacacagcctcccatcacaactgtcacttggctgtaactcactaactgtataaatggcatatgtgactattaatttagataaatatttaaatatttgtatttctgtatgtattatatgataagaagactgaat

SEQ ID NO: 1242960 - DNA, 4001 bp, Homo sapiens
ccctccacgcccttcttcgtccttctgcccggcctcacccagcttccggccgcccccggccgggtctcccctcagaccggcgcaggggacccaaagggctgtggcccggccaagcccaggtccgaaggcctggaccgaggcagggcccgcgaaggacgcagcgcggtccgagaagccgggcggaaggaaggccccgggagggcgcggacagctcacctgccgcaggtcgctgtcgcctgtccgccagcctccagtcagcgtgcccgtcagcgactccctcaggcgccgcagtccctgcagcccagcggactggcgcgaggccggcgcaacgtgggcacgcagcgcggggcggggcctagagatgacacgccccttgtagctgacacgcccttgccgggggcgggaagcggagtatgtggctttccccaggtctctggaggttgcaggctcaggctctgctcagcggggtaagtaggcgtgcttcggcaggaacactagtgttcacaagagccgaggtgtgtgagggtgcctcagggttgagcacttttcttccccagtgtggtttaatccttgtacatccactcagtgatgtaagaaatagggttgtcaaccgtggcaccacccacttggtcacttgccaatgcaatctgcgaaactgagtctcaactctgacacctcggttaccagtcttgtatctgatctccctgttgcattattcgcattcttcaaacagcggccagaatgacagaatgatttttctttttttgagaccgagttttgctcgtcgcccaggctggagtgcaatgacgtgatctcggctcactgcaacccccttctcccgggttcaagcgattctcctgccttaacctcccgaatagctgggattacaagcgcctgccaccacgcccggctaatttttgtatttttagtagagacgggggtttcaccatgttggccaggctggtctcgaactcctgagctcaggtgatccacccgcctcggcctcccaaatcactgcaattacaggccaccgcacccagcccagagtcattttttagttttactgaacacaaagaaattactgaaatcgtgggccgggtgtggtggctcatgtctgtaatcccagcactttgggagcctgaggcgggaagatcacttgaggtcagcagttcgagaccagcctggccagcatgttgaaaccccgtctctaccaaaaatacaaaaaaattttagccgggcatggtggctcctgcctgtaatcccagctactcaggaaactgaggcaggagaatcacttgaacccaagaggcggaagttgcagtgagccaagatcgcaccaccactgcactccagcctgggccacagagcaagactccaccttgaaaacaaaaaacaaaaacaaaaaaaaactgaaatcagtgcaagtagcagcaacttcagaagtgagttagggctgggcacggtggctcccacctgtactcccagcactttgggaggctgaggtgggtggatcactttaagtcaggagttcgagacctgcctggtcaacctggtgaaaccccgtctctactaaaaaatacaaaaattagccgggcttggtggcacatgcttgtaatcccagctactcgggaggctgaggcaggagaatctcttgaacccggggggcggaggttgcagtaagccgagatcgcgccactgcacaccagcctgggcgacggaccaagacactgtctcaaaaaaataaaaataataaaattttaaaagtgagttaggcaaagaaaatatcaagcggacaaggcctcaagggataagactcatggacatagctttaattatctttgcctgacgcccaatacctgaaaattaagatgttcatgcaagataaagaggtaatttttctcctcctcccagtcatcacccgtagcatccggttaagaggctctccacctcgctcattttggtctaactggatttacacaaactcactgtgcacgtgcctggggcgggcaaacccggaaacgacgccgagtcccgcgggatccaggaggagccaactgcgccggaggaggggtttcggccgacacgtcgggattggcggctgcagccaggggtcctccgacgctgggcttccgtgagcggcgctctgccaggtggggccggagctgcggggagggagttggcgcctagcgcgcagctccatccccgcctctgcagtggactcggccgcagaatcggggtcccgggctcctggaacttgtcccgcccaggccgcggcgaggaggtcactccagccggtgggacccgggccggggggcgggtgactggaaccgggggaggcgggaaggaggaggggatcgggcccaagggacacgaggtgggtcgcgggaccccgatatctcgggacaggcgtcttgccgctccgggcccagccgcccccttcgacacatactcgatgcatagacaatgggggtgtcctttgtcgctcctggcgggaaccccggccccacccccaactccacgcctcccattacccccagatctctggaccggattcgtcccattctcgtcctcatggtggacaagaaactggtggtggttttcggaggcacaggtgagccaaaccccagactggggcccttgcagagccagggcgcctagccctgaagaccgcccgtcctggggtctgcagggaggggtaaggtcactgggacccccgacccaggttggggctgtggtcgcaggaacgaggcccaaattgctttccaatttttttttttttggacggagttttgctctgtcacccaggctgcagtgcgatggcacgatctcggctcattgcaacctttgcctcccgggttgaagcgattctcctgtctcagcctcccgagtagctgggattacaagggcatgccaccacgcccggctaatttttgtatttttagtagagacggggtttcatcatattggtcaggctggtctcaaactcctgacctcaggtgatgacccgcctcggcctcccaaagtgcaggtattacaggcatgaaccaccacgccagacctgctttccaaattaaaaaaaaatgagttacttaacttatttgaataggagtacttgaacatgataccaaaattaaatcttcttcctagcctcctcttccacctcatctattgctgttaccaagtttcttgaatatcctgccagagtagataacatgttatcattttttcaaatgatagcatattatttcattcctattttttcttatttatacatatttaatatctctaacagctttattgagatataattcacgtactatacaatctacctgtttaaagtgtgcaactcactggtttctagtgtattcatagaattgtacaaccatcaccacaatcaattttagaaaatttccatcactccaaaaagaaactctggcccaggtgcagtggctcaaccctgtaatcccagcactttagttggaccaaatgggcagatcgcttgagctgaggtgtttgagaccagcctgaacaacagggcaaaatctcgtctctacaaaaaaatacaaaaattagtggggcgtggtgtcatgcacctatagctacctaggaggttgaggtgggaggatcacctgagtccagcaggtcaaggctgcagtgacctgattgtgccactgcactccagcctgggcaacagagtgagacctgatctcaaaaaaaaaaaaaaaaaaaagaactccatgaacccgtgaacagttactccccattcttactcctcccagccaacccctagaaagctccaatctacttttggtttctatggatttgtctattcgggacatttcatatgaataaaatcataatatgtagccttttctctctggcttcttcagttagcatgttttcaaggtttgttcatgttgtagtgtgtgtccgggctttactctttttttttttttttttgagacagagtcccgctctgttgcccaggcagcagtgcagtg

SEQ ID NO: 1242961 - DNA, 4001 bp, Homo sapiens
tcaacaccatcctgggcaacaaagtgagaccccctccatctcaaaaaatacattgaataaaaaagacaactgaatagcagttcaagaagtccaagacttttcttgcaggcttttttactggagaagagaagtgtgctcatctctagccatgttcaaatacaactgagcaagcagtgaagacagacaccaaggacagaacctgagacactgaaatgagttcaaagaaggggcctggaatcgactattgttgggacaatgatgagtcctggtagagccttcctattataactgaaataagcacaagactcgcccctgttccctgattgccacctcgctttatatgaggacaatgtgtcccagggctgagaagatgaggattctttagttccataagcagcaccaggagcgggaggggtgaagtcctgagtgaattctaaaatggttctggtgggatttttacagggacagaggctagacttcatgcatcccacagggctggctttaactaatgaaaccttgggtcatccctaggttaccatcaagcaaaaattattccaacactgaacaaccttgaaagcaggtgtcgtgtggataagtggagtcagtcatgtttcctttcatacaggcacaaaaattgtcacctgtaagcttcagcttctatcataaacaaggactgtgaatagcatttgggggtggagggaaaaaaagtaggtgattaagatgcatatgcagaactgtcattttgggaaacctgagagtgccatcagctcccaggtgctttcctctctataaacagcctgaagccttagaagccattcctggaggctggtactggtagctcacacctataatctctgtactttgggaggccgaggctgaaggatcacttgagtccaggagtttgagaccagcctaggaaacatagtgagaccccccgtctctacaaaaaaaaaaataataataaaataatttttttttaaaagaagccattcctgccttggcagaaggccctcaagttcacccaagagagcaccagactataagtctgacagacctgggtataccaggctaagtcactttcaagcaatgtctcactggctctgaagaaactaagatcaagagaattaacatgggcaagatcactcagagagctaatggtcaagttgagactaaacttgagtcattctgaatgcaaggtgactcctcctgtgtccctggctaatcctcattggttcctgcatgtgagattagtatagtgtcaccacagactgctagcaacaaggaaactgaagttatgggctacagaggcactcgtaccacactgcatttatgcatgcagtagagaggttaaactacagcctgtaatttgttgttttagtatgaaaagtgagcaagaggccaggcatggtgactcacacctataatcccagctctttgggaggccgaggcgggcagatcacttgaggtcaggagttcgagagcagcctggccaacatggtgagaccccaactctactaaaaatagaattattagccaggcgtggtggcgcacacctgtaatcccagctacacaggaggctgaggcaggagaatctcttgaacccaggaggtggaggctgcaatgagctagactgatccactgcactccagcctgggcaacagagcgagactccatctaaaaaaaaaaaaaaaaagaaagaaaagtgagcaagattctattatttctgagaaataagtgctcaggcccagttgaagattccgaagttgatgctgcttgtccctaaaacactcaccttggctcactcaaattacacaacaacctgagaagattgttccctggtgagatctatttttgatgactaacagggcaggccaaggctggttccagcaggggaggatggcataccccaccactcagtgcctgaaaagaggcaatcagacctgccagaccttagtggacaatgaagccaggggctccagagcatccctataccaaagggaggtcacaatagggtctgcacatctctatagcacccactgccatagtaactgaagagaaatagactaaactgtgtcaagcatgtattgagtatttaaaatctaagcagttctatctttctgcctactgaaatatattgtgcctcagaaatggtagtgcaatggatagaaagtatgttaacataaacttcctgtaaaattagtaactccataggacaagcctttggtcaatcgaacaaggtggctccaatttctcactctgggcctgcaaggtatctttacacgtttccacaggcctatagagtaaggtattattcctaggcttcttcacaatgactgcccagattctggtggggactgaaattggggaaaggaacaagcccagaccaagaaccagtaactccacatatggttggctcatcctacatagactgtgcctatggtgggacagaactagcagcagcagctattggacttgctcaaagaaggatggtcggctttcccagcactaccagcaggccctgcctacacccaaagagtggtaaggggaatggaatctgcttccttcttatcctctgactcactatcttaatgcacaaggcaccaagagtgcctaaaaaaaggaggtcctcaactgttttcctcccttagtatatagggcctgatttgcacatgaatgacaacgtcccataggactagtcgggcagagtgtccagaaaatatattgcagatgatgtgaaattactagcaattagctgtaaatgcagccctctcttctactctaaacaacttctcagaatgagagccaacttacagggataatgtttaacccaatcaaaccgagactggtcttgacctcctagcctcaacaatcctcccactttggcctcccaaagtgctgtgattacaggtatgaaccaccatgcctggccaaactttttttttttagacagtctcactttttcacgcaggctggagtgcagtggtgtgatcatagctcactgcagcctggatttcccaggctcaagtgatcctcctgcttcagcccccaaagcagctgggactacaggcacacgccaccacacctggctaatttttgtatttttagtaaagacagggtttcaccatgttgtccaggctggtctcaaactcctggactcaagcgatctgcctgcctcagcctcccaaaatgctgggaatacaagcatgagccactgcaccccacccaaacttatttttttaaaggcaaagcattcatcaacttcatggttagtaacaaattgtttggaacacatctcataaccacacttaaagagcagaaaatctaagtgacacagtgattacttagcaaaatgtacactagctttctaggaaagctttctagacactccagctcttcaaagaaacctttcaggattggagcgaagagaaaacagatcaccatgcattaccctgcccagtcaatgtgttaaattttcatagccttgttttctttttttttttttttgtggcagagtctcactctgtcgcccagactggagtgcagtggtgctatctcggctcactgcaagctccacctcccgggttcatgccattctcctgcctcagcctcctgagtagctgagactacaggcgcccaccaccacgccccgctaattttttgtatttttagtagatacggggtttcaccgtgttagccaggatggtctcgatctcctgacctcgtgatccacccgcctcggcctcccaaagtgctgggattacaggcgtgagccacagtgccggcccgacagccatgttttctagtttcctcaccagtatgtaactccccagacacagcctcccatcacaactgtcacttggctgtaactcactaactgtataaatggcatatgtgactattaatttagataaatatttaaatatttgtatttctgtatgtattatatgataagaagactgaatccctccatctgaatgaaagtttgtagaaattgggttcaa

SEQ ID NO: 1242962 - DNA, 4001 bp, Homo sapiens
ccaggcagcacaaacaaaaaggaaacgtactaaatgcacacaactgggacagggctggggatgcagtccctccccccactgatgtgggtggtgcaaaactctggccaccaggaaccagaaaccggattcgctctgagcactagtttaaactcctggtcccacatcggtgcagacctaggcataataatcactgttccatggatgaagggctgtttctttgagacggagtcttgctctgtcatccaggctggagtgcagtggtgtgatctcggctcactgcaagctccgcctcccgggttcacaccattctcctgcctcagcctctcaaggaactgggactacaggcacccgccaccccacacccggctaattttttcgtatttttagtagagacggggtttcaccgtgttggccaggatggtctcgatctcctgatctcgtggtccacctgcctcggcctccccaagtgccgggattacagccgttgagtcactgcaccctgccacgggtaattatttggttacaagtattactgaatactgacctaactccctcaaatctaaagggttttttttttttttgagacggagtcttgctctgtcgtacaggctggagtgcagtggcattatcttggctcgctgccacctctgcctctgggttcaagtgattctcctgtctcagcctctccaagtagctgggactacaggcacacaccaccacgcctggctaatttttgcatttttagtagagacgggggtttcaccatgttggccaggctggtctcgaactcttgacctcacgtgactcgcccacctcagcctcccaaagtgccgtgattacaggtgtgagccaccacgcccggccaatctaaagggtttttatttttagcaagttggagcaattcttttacttagtatttattcaatatagtatttgtcttcacttgatcatagccaaaaggctgagaagcaatatagtattggtcttaacagtcatggcacacatattctcttctacttctctggcgaggctgtgccacagaggggctcatcatacagaaaacctcaggcatctgaagacccaaacttcacaatgcaagtttactgctcaagtggcacgaaagaccttgtaagctctgtccctctaattcatgcgagtcccaatacccaaagagtgctttaaaagttcaaaaacataagaaaagtgtgctcagtgttcctggctattaaagctgagtcaggatatcttcgtcccaatccacttcttcctacagcgaagcccaggagcgccatccaccttcccaggagatagaactgactcttccccagacgccctggcactttccaaaggaagtggactcacatgaactagtggaagcgcggccatgggcagggcacaggccacacacacaccagggacacgggcacacggccacacgcacaggagcgggggcatggccagacaccccccacgaacacatcgccgcacaccccttagggacacccccccgggaacatggacacgcatcccacagacaaaatgggccgcacccacgggcacaccccgcccccaggaaaccccccacggaacgcaccacacggaacgcgggcgcccaggcgcgagggagcgcagcccgccctccacacagctttgttcccagagcccgggcgcccctccccgccctcggcctcggtcgcgggcagctctccacagcccgggcctcagcgagcggcccctcgggcttcgggcctcggtctggcggcggcgcagaaaggcgggcggcggccccgagggcctctgtgaggtcgccctgccccccaaccccaccccaaccccacacggctggtggacgccctgggctggcccgctcccgccacgtggtcgcgctatccgcccgcctcccgtgtgccccgcgccgcacctggagccggcgcggccgccctcgctatccgggacctggaacatgtcgaccgccgccaccctcagctcgccgcgcgccgttcccgcccgcccagcgcaggtactcaaggccgcccgccagcgcccattgggcgccaagacgccaatcatccctccgcagcctatctcagcgcggccaccgcccctcacgcccacccccgacgacttaggctttgaacggtcggcgccgcgcccgcagccgattggggaaggcgacgccgctcgcggaggtgggagctcgcattgggcggcgggccgggcgggccctgggacggccgcgccctcgggaggaagcccggtctgcgggagcccgcgagccgaccgcggggccgcacctgggccgcacctgcccgaccagggactgcgggcatgggcgcgcggccctgaagaacaggcacaaacgacagtccttagatcaacattagtatgtatttatgcacaataaaaacatttacaagttgaactggaaatttaaacagaagtttaacagctcttattatattaaataaccaaaacaccttttattcccaaaattggtaaagaataaataatataatttacaatatggtacaaaaaataaccaggaaaggcaggcattctgctttatacatacactgtatatgcatatttataatctataaaacaaattcatatctgaaacgagcggaggcctcgctatggcttaaccgagtaagagagagaaggggagcggggcgcgggaggcagggccaggggctgggctccccacacctcacccaccccaaggacacgcagccactgtgacatcaggagagcgctgacagccgcgaagggtgtgctgtgggtttttttccttcgttgtaaattactctttccttgctttctttttttaacttgagacccagtttcgctcttcttgcccaggctggagtgcactggcgcgatctcgactcactgcaacctccgccgctgaggttcaagtgattctcctacctcaagtctcctcagtagctgggattatgggcatgcgccaccacgcccggctaattctgtacttttagtagagacagggtctctccatgttagtcagggtggtctcatactccccacctcaggtgatccgcccgcctcggcctcccaaagtgctgggattacaggcgtgagccactgcgcccggcctccttccttgttttcttaagacaaagtgctgtatttcctgacaaatgcatcggctagagctcaaggtttaaagagaaaacacaactgtcttcctcctccctcattcccggtgtcttatgccccacaactttctttgcagaagaaattttgaattcaatgctgtgatctaattaaagatgctattaaactaaaaaggttatccaccagaaatgaggccacggcctctcatgcccagaacctggaggtgcggcaaagcaaggaggccaaccgcggaaacgccgccaacaccccactccctgagctggcaccctacagctacaagacacagaaggacaaaacagccaggaagccacgaactaggcatcccccgaggcacgcaatgcccgcttatcactgcacatccacaacagaattgaggccagaggactaacttccctggaccacagatgctctgtcccaatctccagaaaagacgaatcaacagaaagatcccaggcaacgtcagagggattcaggaaagctttttctaagaaactgatctcatcttaattacagcatgctcaaatgcacaaaggaagccacaggctcatacttagacgatcaccgcttctgttggaaaggcagaagatgcaggaagtctctgtttggatcttttgaaaattccagcctttaacagttgcctatgtttgcacataaatattcatttaggccagaagaaaatgtatccattgtttttctgcaacaaatgacaccattttcccttaatgtggcaagcaaatgcgtatcacctgtctagttactagagaagcagaatcctctagaactcttgtcagctttattacaggagaggagtcagcccgtcctcctccctaacccatctcccc

SEQ ID NO: 1242963 - DNA, 4001 bp, Homo sapiens
gtagtagttcttacactggtagcgaaccgagtgctccacatagccatgtgcaatctcggggggcttcgggcagccgtcatctgcaaagagagagaagccagagagtttgctatttggaaattgttcccagtgaaccgtgaaaagtcagatgagcgggagctgctctgcacatcaatctccttccaccccgaatagaagccaatggaaaggcaagctcccctcatttctggcaggaaccccaatgttctttatggtcctgaaagcccagaggtcgagataagaagggggaattgggtgttctcagagagagtgcagacccgagagggtcagagtgggatgcacactcctacccaaccaaagactgacctgcgatatccgtgacatcattgcctgagtccactgcaaaaagctgtccccagagcaggagggcaatgacagctcccagggcactgcagagagaagacaaggaggagtggaaagctagtctccctgcttcacagcacatgcatgcatccacacacacatgcatgtacacacacacacacacacatgcatacacacacactcctcccacttagcagccagaaaagaaagtcgatatatggaagtgctaggaccaagaaattgcccccacacctgcccatacacactttagcagcttctgagcataccaagcttccagcaagccctgtcctgctgggaattctgcagaagcttcagagagggatagaaaggcacataggtggaggggtgggctcagtttctggctgcattcaggaaagtacattggcaataatacaggagccctccaggaaagagaaacctccctcagacaccgcaaagatagtggtaataaaatgtagataactcagagatgggaactttgggcttactgtgctattcctctacttcttgatattttccgtaataaaaggttccttaaatatataattttaaacacgtgggtatttctagtattttataataattcacctttaggaaatggtatctgaaaccccaaaatgccagaaggttacctggaagagaactggtgtccaaaagcaggacggtggccatgggcattgacccacaggtgccgtctgccagttcaccatctcactaacaaatgccaaccattcgggcactacttgcttctattaaaatagtttctaggccagacacggtggctcatgcctgtaatcccagcactttgggaggccaaggcaggcagatcacgaggtcaagagatcgaggtcatcctggccaacatggtgaaagcccgtctctactaaaaatacaaaaattaggtgggcatagtggcgcacgcctgtagtcccagctacctgggaggctgaggcaggagaatcacttgaacctgggaggtggaggttgcagtgagccgagatcatgccactgcactgcagcctggtgacaaagcgagactccatctcaaaaaaaaaaaaagtttctagtcttattatttcaacatttcaaaaagtgtttatttttataagatctaagtgccttaattagatgtatcccaggtattagtgtgtatcccaggtactagtcaattaattgtgtcattcaaatgtgttactattagtcttccttattgtacatttttaaagaggaaaatatctgctaataaatatactcaggatgccaggaagcctaccacgggagctgatgacataccctataaagtcaaaaatgtaacctgaaggaaaaagacactcctgagagtaaatcttatctcctgggaaagacagcagcactgtcttctatggatgcagaaaaggagaagatttaacacactaagccctttggttcactataatttagcccatttgcccgtttctttgttctatttctgcatctctaccgatgtatgcaaaaaagactgaaataaagaaccagaggaaaggcaggagggaaagctgtggacccacctcatcttggttggtcttgcctctggaagagcagtgctgtggggcatctgctggtctttttatgctgccactagctcacttctcccccttctccatttcgtaattcctgtgtctacaaactttggccctggtaaggtcactatcttttccagtaacaaaaccacaaacaatacccctgttaagagttgagctcttgcttcacacttgattttcttgtgatgttctattacaaatcccaagaaacctggcaactctatgacccacaaacctgccaaagtatttcctgaaatcagcaactgggcaggacagggcggcggcaggaaccatcaatctgtctctttatcttggaggattttcacactgcagaaaggctcattttgagttttttcaaacccattgtagacatttctgcagcctagcttaggtggggctctaaagaaagtacttccttttcacagtaattttctccaccttgtgtgtggccatctccctattgcttaaaagctctccagcctgaaatcagtaaatgtgtttattgtgtcttctctgattgctctttgcaagaaatcacacaactagttaaagctatagtgtagactgacacagactatactcaatggcagtggttctcatggttttatagtctggtgattagcctaaataggcagatgagaaaaatcaatatgtctcagtcaaatgtctgcacctgtgtgtatcccaggtactagtcaactgaaacttagtagcaactcaatacaaggttgatttattcattaaaaagggttagttgttcttaaattagagtgtacaaaagaattacttttggataatcatggtgacactgatataatagcaaagtaactagaaacaagacaaatgcccatcaacaggaggaagggtcaatactgcattgtatgtggatataatggaatattatacagcataaaatgaataaactctgcaagaacatggatcatcttataaacataatttttgaaagaaaaccgcaagtttcagaagattaccttcagtatgatggcagtcttctagagatcaaaaccaagtaaaacttggcaatggattcttagataatgacaccaaaatcaccagcaatcaaagaaaaattagataaattgggcttcatcggaatgaacatttgtgtatcaaaagacagtattaataaaatgaagacaggccaggcgtggtggctcacgcctgtaatcccagcacttcgggaggctgaggtgggcggatcatgaggtcaggagtttgagaccagcctgaccaatgtggtgaaattccatctctactaaaaatacaaaaattagccaggcatggtggcgcatgctttaatcccagctactcggaggctgaggcaggagaattgcttgaacctgggaggcagaggttgcagtgagcctagatcgcaccactgcactccagcctgggtgacagaacaagactctgtctcaaaaaaaaaagtgaagacagtctacagaatgggagaaaatatttgcaaattctatatctgataaagggttgttatccagagcatatcctaactacaacaacaaaaagacaaacaattaaagcatgggcaaaggatttaaatagacatttctccaaaaaatatacataaagtgccaaaaagcacataaaagatactcaaggctggggagtgactcacacctgtaatcccagcaccttgggaggccgaggtgggtggatcacctgaggccggaagtttgagaccagtctaaccaatacgaatatggtgaaaccccatattttctaaaaatgcaaaaattagtcaggcgtggtggcatgcatctgcagtcccagctactacttgggaggctgagacaggagaattgcttgaacctgggaggcagagtttgcagtgagctgagatcgcaccactgcactccagcctgggcaacagagcgagacgtcgtcaaaaaaaaaaaaaaaaaagtcactcaacaccattggaaaatgtcaatagggaaatttgcaaatcaataccacaatgaaacaccacttcacacc

SEQ ID NO: 1242964 - DNA, 4001 bp, Homo sapiens
ccactttcctcctaggaatattttaagtcccgcttagcattgggaggactatataaaccccaacatcaggatccttcagagaaggctaagccgtatgaggtaaccatagacccacagattggactcattcactccacacagcagtagcacttgttaccattcatgaactttcagccaccagaatatagtgaccaccaaggaagtactttgtcactcctgcgacatttcttaccttggtctgcgcacagagttacctggccaccatagtgttgcaagtctttttctccccacgttgttgagagtctggggttattcatcagaccaggtgggtctcgattccttactcatgaggccactgcaacaaggcagtgggatgtgtctcctcacaagaggtgatcaaagaccctttcccggaggacaatgttttccctgtatgggccaccaaatttgttggaaacaaatgctcggtgctgcaaagaagaaccaacactgagccaaaggacaaagggtctctcagcaaggcaaatttacttttgcagaatagagctcctggtaagtctggttgccacgagagcaccctaaacaaaggaaagcagaggtttttatgtctaacgcagcttgtccctgctactgtgtcctgactccattggctggagttggactgcacaatccgaacccggttggctaacttgcaaagtgcaggaatgtggttgcactggtgggaaggcgggaagatcagttttggtgggagaggctattgcgacgggagaggtaaatcacagagtgggtagcagatgtggaatgtgggctgtatgggtaaggactggcaggaaggttgtttaccagggtaggggaaacacagagagtaaggaagtctggccttgaaagcaggaaacaaaggacaaggaaacttaagcaggctaaacttttgaagaagaatttcttactgtatttaacaataattttaaacacttatgtggttatttctagtattttgtgataattcacctttaggaaatggtatctcaaaccccaaaatgccagaaggttacctggaagagaactggtgtctgaaagcaggacggtggccatgggcattgacacacaggcgccatctgccagttcaccatctcgctaacagacgcccaccattcaggcactatttgcttctattaaaatagtttctaggcagggtgcggtggctcacacctgtaatcccaacactttgggaggccgagacaggtggatcacgaggtcaagagatcgagatcatccgggccaacatggtgaaccacatcgctactaaaaatacaaaaattagctgggcgtggtggcacacgcctgtagtcctagctacttgggaggctgaggcaggagaattgcttgaaccggggagggggaggttgcgatgagctgagatcgcgccactcactccatcctggtgacagagtgagactctgtctcacaaaaaaaaaagtttctagtcttattatttcaacatttcaaaaagtctttttattttttaagatctaagtgtcttaattagatgtatcccaggtactagtgtgtatcccaagtactagtcaattaattgtgtcattcaaatgtgttactattagtctttcttattatacatttttaaagaggaaaatatctgctagtaaatatattccgaatgccaggaagcctaccacgggagctgatgacataccctacaaagacaaaaacgtaacctcaaggaaaaagacactcctgagagtaaatcttatctcctgggaaagacagcagcactgtcttctatggatgcagaaaaggagaagatttaacacactaagccctttggttcactataatttagcccatttgccctgtttctttgttctatttctgcatctgtaccaatgtatgcaaaaaagactgaaataaagaaccagaggaaaggcaggagggaaagctgtggacccacctcatcttggttggtcttgcctctggaagagcagtgctgtggggcatctgctggtctttttatgctgccactagctcacttctcccccttctccatttcgtaattcctgtgtctacaaactttggacctggtaaggtctctatcttttccagtaacaaaactccaaacattgcccctgttaagagttgagctcttgcttcacacttgattttcccgtggtgttcttttttgttttttgttttttttgagacagagtttcactcctgttgcccaggctggagtacaatggcatgatctcagctcaccacaacttctacctccgaggttcaagcaattctcctgcctcagcctcccgagtagctgggattacaggcatatatcaccatgcctggctaattttttgtatttttagtagagacgaggtttctccatgttgctctggctgatctcaaactcccaccctcaagtgatccacccgccttagcctcccaaagtgttgagattacaggtgtgagccatcacgcccagccccctcgtgagggcttttgatcgtctttctctcacatcttgatttgtatttttgatcctatcttagtttctttccattccacaagtatttgttaagtgcctgctgtatgccccatcctatgctcacagctacgtaagtacagatggctccttagaggaggcagtgcctgcatgttgaaggcgggtaggaggtgctaatacagcaaggggaagggaatttcagcagagggcccccgaggaaataaagcccaagaactggagacggccgggcttgtcagagagcaacatggagtttggtgttgctgaagcccacaggctgaggccaggagatgttgctagggaggaaggcagagaagatgagtgatcaagagaatgccagagcttttctcttaccattattttaccagaagccacttacttaatacaatcagacaattctttaagaaaactggggagtagcttgttcttccaggaaacttggtgctgaagagaactaccagaggaaaaggtgtaagtgactgtgttctgagaggcatttttttaagagtttgactgttattttccagtttctggctattacttctttcacaggttctagaatataagtgtgcatcttattggcctactggcgctaacctgttgaagtttattgatgaatctgcagggtgcctgtgaggagagcttcacagagatggccagaccttggtgagagagagtgacatcagtgtcgttttacaccctacaaaggaggggccgtattttggcatgagaagaaggtgcactggtgattggtggtattgaaagcttatagcaagaaaaagttctgttagaagagcttctgtttctcagagttccagaacctttcttctgggagacccttaatagcatgacctgccatcaggagaggaggctcagacagcctgcatttgattcctggtgcagggtgggtttgttcccagtaggaaaagcagcttctactgatgcagggactctacctccccactctttatggaataccagaaggttattgctgatagggacattagccatcgcctggctcaagtccttcatggaagagaccaggaactgatggccaggaaacctaaattacttagcaaatttatgggccattctgtgatttggactcagtaagtccagagatcctgcctttacatcattgtcttttgttttctggagtgctggtaggttagatcccaaactctgaagtactgtctgtgttaaaacactttttccccatcccattttgagctagcctcttcctcaaccaggcccatgccttttctcctaattcactttgaggaggcaacagcatgcagtgaaaggacctctgagtttgtatcaaacagacctgggttcaaagttctgcttccctgtttcatagctatgtaaccttaagcaactcacttaccatctctgagtctctgtttccttgtctgtaaaacaaggacaacagttaactttctgggacctagcattcaataggcac

SEQ ID NO: 1242965 - DNA, 4001 bp, Homo sapiens
gcaatggggacagactatgtgtctgcctgctaaggatgatgcatgacccactcgtccccacaactacaaccattgcgagccaggagtaacctgcaaaggtgctaaatcaggcctgcggtccccctacttttggtaaatccagggccctctattataagcccagtggggtcctctttctaacaaagttgtcccttgtccaatatgcatatgacctctactgcctaaagctgtagataaaaacagcagatttagcctcagctactctgtcagctaccatgttacccctccccaacgtcattactatgcagatgtttctagaaagtcttcaaagggtcaggtgaattgtgagaattctgtgacctatgtgttaacagggagccgggacattacaccacccacatgtgggccagtcctacacttcagcaccatacagggctagggaggcagaaaggcattgaggcgtggacgctgccacctcacagaagctttggtctgtgccttgactcccccagtggggataattctcctccctggcatgcatgggaagcatagacagtctatgcatgactggctgcccctagcacccttgctagccttcacccgcagggcccaccttcaaattccacattttggctgctggtttagaagcatcacttaaagtgaagtgccttttttacacctttaaggcacttcagaaaagccttggaaggtatacagggcaagggctgttttcctgcccattgggatggatgagaaaatagaggctgatagagtttaagaaacttgctcaagcttaagtgacagacccaagactcgaatccagggctctttccactactcaaagaccacctaccagggccagagctactgggggtctcagccccagtacagcagcaaatacctgggtttgagattgagactccctaaggcatctttcttactggagacctctggcgatgcactgtcatttggcctgaactctggggacctttcccaaacagagccttgctgcaaggggtctctgaactgccttatctttctcagggtccttcaggggctgggtaccagcaaagacctacagagggttaggatggtgccgtgttcaggcagcacaggtcctcgcctgtcccttccttgggcaccctaagggctggtcacagagggagttagccctttagctggcacttaggtttgactggagataatccttttccaacgactccagtgacgagggaacgccctttgcagttccagaaactgcccgtctagattatcactgggaagttctgggtaaattctgctatagccccccatggccctgtgtgtcagcctgaacccatacaatgagttgggttaaaagaaagagaaaacacaagagacggatggctctcccaatggaagcgatcagagacccggcgcacggagcggagctcctggtccttacctgtaccaatccagcccgcggccgtagttcctgtcaaagaagtggggttccgtgcccaaggcccgcacgtccgggtgtactcggataaactccagcacggcccgggtgccccccttcttcacgcccacaatgagggcttggggcaaccgcttggtacccagcttgggtgagccggagtggttggaaccggagaggcgaggggcgggcacggcggcggcgggcgcgctgggagcgctgggctcgctgggcgtcggcccggagggatcacaggggcgggacttctggagaagtttctggccgcccgcgctggggccgcggaggcagcgaggcgcgccgaggaggcggctccgacccaggtcgtcgcagcagcacaggaagctgtaacacaggtaagtgcaggagagcgagagcgtgaaggcgaagagcagcctgcgcgccctccgcggctgaggtggccccgcgcggcccaggaccctataggccatggctccatgggcccgcgccgggggtcatggtttccgagggggcaccggcggctgagctgctgtggccctgcggtcgcctagagggctcgcgtggcgctgccacggccacgcgggtcgggcgttgggggcgccgtcttctccgggggctgctgaccagggtgcgcacagtgccagggggtcccgggggcagcggctcctcggggaacaggcggttgcatttccagcatctcccggtcctaggcgatggggctccgggcagccgggcggctcgggcgctcccaggctcttacgtgcgccgggttcggagcgcgcccagcgcccgaagccccattcctgatcctcggagcgccgctcacgaaacgctcggcggcggcgcggctgtgcgggctggcgggtggaccggacggtggcgctggcgccggccgcgatctggctcttcgggaaatgccgagcggagcgcgctgccggctctatttaaggagtggcctgacgtcagccgcgcgggtcccccgagcccgcgccgcgcccagggacctggcccgccccctgcgcccccactctcttacccctcccagaaacacagcacgcgggccctccccatgcaggccactccctacggagccccaggccagctttggggcggtgaaacgaaggtgtcaaggcatagtactcctccgggaggctggacacccccaccacgctggcctctcgacatccagggacacgaatccaggtcgagatcgcgccgacatgcagaccagacagacccagacgcagacgcaggcaccctgccctgatgcgcggtcccaccaccctgacccgcacacgcacgcacaggcacagaagcacacgcgccctagcccggacacacccccacacccacgcgggggtggggaggagaagtcccctaacctgggcccagatacaccgacaaggacactccccccgctctcgacatctcgccaaatggacacacacagcccggaatcggacaccgagcgcacgcacgccctggactgggacacgcgctgtagacgggatgggtggaggagccgagcgtgagtgagattccgtgactattcacccagcttcttagcccccagcgcgctgactcacaccccggcggctcgctctgtctcgcacctatgaggcacgcgcgcaccccaacccattgtcaccccacctctccccgggcctgccggagagcgagccccggagcggcagactccgcgtcaggagggttcctctcttagcagccgccgcctagcggtagactgctccccggggagctgtccagggtaccagagggtcgccgagggctgagtgaggagggcttcttcacacagagacactaggaggaggaaacagagtacaaggagaacgtatccaggagcaattccacttcgaatgattcctaagtgaatgcctacaggacagttctcggtgaccatgtccagaacaggcataagtgacgatccccagtacttccctgagggaccacactggtaccttggatcagaaccctgcatcagaacaggcctaaatggccatggctaagaacacggctgagttgtccttcaacagcaatgccaatgccaattcaccatgtccgagtgttcacaaggtgagtgccctccaccaccacccagccatagaatgtctagatgaccaccatgacccccaccctgatcagggtataactgacttccttcctcaggctgtaaactgatcattaggttctgtggatcttagcccaaaccagaaaatattttgtccccaaactagtcccatccctagaaaccttaaaccaattctacggcagataataataatagctgccaactttgtatcaagcacctggcatgggttaactgattaaatattcacaacctatgaagttgttaccattaccctggcatcactttgctgtcttaattctaatagtagctagcatttattgagtgcttgttttatgggagttatgcgctaatcacttgacatgcactacctcatttatctttggagataggtattattgtaatttctaatctacaggcagtgataagaagatt

SEQ ID NO: 1242966 - DNA, 4001 bp, Homo sapiens
catctgcaccagtgccgtttaaaatgttatggctggcaggaaagctggattattaatttattttacctgcacttaactttctagtcctctctcctacctttctctcaccaccggcagacggtgggaaaggagggagatgaacatctcacaagacagaagctccaatctgttgcgaaggaggcggagattagacagggcacggtctgaggcataaaaactctcagggcaccaactgtcatgcagacattgaggcttctggtgcaaaatcaactccgtgctcattcagccaagggggatggaaagttacggaggtgggaggcatcctttctttactagaaagccaaaacgccagcatgatctttgtaactgttccctattcattttgctctgaccttaacacactaaagttgaattccagccacgcaaatgcgtttgagggtgattttaagagattccaggggacctcaaatccccttagtcaatttagccatcctgtctcactcctcaaagtcctctgcccagaatcccagaaccccgcaagagcctggtttcggaaacacccagcaggcaggagggctgggggttcccaggcttggagctgggcagattcagacagcacctccttggatgaggagcgcgggaggcagggcagggtgacacctcctcccctcgccctgaaataaagtgacctttcgctggagtccagccctctcagccgatccccctgagcaacgccgccagggtttgcagagccctcgcgggggcttgggcctctcgggacggtgcctggatgctcgaagggcgtggaaagccgcggcttcccctccgcgtctcccccacgcgtctccaccagcccgcggagcccagggtcctacctgtaccactccaaccccttttcgtagttcctgtcgaagaagtgcggctctacgcccaccgcccgcacgtccgggtgcacgcggatcgcctccagcagcgcgcgggtccctcctttcttgaccccgatgatgagcgcctgtggcagcttcttctccccatagtcgggggtgctgacggcgccgcccctctcgctgctcccgttggccgctctccggcctgcgagatcctcgtcggtggtgctggactcctgcgcttccctctccggcagcgcgctctgagccgtgatcatctcgctgggggccagcggggtccggagccaggcgtcctgggcgcctccgccgccgctcggcagcccccagccgtcggtcccgggggcggctggctgctctgggggctcgggcggctccccgtggctcgcgttgtccagcggcggcggcgcgggcggctgcgagggggcgccgaggcgcacgggggtaggcagcagagagggtggcggcgggctcggcgggggctcggcggcggcgcccggcgactcctgcagcgccagagggaattgcagggagcccgagccgcccaggaggctgtagcacaggtaggtgacagacagggacaaggtgcacataaaaagcagcttgcgcgccggcggccccttagcagaggcgccgggcggcggcggcgcggccagaggtggaggcggaggcggaggcggaggaggtgcgggccaccgggccatcgcggctcccggctcgcggcggcggcggcggcggcggcagcccccggcgctgcccggacatggtttcagccgccgcccccgccgccgccgccgccgccgccgccgccgccgctgcccagccgccccggctgcatgaagcgacgccgctgcgcccccggccctggccgctgtcccgctgcgccaggggggagcccggccgcatggccccccgccccacgctgcccgccgagtccgggtggcccccccaccaccgcccccccctcagcctcaggcaaggggaccgaggggggcgcgcggacccgccggcggcacctgctccgtctgcagcgcccccgcttccccggctccgccgcggcttctgcttcagcctctgccgccgccgccgcgcgctgttgcagcccggagttccttccccgctgctaactttctgccgggagagaggagaggcgcggaggggaggaggagggggccgggcgcgcgcccggcgccgccgagggaaggggggtgcgcctcgcgcgcgcctgcgaagggggcgggggagcggaggcgtgcgctagggctggggcacccgggagaacggagatcgtgccccccagcccccagcacgcacgcacttggggtgttccccaccccacctcgtttactcccctcccttgggagctcgggacgccgtgttctccattcctttgccccagtacttttagagaggtaaagcccaacgcctgcctccggtgccgcgcaccgggagctggaagacagcgggtgacgaagctctcgcttccgcttttcctctgggactccaactcagcccatccccgaccctcccttctctcgcccgggatatcctcctgccttcggtccaggagtgaatccttttctacaaccgctttcccatcccaacttccatctttccagccaccgccccccgccccccatcttctcttgaagctcctgatgggtggagctttgacacaagcccccaggtttcccagccccagagcttttccctctgtcccatcaccaggtgacaacactttctgcttcaagagatgaggctgcccctcctcgacacccttaatcacaggtgcacacacctgcgcctcttcgggggcattgccactaacggagttcatggtttcctggactgaaatagtgtgggaccactgtcgctctgaacacctaataagcggagacaagctgggttgctgggtgtctgtgcatcggctcgctgaaattttttaagtgtattttctttgcagagagatctccacccctcacctccctctcctgggggaacatggtaaacatcagaaggctttggaagattcacaactagactttgcttcctgttgcattttgctcagggaagtgagggaaatgggagaaagagacagagtgatcaactgaggcactccaacaaactcagctttctgcaaccggggctggctctgcacagagctctgccaggtgcctcctgggggtggctctagtgagtaccatttgccccccagccacagctgggtgcctgacggggctgcttttcccttgttggctgctgtggctggcatctctggttttgtttgatcacgtaataggaaaaccagttgaaagaaaatgtatataatgtctaaatattaacgagatacctagtgccaaagagaaaaaaaatgttaatcaaataagataaagaacacggacttttccctgagtgaacaaaagctcactgctgctctcagctggacacgagtttccttcactgcagctttagttcagataaagattattcttttataatatattttttatggtacactggagacctctgaaatgcagagtctggtgtcctgtaaatcattctgtgtaactagggatgctttttcaaacagcacacaactgcattactgtaatgtcaatgggaaggggccaactggaacggagagaaacacaagcactgcccagccctccctgtgctccgagccatgatccaaggtggtcatctaggaagcctgggttgcaacagatattgccttgtcagcgaccagtctccctttcaaggcccaggcactagatgtctggcatatggcccaggtcctccttgcagttcctgcctagcacccaaacttttctatctcccctctcagcaatccaaacgaatctgctccatgcccagttttactaaagatgggctctcaaatttcgaaaggttttggtaaaaaggtatcaaaaccgatggtggcaaatggagctctgaatgtggccagcacagtgacattaagaaatgtaaactggctgcaatagtttaaactgggggctttcccaaaaaaggaaaaaaaaaaaacaccttggagaggacgttactgttgaaaaatcagcagatcctgaactttgagcc

SEQ ID NO: 1242967 - DNA, 4001 bp, Homo sapiens
cccacccctcccccttctaaaaaatgaggacgtcaagaatctaccagagcagtcactctcctgtacccccctccaaccctgggcacgtcagtgtccccggaaccccacccccaggctaaggagctgactcccaagttgggcctggccttggctgcctctcatcctccccaaactgatcccccagcgctggacacatgcccagggcgggcctggactggcctcaggagcctgggctcttccagaaccctttagggctaaacccaaccctagcttcccctgtggctcctcacggcccagctcagatcccacccccagtctcttgctgtcaaagctcatggggctcaggggtggctctgaagtgtttactccagttaactgtgcatccttaacccaaagccctttctccccttccccctcccgcctctcccctcctcccccgtctcgccactcccctcctccccagcttctagcttggtagcccctcctaccctcctccctgcagcagggattagggatgcattctgacccctgcctgccgtcaggggagtgaggtctctccctggagcctgagctgaggatgcccaattcagccaggtgagccccgggatggactccatgtcccctagccaccacctgacttccccagcaccccacactggcaccagcccttcagatctcagaagcgagccaccctattctcacggagccccttcctgcctgccctccaaacccaagagtagttttagtacaaaaggcaaagttaacaaataggggtaggcgtcagggaaggaagaggatcagaggatcgggaacggagaaactggagcacctggagaagcgtctgggtcctgccacccccactgactccccaactggccttgggcagggtcctctctgcaggcgctgggtccaagcttggggatgagcagccaccagcgcgggctgcttcagctgaggctgccgcacccccacgtccatcctgggtagaggcaggacagccacagagccccatgcacggggctggactcaccctgggcactcacctaaaggcagtctcctcctttccaaagcccagactttctccggactcccaggaccaccaacaagggttcctgtgcgcagactcgggggtcttggggaggaaggacgctttctaggtggctgcctggaacctggaggcccctttctacagtacctggccagcggtcggtcacacctgagtgcccagagtgagcgggcggcagaggcatttctgacgctgccaggtaatcccacgggctggaaacgacctctgggctgggaagccaccgcctcccccagtcctgctgggtccctcagcagagagaacggaaccggggctttccccacagttttcaaagtttcagggaatcctagccaagtatcattccttcttccggagccgggaccccaggtcaagcctggggcccccacagggcggtcccaaccccactgcccggagcgcacccctgctccctgggaggcaggatatcgtgccgctgctccctggggcgcacgataccctccccaggaaggcgccggtcagggcggacgggccagggtgctcaccggtaccaggcgaggccgcgctcgtagcacctgtcgaagaagtggggctcagagcccagcgcgcggacgtcggggtgcagccgcagaaactccagcagggcgcgcgtgccgcccttcttcacgccaacgatgagcgcttgcgggaagcgccggcggccgggaccgctggccaaaggcaggccgggtgctcccgggcggtggacggagctggacggctcggagggcgcgggggccggcgcgggggcgcgggcggccggcgggcagcggccggggagggcgcagaggcagtaggcgccgagcaccagggccacgagcagcatcggcgcgcgggacgcccgcagagcggccccttgcccggcccctgcgccctggccgcccccggccccgccgcccaggccgccgctacctgccatggggtcgcgccgctccaggcccgggagcgggggcagcaggcgggcgcgcatctcggcccgcgcgccgctcagtccgtgggtgcccggcttgtgctctgcgcccggcggtcccgcagcctgggagcgggcgcggggcgggaccgggggcggggtctggacgccctcccccctccccctcccccgcccactccgcctccgaggccactgcctgggctggacccgccggcagccgccaccacccgggcgcgactcgagctgccgggaccaccaggacgctcctgctccgagatcccaggccctggctcgcttgactccggcatcttcacctctgcgcggggaggatgcggcggcggtggccgttcgggacgcagggcagggacagggcggcgcgcgggcctcgggaccctctgtttgaagaccgatccccttccccccccaccccactccgggacgtgcgcggcaggtgcataggccaagccttggcctgcaggagcgggagcctcatcgccaggccaaggggacccaggaaaagcgtcgatccgggcactcggcctgccaagggagaaagaggccgggacagcaccctagtgtgcagagagggatcccagaacgtgtggggggagtctgcggccgggaatggcgtgcgtcctgcactcccagctgacagtcacacatcgggtcacagcctggccgctgagaggtcaagtcacctctggttactgttttagaatggaggggacaggctcagagaaaataggtttccctcccaggggcccagtggtgaactgaattcaggcctgagacatactctgtctactaagtcaccccatctgcccagccttggtccacctggcactgcccagagacatcagtgatgcatttcggaagctggcaaagtggaccccactggagtacaaaggactcagggacccctgtgctggggaagagaaggagcccaggacctcccccaggggctgcctctgaggggcgtgagattcaggggcctctcgggtgggacctgcgggggccgctagacactgcgggaacttcacatccccaacgcccagcagcagcctgcagggaaggcaggggaggcgagccgggctcagagagggcgagcaacttgccccatccgaaggcaaaggtggtatgagacccgggtcctctctccacctctgccccagccttcctggccacagggctggcgccaggcaggcacggcacaggctcccggcagaggcccagcctcttcccagccaagggcttgcggcccctgtcctgggctctgctgcgttaatgagccgttccagccctgatggcatctggacaagtcccagcagccgggctgcctcaaggggccgaaggcctccacgacccacagacattccggagctcctacccagcagcagccctggccagagggggccacacggggctgacggggtgaagaccactgaccagtcccccagccccggctccagacatgcgggctgcacctgctcatctgggcaagcctctgcaggagccccgtgggcaggcagcgggcacaatgcgaggagagcatgctggcttatgctgggtcacaggaaattcttcttctggtctagcttgaaacggtattgttcccaacgggctggctcggggtgggggctggggtcccaccctgcagcatccaccccacagtctcagcagtccccacggtctcaggagtcctcacggtctcaggagtccccacggtctcagcatccccatggtctcagctgtccccagggtctcaggagtccccacggtctcagccgtccccatggtctcagccgtccccagggtctcaggagtccccacggtctcagccgtccccacggtctcagcagtccccacggtctcaggagcccccacggtctcagccatccccacggtctcaggagtccccacggtctcagcagtccccacggtctcaggagcccccacggtctcagccatccccacggtctcaggagtccc

SEQ ID NO: 1242968 - DNA, 4001 bp, Homo sapiens
atcaagtccacagcaggtaaacaatacagtgatgcttgctgggatcatggctgggaactgatctacagaatgtctgactacatacaaattatacttacaggttctctctattcttttaagacaaaataaaaaaaaagaccgggcacggcggctcacacctgtaatcccagcactttgagaggctgaggcgggcaaatcactcaaggtcagaattcgagaccagcatgaccaacatggagaaaccccgtctctactaaaaatacaaaattggctgggtgtggtggcacaagcctgtaatcccagctactcgggaggctgaggcaggacaatcgtttgaacccaggagggcaaaggttgcagggagccgagatcgtgccattgcactccagcctgggcaacaagagcaaaactccgtgtcaaaaaaaaaaaaaaaaaaaaaaagaaaagaaaagaaaaaaaaaattgcccccttcctcaccttcaactcttttgcgtggcaggtatcttgttttcactttccagttcttccaccccagcctgtgtcatgaggtccgcgatattcttttccagatcatcaatgcgactactcatatcatcaagtgctgaagttaaagacaacgcgtgccaacatctcattgagcctttttcctcccgtccctgcagactacagccttaaacacaacgactttagggaaactggtcttccaattttctttcgacactgttacacgctggtgggtaagagtacaggactgtggggcatggctaccccgcatcggattccagccctgacccttactagtgatggaacccctaaacctcaatttattcatttgctaaagatgataacactacaacccactcataaggtcatgctgagcatcaaaagacacacacaaaagcgcttagttcacagtgcatggtccaccacaccagctattaggattggtagacgtatgctccttgagccaggagtctaactcagctttgcccctagctctcggcgcagtccttctcagaaacacagtacaatccaagctcaaattctacaagtgaatggctgaagctagcctgaaaactactcatttatccccaccactgcccggcaaataggctccaaaggcccacaggaggccgactgcagataaaaaggatatttctcccaatgatctggtcagacatggtctgaaatttatcttgcatctgctgcaggagtgtctgcacctaagaaaaaccgaaacaaacaaacacggtccacatcgatcctgagacaacttcctgggatcaggacgcaagccctggtcccggggttccagccccatttctgcctctggacagctgtgcggccttcagcaagatcttccttctctgggcttccgttttccaacctgtccaattagactgctgggctggggaggccgctgcgactcaaagctcagggtctttaggttgtttctgccgggctggggcacccgggggtgtgtgaggagttgaagggcggggagggtgtcagaggtaggcgggagggacccggagggcgttcgcgacagatgaatggggctactggaaggggtcgggcttgggggcgcccgcggggagactggcccgcaccgagcgccccgggggtcaaggtggccgggagcctcggccagagacgcttccagaaacggggcctcggcagacgccacgcgcggccgcggtgggcgcgcctctgtccagcagggcttggcccggcgccgcccgggaaggccgcggcctccggccctcacagccgtcccttaccaccgaggtgaggtcctgcacggtcttggggtcagtctcggccatctccccgatgcccagcttggcggtgatgtctcagaccgtaacctacacttccgtttgtccgctcagtcgccccgggccgctgcttctcgcgacgagactggcagctcgcgggaccgcggggcattatgggagtagtagtttctcccgcaccggaagggcctcgaggccgcgcgcttccgttccaaggagcggccccaccccactctccccgccttctttcgcatagcccctcccctccctctatgccccgcccctcacgcagcgcgccgtcagtggggtggaaagtgagaccaactcagaaatggagcaatagaggcagggagtggtcttggcctctcttccaggctgtagtcagtcgaaagacggctctggggtttctttggcctgtcgggacgaacttacagaacttttgcccttcaacaagccccactgtacccttgtaactgcccccaagccaaggaacatgacccacccctacccgccccgggagccccatggctcctgtcctgttctgtcatctccaccctatgaaggtggccagcgtctggagtttagcccagtaggttcattgtgcccgtcaggttcatatgaggggattcagacaggaagctgtccatcatgcctggcttctttcactccacgcaatgcctgctgttgagtggggaaggcttccggcatcagggttagactgtgggtttgggtgttgaaggaggtgggcactgctgatttggaacctcaagttccaaccccacaggtggtctttaggattgggtctcatggcaaggggataggagagtccttgactgcgggcctggcatgttctggaaactttcacacatctcatttaaggactgtgctatgtgaggggtcagctccagtttgactttagctagggagaggctgtaaggtgttagagctgttacgggaaagggtcctgatccagaccccaagagagggggttcttggatctcatgcaagaaagaattcagggcgagtctgtaaagtgaaagcaagtttaagaaaatgaaggaataaaagaatggttactccatagacagagccctgagggctgctggttgctcatttttatagttatttcttgattatatgctaaaccaggggtgggtgattcatgcctcccctttttagactatatagcgtaacttcttgacgttgccatggcatttgtaaactgtcatagcggtaatgggagtgtagcaatgaagacaagcagggttcactcttattgccatcttggttttggtgggttttggccggcttctttaccgcaagctgttttatcagcaaggtctttatgacctgtaccttgtgctgacctcctatcccatcctgtgacttagaatcctttaactgtctgggaatgcagcccagtagttctcagcctcagtttacccagctcctattcgagatggagttgctcttgttcaaacgcctctgccagacccaccagtgtctctaacaaacccggaatccagttggccttgaggcatgagacttcaactccctttaccaccccttccccctcactcacacctttgcccctcacccttcacacctcatcctttcctatagagagatcttcctttctgtgtaagtatacacaacttttttgtaattggctgttgtcaactggtatttggctagtgctttacccgactacttgaaataaaaatatctcagtgttttaagttaatcctcagaagaccctgtgatataattatcataattttacatttttgagaaaacagatgcagaggcgttaagaaactggaacaaggtcatcaaattaaggaagtaagagacgcaggacttcctgactctgcatcttctccttttttctcaccattctagaattctctgagttttttgagcttagagcagagtttctcaagagctgcaatactggcatttgagtcaagtcgttctttattgttggtggtggagggggcaccctgtatattgtaggacgttgggcagcatctctgacttctacctactagatgccagtatctcagttttcttaaaagacttttttttttttttttttttttttgagatggagtcttgctgtgttgcctaggctggagtgcagtggcaccatgtcgactcactgcaacctccgcctccccggttcaagcgattctcctgcctca

SEQ ID NO: 1242969 - DNA, 4001 bp, Homo sapiens
ccagagattggaggagcccaagttagagaaagcatccttcctctcacctctctctcaggctcaaggccagaagcaacagcagcagcacaaaggcctgaggtgagacctcaggaaagactacccagctaggccactagtacctgcagatggcctgggtcctgttgaggtggctcacaaataaagcaggaagggatctgccctgtccccagaggcagagcccacaacctggcccctacttcatacccggggtgtctgttgattttccttcctcaaacctctgaaactggggtctgctgaggcttcacactgcgcctggaacctgggtctctcctgtccagcccgaatgcttccccatctctaccatctttgctggagtgcaaggcccttgtgcctccttcccccctactctgcctcagcagtctggcttcttacctgattcatggcccctcccaaggaaaccacctcatatccccttctccccacccccacacccagactggctgtcccctacagagaccgtgtgtactcctgccttaagcctttgtcccacatcctttctctgatccgagatccctttcatactccacttatctccactcatgctccaaggccccactcaaggatttcctcctccggaaaattctcccagccccatctgatcacacagggcccctactagaccgaggtctctgagaagccaggttgctggctgccccagcaaaggcccagcgcaaggacaaagcctggagcacctgtccaaagccgtgggtattggcgagagaccaggctgctcctcccacgatgcaatggagtcagtgccccctggcctttctccccctccccacttccggcgggcctccagccccccccccccttccccttccctccctctggtgacagatttattccctgctccagacaaaggagctcagctaggcggccagaggcacctgagcccagctctctaagagctccttcctgggcacagaggaccaggagggcttgggggtggggtgctgggtgtaggctccaaactactgcctcagcagtttggcagtgggtggctagacagaaagacagctgaatgtccagctgcccctcacggtgacctctagcttttctgaactccaaggatcccagccagtgggggatgggtggggtggggaagttccccatctaagctcttccctctggcccgaggaatgggagatgggtatcttaggtggggatgtcaggcagagttcaaggggtaacgatcctcccttctcaaggcctccgaagtcccctgagactgctctcttggggaagggaatggcataaactctcaaactccaggaggttccctcttctcagccaccagtcagtttccttctcgaaccggcccactccctgtctcactttccctccaacactccccgcagcggcaggtagtgaacccgggcttggggaggtgcccggcgctccctatttggctcgctccctgcacccaggggtggagaactctcccactcttgcgctgaggagcccgccttggctgtgcccatggggagtcagtcctgttgagtgtccagtcccgccctcgagcctggagtccccgcgctccgcgacccgcgcactcaccggtgatgagcaccgcgcgagtggccaccggcaggcgctgcgggcgcgccaggcgggacaacgcgatccagccggcggcggccagcacggcgagtgcggccggcgggggcagcaggcgctggcacagccagtcgagcgcggccagcagcgccagcgccgccagcagcgggcggcccagacgcaggtctgagcgcagcagctgcagcagcgcgcgggcagccacgagcagccaggcgccgcccgacggccaaggccagcgctccatggcggcccagcgggctggggcggggcggggcgggggccgggccggggagcggggagagagagcttctaggccggggcgcggagtgcgggggtacaccggcctggggcgcgagagggacactcgctttctctgctcgccctcgggccgagcttatgaagagccccgggggcgggggagagggcggggagcgggaggggcgggggcggggctttccttcacttctctcccggcaccccccgcagggcaggtgctccccccccgccccgccccctcgaccagattcgatttggaaaaagccggaacaaagtcccaaagttgctgcgctcgaggagccgcctggctgcgggcggtgcttgggagagggcccgtcggtccagcccgggtgcccggcctcagctctccgccgcgcccccacccacacgcccggggccgccaagccgccgcgctcaggtgagcacatgccactcacgcttgttcgggacacctgaggacacgcacaaccggcatcccggtgccctttgctgatcgcaccaccgcggccgccaagcctgcaggaacaccgcgaggaaccagccggtgctcacccggtctccgctgccgctgccgctgccgcccgcgcccgtacacgcgccgcactcccacgtggtcggctgcgccaggtccctggcgcacacaccctaaggcgcgctcacccctgagcagctcgcggccacaaaacctgcctgggacaggggctggcgggggaacaggacgaccgctcccggttcttggagtctctgccccgtctttccctttccttccagggcttaaacctggggacgcacaaccccacttcctgcctcacaaatgtatgtgtgtgggggtcagtggagggtggggtgtcagaggaagcacctaggtctcccattacttatggcccacccccgccaaccccaagagccaggccagagggacgtcggtgaaggcagcctctaggacagggtggtccctgccttgctcccctgaacccccagggggtaaaataagtggtatgagtgtgggtggatttttctgcctgcgtgtgtgaaggtctccatgcttgtgtgtggcccagtggccccccaccctgcccacccccgtgtctggcaccctgtgcctagcatccatgccagggctctgccaggcactgggagttggtgccagtacctggctgcaggcttgatgctgagagcagtaggtgtagccctcgacagaggggtccctgcttcccgtgggcttccaggccgtgctcagtgcctcatccctgccctcccaagatcctgggaggttgtggactccctgtcacacttcctagccctgttgctcattctctcttaggtgcccaggctctgccagggtttcagggcaatgcctcctccaaagccctctctgccaccagacacagccccctggtgagccagggaaatctcaggggaggctgggagccagacccacctaaagggagagtctctgggtggaggaccaatttgccctgagccactcctgtgcctccacctatccctcctcctaaggacagatgacaggcaagccccagacctgggaggcaggacttgaatgaggagggtgtgtgtgcctgaccttgggtacatgaccttgtgtgcctgtgtttgtaagcacttgtgtccatgggactctgtggcttgtccaggccatttggttgtgtcactccctatgccatgaccctgtgtgtgcaagtgagtacatttgtgtgcattgtgtgtgtttctggtaactctctgtccttcggtctgggtcatcctgcctctagaaactcagggaaacattccttttccaaagtcactgattcctgttgcggtgaatgtatggcccaggcttggaggcagacacagcacccctggcctgacttcctgatttgagctgtagagattggattggccagaccccccagctttagccaccacaccaagagtctggctgtggtttctccagcctcagtccattggagtcttccccttggagtgaggaagggagtagaagctgagatgagggtcctggggagccttcaaggtcaaggcaacacagatagaaccagcacttgctaaagcaggagttgaag

SEQ ID NO: 1242970 - DNA, 4001 bp, Homo sapiens
aaagtgacatttcagtcatccttaaatatatgtagtgctcatcttaattctaagctttcttcattgccataagcatttcatgcagggattagtccttgagcttgagttgcctaattgattcaatcatcctcactcaacactaaatgcacggcacctttcagtggctgatgtgggctcactgagttgggtgcatattttgtgagcattaattaacacctgcatcttgaaatgcagaggataaagaatgttgacaaaataaacaagcaagaagggattcccattttctcagctaccctgtggtttgcctgagctcatcctaaggtttcataacagaacaggacacagaacaggaaaattgagactctcttacaaatttcaccgataagccatttgagaattctaataaaaaagtggaaaatccagccagactcccagatacatgattccaggtgatatcagacattcttgcagataaacatcccattgactgaattttctccctctaaactttcaaaaattaatttaaagaagcttcttttctgtggcttgtctaaccccaacaagcaccaatttgcattttgtttcaagaaagcattttactttaacccaaaaacaaagtctgtttctctgcaaattgtcaagccccagattttctcccaaccacatccccatgccattcttgccttcaccctgaggatcatggtcagaggggtgatgatctcccccaaatgattccacagctgattttttttttatttggtagggctttctgggttaggataacgctggataatcctaattacagccctatccaagcttaaactccataaccaagcaaaaattttacaactcaaagaaatttaatttggcctcacacttgcaatggggaaacacacacacacacacacacacacacacacacacacacacacaaacaagggaaaaactggcagctcagctaacaggcaactgaatgttggacacgatgccaagttggtccaattaagaaacattagaggtctaatgaggaacagttcagacaggacacaaggttcttgacagcagccaagcaaactgcaaagtctccagcccaggtaagtgaatcccttcaatatttcaaaacagcaagggacaagtagaacttggcttgtaagcgttcttgcatacctagggaagaagagtccaggtggagaacctggccaaacaatgatgtcagaacaaaagtccatttaagcctaaaaaacaatctatgggacattcctgggtacaatagaacacatgaaatattgccattttgcctattaatatttattcctgggaaattttaacaaaatcattgtctgggtgcacttcatcctctccttccctcccactaccagccccttcaaatgcacctcctggaaaaaacggaacgaaaacagtgtcatgaaaaatacttgggtgagggctttcatttactccatgccaagtattttatttttaagccagatttgacaaagtcctgctaaggcaaagcaagtttcagatcataccctcagtgaaaattgtagcaccgtctgcttacctgtcaccaggactgccttctgatccacaggtaacaattcttggccagataagtaagtatacatgaggaagcatgacaccgagaagaggatcaagccccaaaaaggggacaggatgagcaggcagactgcacagaggcctgccaggcagaccatccagctccacagctgccctgagctcttcttgtatttgcaaaatactgtcccacatagtactgtggggacagccaggcagatccatgctgtgtccgagaagaaagtgctcattctcagtgacttgctgcaccttcaagtgctcagggccagtgagtctagcgggcaaaggctggctggaggcagcctgagttctgtgaacagagagtcaagaagggaggggagaaagcagccccagcccctttcaactgagcatagattaagcataatcatattcccagtgggtaatttaaaccagtgtgcacttcaacataaataccaaggcacttcctatttgaccgctctcgcccctccccaccccctgcatacacaacacatgcacatactcacccacaaacacacaccttctatttttttttaatgacagtccacctctggagcgatgactaactggataataattgacagaatttgaactgcatggagaataacaggaagatcctctagctcacaggaaaatactgtcttcttcaagagcctgcagtatgtctgggtgctgagtcctttttctgactcgggagtgagtgagagtgtgtgtgtgtgtgtgcgtgtgtgtgcatgcatgcatataaatataggcaatcgatgaagtttggaaaatagattctggaagggaaggcacctctgatctggtccatagcttcaggactcctacaaatcccaactgaggcaggctgaagggttggatggagagggatatgaaagtagaggaagatattccttggtagaggaaagtgctttggtcttgcctgagtggaaacatgccagggagagataataatgacaattaactaatagcggctaatatctattggtagttttttgtggcagaggctgtgtatagctgcttatttgttctttctctttattgtaagcctattctatgccagcctccattcactgggactcctctcatcctccttgaatacaatatccttatgaagttgattctagtattatagtaattttacaggtgaggaaaccaggacacagagagggtaagagacttagtcaagatcacacagcagtggagtcttgcagcctgatctcagagctgtatgcccctaagcattctattccactgcctgctttaggcaaaaaaaaaaaaaaaaattagtgcattatgtgctagatctttcctactttcaccccatttcaaccttataaaactgtttgaggtgggtgttattattatggtcagtttacagagagaaaaactgaggctgggaaaaaataaatcccttactcacaagcggcttaaaagccagcactctgcaactacagcaccacctaaccgtgctaagccagagaggggtcaccgcacctgggctcagggcgtgccccatgtgggccacatgcctggctggagggaggcaaggttgtgataaaggctggactttggcatagctagagagaaacattctctatttgaggtcagtttccctctattcaaatctaatcttaactccactacttattaattacatagtcttgggagggtcacttcacctccctagatcttcatccctttggctataaaataatatcatatcctgcctggaacagtagaaggaacctcataaatgctagtgattcatgttttttaaacaggaggagaatgaagaataagaggaagtcgtgtaaaacaaagtgtccagtggagtatagacttgtctcaaaacacgtgctggagttaaatgaggggcaggaggaggaagggagaggatgccttttgtggatgatgttggggaggcaggactcgggaaggaagggacccagcagcgtatcccctgtaaagggaggtgaggcagagcccacctgggctcaaagccaactcaagacccaagggagaaggggtgggaagcagtgtcttgtgaaccattactgtgctgtgggactgtggggttggacaacaaggcagttatgagggtctgcgtggagtgatggcaactgttgtctgccctcccagccacatggacatttgagtcagggagacgttaccagctccaggccaggaagcttaggggcagggatctggaattgcctttggctagccctgaactctccctccctcaacagaccccaattccttcctgggtgccatctgagccacagggcacctctcacaatccttgtggcctcaccagcccagagcatcctggcagttagctccgttcgaaaaacagcttccaggtggggagacaggactagctatggctcttcgct

SEQ ID NO: 1242971 - DNA, 4001 bp, Homo sapiens
tgtcccaacttgcatggatcctgtattctctgcaggctgtggagacataatcacagtctaccttggcccatgtatagaccatatttttctagccagagtccacacttctctcccagggccatgtgggtcctgcccccttctagagcaagtcctcctgccatattctcagcctccccctgcctagcccagtcctcacccacatagacccggccatgctccacagaggccgggatggcccggaagagccaacctcccaggcgcaggccctggcggtagaagtccctcatgatctggtggccttcaccgtagatgcccgtgggacgaagggcacacgtcaccaggggcagccccccacggacctggtggcaaaggcaggtactgctgagacctgggacccgacagcttgctctcggccccggcctccttgggctggcagggtaagggggtgtgcagggcaggagccccatctctgcgcctcctttttctgggctcaccttcctcccgttggcctccaggaccagccactcggccagggccttgctgcaaggataggggtgcctgtgcactgcttcgtatggggtgtcttcgttgcccctggtgggaggagaaggaagactcaatgctgagggaaatgggctcttagaggacaagagggcctgccactcacctgtagaaggggtgacctttggtgttaggccccacaacttccatgctgctggtgtagaccaggaaccgtgttccggtctgcacacaagcctcgatcacgttccgggtacctggcagaggaggaggcgtatccaagctgcagcttcttccctctctgcatcttcctcctccccatcccaggtccagggaaaaccatgacaggtcaggggaggcgggggcagggctgtcaataggacaacttgtcccaggggagtcaccggaggtcaaggccaaagacagagtggggaacaaacaggcaagatggccaggagtgtccagagctcctcaccctgcacgttgacctcatggatggtcttgggactggccctgccaaacacgtctaccagcccagccgtgtggatgaccacatgggctccggccacagctgctgccacctcatgggcctgggtcacgtccccctggatggcagtcaccctcacaggccctggccggggttggaggacacaggccatgtcagagctggggccagaggccagaggctgggttcatcttccaccctggagtcacgttcccaatgtgactcactcgacccatccatgtggacagaaaccagcatcatctgttccactgcaggggtggggatcccagcttgggaagggttggggaagcgtccacaccctctccaccacaagctcccccaacaagaacctgtcttcagctcctccagccagggacccaggtgttggtcaaagacccgcagctccccgagccggggctcccgctgcagcagcattcgcaccacgtgctctcccaggaagccacagccccctgtgaccaggtacaccagcttctgggcctgtgcagagtcggccatgcctggctggggaagagaccttggctcatccaggggctggctgccacctgctgcaaccacctgttactgctggaggtgccctggagcggtgacgaggctggcgtttgcggggagggcagagctgatcctgggagctgcagcaaccaggccacctgccgtctgcccctgctgatggctgagttacggagagaggggcgggcttggggtgcaggaaggggtcagggtttagggagagagatttgaaggcagtaaaagggtggggaggccaggagttgagggaggtggagggaaggttataggaaggtgggaagggccggatggagggaaaggccacctgggcactggcagcgcctctgcctacctgcagccgctatcccagggtgcccagactggcctggaggggccctcttctttcgtccagggctggccggcccgcacaccgtccttccgctggctcctccttctccctcctgccccattccaggaacagagacccgcccagccacaacccccaccactcttgccccaaggcgccccctggcggccgctctgtgctccactggcatctgggtccagcggagaacttggtggggatgaagctcgaacttgcagagtgggctgaaggggtctggggctgtgggtggagccagcggtgacctcatcccacagtgtgacctcaggccttccctcctgctgggcttcccaggaggccggaggtccagctgcagctgtgattgtaggaaggggaggcctgaccttggcaccaccctggcgggcactggtggggtattcctggtgcgggtgcggctgctgcagcctgtcagggggtccgagacagtctcggactgtctctgcaggtctgggctcttgcctgaaggcccctttacctgccccacacttcaggtacccacttttccctctcttcaacttgcacaaccctccgtgccctctacccccaacccctcgctcctgcccaaatacaccgaccaaacacttttgtacaataaagtttaatcacaattataaaaatgtggcgtcgggtttgcgctattaacatatgtacagtccagcccagcaaaagggacccaccccgccatcctggcctggctgagccggggagtgacaccagggtggaagggtgaccctcagggtctggcaggaacagatgaggcagggttccaggcacggagtccccaggactgggggtgcagagcccccccagggggagaacatggccactgccccagagacccctaaactggggaggggtacacgcagggcgtaaggggaagtccccattaacacaaagcaagaggactgtgtagccccccaggacagaatctgtacaggccggcaccccaggtttccacaggaaacagctgctggctgctacaaaacatttacagcttcttctccgcaaagaaaaacaatcagggggtggtgggcaggggtgacaggagaggcagaagctgcctccagggactgaggctccctcgctgggcttggggcccccaaccccacgcttggagatgggggcatgtgggccctgctgagcccactaaggctgggggggtgctgggagctcagggcaccagggggaataaataggggtgtgggcacccatcctgccccacctcagtttagggagccccggcagctctctgtgccacacagacacgggatcttgttgtcttccagtgggaacttgtagtcgtaggtgatctcctcgtccacgccaatgggctgcttggagtagatcacgatcttcttctgggactcgatggtgatgaccttggcgtagcagttaggctgcggatggaagggcgtgtgagccgtggccacccccaccgacccccaactcctgccccggctggcccctggcgcaccgtgcagcagtggttgatgaatctggccaggttgccacacttggtggcatcgatgatggtgtcgtggtccacccggaacaggtagctgctgccaatgccctcctgcacgtagcgcttctcccgcatgtcggccaccatctgccagggtgagatgcgatggtcagggaagagtcccccacttcctgcccctgagcacgcctgccagccagcaccccaggtccacgcccaccaggcctggagctgcagctctgcctccagctcccgctaacccggcactgactctctcgactctgcttccaggagccctccctctttggggcagcatcctaagcctctggtggccattctaagtcacccgcagggaactccagggaaatctgcactgggtaagagagccactgactccttcgagcatctgcctggtcacagtggggtcccggactgctggggcaagtctggggttggggcagctcctgaaatgactggccatgtcaccaacggcaccctgctcatctctcctccctggacctctctccaaaacaggcacctgttggctgccaccggctaatgcaaat

SEQ ID NO: 1242972 - DNA, 4001 bp, Homo sapiens
caaaatgtccatcaacaaatgaatgaataagcaaaatgtggtgttatccacacaaaggagtattattcagccataaaaaagcatgaagtactgatacatactacaacatggataaactttgaaaacattatgctaaaggacagaaaccaaatacaaaaggccgtatgttgtatgtttccacttgtatgaaatgtccagcataagcaaatccatagagacagaagataacttagggctgctgagggacagggggagaaaagaggtatgactgttaatggggttggggtttcttttgtaggtgattaaatgttctggaattagttactggtgatggttgcatagcattgtgactatagcaagaactactgagttatacactgtaaaatggctaaaatgataaattttatgtcatgcgtaagtcatttcgatttttgaaaacctactttaaaaaaaagtagcaccaatatgttcaactctgttgccctagaatattccagcagtgattaaaaccacaaacttggccgggtacagtggctcatgtctgtaaccccagaactttgggaggccaaggcgggcagatcacttgaggccaggagttcaaggctaccctgaccaacacagcgaaaccccgtctctactaaaaaaaaaaaaaaaaaaattagctgggtgtggtagaacgtgcctgtaatcccagctactcggaaggctgaggcaggagaatcacttgggcccggggtgcgggatggcgggcagaggtagcaggagctgagatcgcaggcaccattgcactacagcccgggcgacagagcgagattgtctgaatcaatcaatcaatcaacaccctccccctccccctccctctccctctccctccctccctctctctctctctctctctcctgtggcggtcagagtaaaattgagagctcactttatgcaaaagactctgctaagtgctttattcctattgtctcactttattctctcattaatcttataaagcgcagtcagactctcccgtttatagatggggaaattgagtcttatagatgtaaagtcgcacacccaagaccccacaactcagaaaggggctacctgcaattcagatggaggtatagcaaggcgcagagtcctgtccagggagcccactgtgagaccccccgactgcctcgcagtcacctgtacacatcatgttgggatcgccgaggggcgctgcagcgatccggtttctggggctgcgtctgggtggcacgttcagaacggggacctgcctggttcttcttcccagcccttcccctccagcacccggcaaggcccagtcaacacgagcaaactcggaaatcctggctgaacccacgaccgctgcatatttccattttagaaaaacacggcaacaacaactcaaaccaaatcgttcagaaatgagaataaagaagcaccgacaaaggaggcgattgctggggccgctcgggggaggagccgggtgagaggctgcagggagggcagggcatgcgccggcgacaacggggttcgcggtttggggggcaaggcccgggggaagagagagaacaggggtgcagcgccgcggcggggggcgtgaggatggagccgggggaaggggggctctgagatgtgaaggggcggggctggggctttttggtctgaaggaaggagtctcacgggacggagggacgaagatttcctggggtcaggggcgccaaggggcttcggggccggatgcagcggagggggcccggggcctggggggcgtggtgagagctcagaggggtctcgccaagcagccggctggcgctgaggggaccgaggaggggtctggggcgaaaggaccgcgagagggcgcccagggcgcggggggcgcggtacctgcaggccggcaaagtcttccaaaccggtcccgccagacccgcgcggccgccgcccccgtctcggccgccggagctgctgccgcgccgcgccctcacgtgacccgcgtacgcgccgggggcggagccgtctcagacccgcccccaccccccggcgtccccagcgcgccggtccgtcccgagtgcgcgtgcgcagcggttgcctgggcgaccggggaagcgttgggctgtaaagactagggcgccagcggctggcgaagaaggaaagagggtactctctggctgggctggggccgtagcgacgtccgccgcgaacctgggccccccaaagctgcggggcgttcggtgtcgccgaagtaaacatgcaccctgagccctcggagcctgcgacaggtggtgcagcagagctggattgcgcgcaggagcccggcgtggaggagtctgcgggtgaccacgggagcgcaggccgagggggctgcaaggaaggtgccgactgccccccagggagggcggtgggcgaggggcagacacggctaggcgctccagcccccttcccacaccacatacccgatcttcacagccaaataataacaataataataatggtagcaagcaacgctctgcagtaggggcttctctcgccatttcgtactgaggaggaaacatacttaagaggttacaaaacttgcaccaaacagataaccctcggctagtcagtgacagaagagacttggccgggtgcggtggctcaacgcctgtaattccagcactttgggaggccgaggcgggcggatcatcaggtcagtcaggagttcgagaccagcctggccaacatagtgaaaccctgtctctactaaaaatacaaaaaatgagctgggcgtggtggcgggcgcctgtagtctcagctacttgggaggctgaggcaggagaatcgcttgaacccgggaggcggaggttgcagtgagccaagatctcgccattgcattccagcccggacgacagtgggagactccgtctcaaacaaacaaacaaacaaacaagcaaacaaaacccaccagactcaggcccagacagtctgggtctccagagccccagccctaacccaccacgctattctccctggtcccaactttgatgctttaaatgtgtccctttattgctatcactatgtaagatcaaaggctttctctccctccagactgcatgttgtgtcagggcaagacatcttgattgaatttggagtctagtccagtgcctgacctagggtagagagtccgaatgaagacttggttctggggtcagtgtgtgatcccctcaccaaagtttgccagaatggacttgaaagataaccttcatggccaggcacggtggctcacgcctgtaatcccagcaatttgggaggcagaggcaggtgggtcacctgaagtcaggagttcgagaccagtctggccaacatattgaaaccctgtctttgctaaaaacacaaaaattagcagggcgtggtgacgtgctcctgtaattccacttacttgggaggctaaggcaggagaattccctgaaccccggaggcagaggttgcagtgagccaagggggaggctgaggctgcagtgagccaagatcacaccactgcaccccagcctgggcaatggagcaagactccgtctcaaaaaaaaaaaaggaaagaaggaagcctggcttcagcttctgctcccactagacttggtgccctaaaggaaaccttttagtgattacattaaaaaaccacttgatttgtgttccagtttctgaacgcaggcaacaaataaaccagctgatttgtgttccaggcaacaaatatatcttaagcatcaactgtccagatgaaccttgtatgaggagccatagggaactggcattactcagtggaaagacactggtcttggagccattgacactgggttcaagttgaggctcagcagctggccagctttatggctgttggcccagagcttaacctctcggagccttagtctcctcatctgtaagctggaataattatacaggagtataaggagagaattataattaaatgtcccagcatatagtgggccattattaaatggtagctcttgttatta

SEQ ID NO: 1242973 - DNA, 4001 bp, Homo sapiens
atatgggtcgaggccaggccagaacgggctccgaggcctagcctggagcgaccacagtgagtccctacccccagccagaccctgactccatactcagttctcagaaaggagaggctgacggggttcccagccccgcaatgtgaccctgagctagaccagcccttcccatctcccggcctctgttttcccatctgtcggatggggtagggtgggaactaaatggcctcgaaggtccctcggactctaggtcttcagaaggcaggctcctaacccttcttcggccgcagaggaaacccccctctcgcacaccccctccaaggtgaacttctctgaatggccaaatccggggatccacggcccagtctcaggagggggttgggcgggcatgggtgttcactgacgtggagggaccccgggaccacagggggaatcgaggggccccggccctcaccgggctccagcggatcaggtggtctgtgcctgggtcccccaccagcgcccatagcttgccgaggaaggcaggcacggggctggggcctggctccgtgggcagcgcagctggcgcttcctgcatggtgcagtctcggcccggctctgcgctcgggcccggccgctgcgggctcgtcaaagccgcggaaagtgctgcgtttgccgcccgctccgccctactccgccccggggcgccgggtcaggcgggggccacgtgcaagcccgcggggcggggctcggacagcggccgaggcaccagcaggcagaaaaggctggctggatgggatgtgtggagtggagtggagtggaggggtggggtggggtggagtggggtggggtggggtgagatgagtgggagacttgggttcgagtcccacccctctcggtccctctatttccttctttgttctacaggagaaatcgccggtgcgcgacctggtgtgggctgggcaagtcctagaaggtaatggccagaggcacagtgaagccccaggcagggcaagcagataggaagggggggcagggaagcacgccccctcccgccgaaccccgggacgtagtcattccaagggtgtgagtgccccgaccctgaccccccgcagctgtgtcgtccagaggctcttgaggaaacccaacctctgccgggatggctcctccggtaccccgcgcgttccctgtccttccctttcagatccgaccccgcctttaataggacgcagaaacactgcaggatttgtttatttcacactcacccttgaggcccggcccgcgcccgtgccctccctctccctgcgccggggccgcggagctgcagagtccgcagaggggtggaggcaagagaggggggcagtgtgtccaggaccgagcgggtggggcgtctgcagagggtgagagcagcgagtggtctcagggcgcccaggactggtcccgatgccatcacagttcccaactcggtaaagacccggggggcaacaatcccaaaagaaggcactagcactcggggcgcgcctggacaccccccccgttccctctcagagcgcttacgtccacggggacgggggagagaagtcgcccaatcacgccacgagcgtaggcctccagggatgcggctcgcgcgtgagcttgagggtataggtgcgcaggcgcgggcagtgcgcgcggaaggcgtccagcaccgagtggctcaccacgcagaaacaatgcacctcgcgcagggccgcgcagcgcgccgccagctcctccagcgcggcgttcagctcggccgaagcggctgcgcgcacctcgagcgcgcacagggttgcggcgtagtggtgtgctgcgaagcgcactgggcctacggtgtcgcctgagaggttgaggcgcagcgcagccacggggacggctggctgcaggacgcgcgtcacgctctcagcgggcagcgcgggctccagctccagctccactgccagcccagggtggcggcggcgcaacgcgacccaggcttcgttgggcagcggggacgcgcgtgcatcttcggggcacgcgcaccgcagagccaagagcgcgaaaggcgctcggtctggcgccgccagtgcttcgaggatggcgtgcgacaaactggctaggtgcaggccgagagcgcgcaggcgcgggcaggcctccagtagctcgagcactgagccgggacccacgctgcccactagggtactgttgtccagaaaaaggctgtggagctcgggacagctgcgcgccgcctgcagcaccagcgcgtcgtccagtgtgaaggacaagcgccgcaggtcgaggtggcgtagctggctggccgccccgcatacagcgtgcacagcctccaggacgtcgcggcccgcgtcgaagagcggtttttctccgcggcactccaggcgcaggcctcgcagccccggggcacggcccgccagaaccatcagcagctcgatggccgcccggcggctcggcttcctcgatggctcaaattccagccgtaggttgtgaatgtggtcgaggcaggcggacagataaggtggcagcatgccttccagctcacattcgcaacttgggttagagccgtgcagaaaaggcctcagctgagtccctgcgaccagcggagaagcctctacccaccccttagctggggttccagctgccatcccatttcctgcctccctccccacgtctctgttcagaccacgactgttgccccaaaggagggaactcgcatcctatccttttagaagatttcagtggcgtctgccacaggatgaaacctggacatggagagccaatgatattttaggaactgggctttctcagctgtctctaaggagtcttggcatggcctccggactgctaggttcgaattctgcctctgccattccctagctgagtgacccgtgggaagtgattaagtctctttgcctcagtttcctatctgggcaatggaggtaatgataatacctatctaccacacaaggttttcataaggattaaattagttaatatatgtaaggcacttaaaaacaatggttggtatatactaggcagtcaatacgtcagcaattattattattattttgagataaactgttactctgtcgccaagctggagtgcagtggtgccatctcggctcactgcaacctttgcctcccgggttcaagcgattcttgtgcctcagcctcccgagtagctagaattataggcgcccaccaccatgcccggctagtttttgtattttagtagagacggggtttcagcatggtggccaggctggtctcaaactcctgacctcaggtgatccacccgcctcggcctgccaaagtgctgggattacaggcatgagccaccacgcccggccagcaattattttttaatatgggggagtcaacctgaatatctacctagcccacgactccacggagaaggtgagtgggcggtggggagaggagtgtggaggagcaggctcacctgatttttgtgtcgtgccacacggcgctgcaggtagcagcggcggcccaggccctgcagaccctggcggcggcagcacggtctctcagggacaggtggcggaagatgagtgccagcacctcctctggcagtccctctccaggctcggccatggcccagatccggctggggtgggaggatccgccactcccaatagctccggcctggagagagacggacgtctctgaggtcgggaaggcgcaaagtgttgcaggaagaccgagcttaggtgtacaaatgcttgtggcctgaggaactgagggcctctcagacagcgtggggcatcagataaccccgaaacttgttcacaaagcagatttcaccgcctcacctactaaatcaggctctccggaaagggtaaggcccaggaatctgcatttcaacaagcccctgtgactccacaggttccacgttgagaactcccctcccacttttttttttttttttctttttttttgagacagggtctcgctctttacccaggctggagtgcagtggcgcaatcacaactcac

SEQ ID NO: 1242974 - DNA, 4001 bp, Homo sapiens
tcaaccattgtggaagacagtgtggcaattccccaaggatctagaattagaaataccatttgatccagccatcccattactgggtatatgcccaaaggattataaatcatgctgctataaagacacatgcacacatatgtttattgcggcactattcacaatagcaaagacttggaaccaacccaaatgtccatcaacgatagactgagttaagaaaatgtggcacatatataccatggaatactatgcagccataaaaaaggatgagttcatgtcctttgtagggacatggatgaagctggaaaccatcattctcagcaaactatcacaaggacaaaaaaccaaacaccgcatgttctcactcataggtgggcaacgaacaatgagaacacttggacacaggaaggggaacatcacacaccggggcctgttgtggggtggggggaggggggagggatagcatttggagatatacctaatgtaaatgactagttaatgggtgcagcacaccaatatggcacatgtatacatatgtaacaaacctgcacgttgtgcacatataccctagaacttaaaggagaataaaaatatatacatataaaaaaaagatcacctgctaacaaggttgcaatttggcagtttcttgtaaaattaatacttaccatataacctatcaatcctactcccaggtatttatcaaaataataacatatgtccatacaaatacctgtatgggaatatttataacagttttacttattaataattaccaaatactggaagcaatcctaatgtccatcagctgatggtacatccattcaatagaatagtacgcagcaatgaaaagaaatgagctactgttacatacaacaacatggttaaatctcaaaagcaatatgctaagtataacaagccagacaaaaagtgctatgtatgttataatttcatttatgtgacattctggataatgcagaatcagaaaacagatcatttcattagttgctatgggctggaagtggggaaggggcattgactacaatgaggtacaagagatactttctgagctaatggaatcattctacatacttattgcagtaagtacatgatatggtttggctgtgtccccacccaaatatcatcttgaattataactcccataatccccacgtgtcatgggagggaccccatggtgggtaacttaatcatgggggtgggttttcctgggttgttctcatgatagtgactgagtctgacgagatttgatggttttataaaggggaggttcccctgcacatgctctcttgcctgccgccatataagacacgactttgctcctcctttgccttccaccatgattgtgaggcctccccagccaagtggaactgtgagtcaattaaacctcttttctttgtaattagcctcagatatgtctttattagcagaatgataacagattaatacagtacagaactttatattttcaaaactcttggaactgtacacctaaaagaggtgaattttaccattttccccggtaagacgggaaatgattcgtccaaggcctggggctaattccaagttggaagcgaggcagcacctcaggccttctgcccttcaggctacctgtctggcaggggaatcccaagaacaaaaatccgaggtcccgtaactttcatgggagtgagaagtggctagggaaggctgaggaggggaggggtctggaaagtctggagaacgcctgggacgcagggcgaggacgaggacgaaaagaggggacgccccggttagcccccatgtccctcacactttgaccccacaatctctgcgaggacctctgaccttggtgcactccgggtcccacgtttattctacctccattccccgccaagaccccgcgtccaactcacagaccccgccgccgctgaggggctccatacccagcttgaagccgcccgcactctccatgcgccgcccgagctgttgccgtccgttgccacggtaaccacggagccgcacagcctagcaagccgcgcgatgattggaggaggcaagcgtcaatagcaaccaccgccccagctgctaggtgcaaaagaatttggtttccaaggattcttcggacaccacctctccccaaagccacacttcgccaggcctagttctttaaagatgcttcgtgcattatctcattgaacacctgcctcctgcctcccagtgttgctgtggaaatctcttatctctacaggaatttttaacctgtggtcctttgacctcttcaggaggtccacgaacccccttaagttataagcaaaagtttgtggccatttacccggtcagatggtccatagctgtagattctcaaaggagctggaaccaaaactcaggttgccccatgcccgagacggcgcaagagtataaatcccacatccattaaccccatcttccttctcagagaaaccagacaaatagagtgtggttcttcctagacttcatttacatttattcaaaccatgacttgagacatctcccaaatgctttaactcttgaccttcagtcattcattcatttaataaatatctattgatcactaattgtgggtcatatatttgtcatagggacacttttctcagcattgaaagatagcaattgtcaaggcaatttcatagaagcataaacaagatcatttcaggttgtggtactaaacaaaatgtcaggatgtgataggaagtgtcaagggtgatgagcccagtagacaggtggttagggagggtgtctttgaggagacagttgcgtttgagctgagacatgggaagataccagctatagaagagcaagggagagggtgggcagcacaagaaaaaggaatagaaagttacaggcagaaatgagtttggagaattcgagaaaatgaaaagtcaatgtggctgcctcaaaaagacacactcagattgcccttccctggctcttcacaatactgtctccttctcctccgtacttccttgctctgtcctccatcacactctctcatgtcaccttatttatttccttcaaagctcttgtaactttttattgtctgtgagctccatgagaacagagactgtgtcccccttatagtatccccagcacctaaaatagtaactggcctggcgtggacactaaataaatatttgttgattgcatgaatctacacatcacaatactaggaactgtggttgactgggagatacaacagataacaagatgaagatgcttcctcctttgtgaaccttaaatgcttgtggaataatttaattacaaactatgtgggccaactaattgcgtgcagaattgaatgatttagactgtaagtgctgtggggaaacattgaaggattcccttggtaatgtcttcattctttcaattatatttagttcaatttcacaatattgaatgcctactctatgccaaacactgttgtttataacaatgaacaagacagacaccaactttgcctacagaacttacagtctactgctgtactactgctccactacagttgcctctcatcatttatggctatcgaccactgaatgtgtagctggtcctaaatggaatgtggagtaagtgtagactccaaatttcaaagacctagtgtaaaacaagaatgtagaatatctcattagtatttttaaattgatttcatattgaaatgataatgcttcagatatattatgttaaataagatatattattaaaactcatttcacctgtttttttctttttttaaatctggctgctagaaagtgttaaattacatatgcaccttgtattatattgctagtggactgtgctggtctagtgggagcttaatgctatttgaataaacaagtgaaatctcattacagatgttaaaatagacattttggtagaggcatgataaatagcaaatttcaaataaagaacatagatgaagaatttagaagtaaaacaagttaggcaactcttaaatcttccgcacactgagt

SEQ ID NO: 1242975 - DNA, 4001 bp, Homo sapiens
ctccgggatggggctccacggtggactctcggggacaggcacccggggccaccctacaaagcctcgccctccaggccacagtccagagccttcggcctgcgcagggtcctcgctgcatccagcggacggtactgagaagccatgcgctggcggtttgatgcaacacgaccctcagggccgacccagcgagtgaccaaacatagcatgtttttgttttgcatctctcgtttgtcccgtttcgcctcgggggtgtgatggcgccgcccacctccccaccccgcccattccaaagggactctcccagctaccggaatcagccgcgattcgaggccgggcgggggcgacagccatagtccgacgagcgacctggaccccgcgccaagcccgccccagcctcgatgggactcgcgaggggccgcggggactcggcggcgccgggatcgtgggaggagacgggagggtcccgacgcccgccaccggtcacatcctcggccccaaaccccggcctggctcctaaggacctgggtcggccgccctagccctaaggccactcacctctgccaggccgctgagccgccgcgcgttgccgggacaacggcgcgccaggaacgcggaaatagccgaaggtgagcgaggcggccccgaggactcccgaagcgccccgagcggccggaaagagccgaaggcgatcgggcacgcacgtgcagctccgaggcccgagcgtcgggggccaggttattccgctctgcaagagagaagcgggacgagctttttctaggagagacggcggcgcagggccggcgtctgggtcccctttgtgtggagggcgcgctgtcacagccccgatcaaccgcggcatcctcccctcctgggcgtgttcccttcccgtgcatcccgaggcggagcctttccagcacgcggcggtctcggcccaggccttccctgggctccgcttttctagtttcggagcggagggcgtgggtcaagcgtttctgggaaagtcgatgcgctcggcagtgtcctgaggtgttgggtgactgagggcctgttccatcgccgggccccggactccacagagccaagcgaggcagggagcgcccccaagaaagcagctggcggccggacgcggggctcgcgcttgggcttccagctcttgggggctggggcgggcggatcgttggagcccaggagttcgagaccagccttggcaacaaggcgagatcctgtctctaaaaaattacaaaaattagccgggcgcggtggcgcctctagtctcggctacaggaggctgagggaggagaatcgcctgagccccgggaggcggagactgcagcgagccgagatcgggccactgcactccagcctgggcgacagagcgagtcaaaaaaaaaaaaaaagaaaagaaaaagaaacactggaatttgagccgggcgcggtggctcacgcctgcaaacccagtactttgggaggctgagacgagcggatcacttgaggtcaggagttcgagactagcttggccaacatggtgaaaccccgtatgtactaaaaacacacaaattagcgagtatggtggcgcgcgcctgtaattccaactactcgggaggctgaggcaggagaatcgcttgaacctgggaggcggagcttgcagtgagccaagattgcgccactgcactccagcctgggcgacagagcgaaactccgtctcaaaaaaaaaaaaaaagaaagaaagaaacactggaatttgaaaaacacccctctgctttcttgctatgaagaaaatgaccaagtgcccagcgccgctcggctacgctaacgtagcgcagaagcacatactccacccaggaaagggtgcgcttaactgcctcagacgtgcttccacacttctcagaactcaggttcgcgcccgattccacactccgagctaccacgccgttttcttctcacgtatccgtcaacactgctgcggccaatcacagcacgggccctggcctattggctgtctgtccaccaatccaaagagacgcacagtccgcaaggtcgcgaggctggcgtcacaacactactggcgccgcgggctcgcccccgacgcccaccgggctcgtacgtgcgagcgcgcccgcccagcgctagccaatgggagcgccgttttggggagacgggcccgaagaaacattgggggtgctcgcccccgcgttcgtcgccccgccccgcgcgcccgcgcaccccggccccgcccccgcgcgccgtccgtgaggtccccaccggccgccgtagccggaactgctgctgagggcggcgggccggcttcgctagggtgagtggcggcagtatctgcgtccgcagcccccgcagccgcgcgccggcccgcggaggggacgtgccggggctagcgccgctcgaccagtcgcttccgaggcggacgaccagcccggcgttgcggcctccctgcagccggcgctcgggggccggggctgcccggcccggctggttctgcgggcacccggggaggccccgggaagccaggctgccgcccggcgttgatgaaaaaggtgaccaaggctgggcggcggggctgtcatggcgaggcccggccggggggtcctgtcgggcggcgcgggagagcgcggggggggcgtcgcttccacagcgcccggtacagccacaactggcctcagggcgaggaggcttctgcgtccccatcccgagacgcgagccggtgcggagcgggacggggctggaggagactgcgcctccgagaaaagtccggtctcgttggaggttctcgcgaaaaggaggccatccccctgcttgttggcccttagggtaaagtctggacggcgtcggtcctttcagtggcgaaaagcgcttccccgtgctcggtcggcgtcttgggtgtggagcccggcgagcgggcgagttcactctggtggccgagtttgttttgcttgggtcccgggtggcctgcgggcggacaggtccctgggcagcggggttctcagcccgagacgaggtctttgggggtttaggtttcttgagtggaaagaggtgggttgagggggaagagtgggaagtcttgccacgaaatcccttaagttggggtgtttgtcgtgggtggttttgttctttggcagagttttttttaaaactagcatgaactcgagattccctagaccaattccgacaggagaaaacggccacggatccttgtgtgatctgcacctcagggtgggggcatcattgcgactttgaagccatttcccgatctctcggaaagagaggtcctcgcccgcgtccctgtatttcgtggttggtgttggtgcctcgatcgtgtgttcctttgaagtggaaatgcccccgttctcaacagttgagttgaacgcagggtcagtatctgctgaggaatctaatcttcagcgtttttgcttcctcacacgtgcccgtcccggactgtttctgggctgcagctcttgctgtgtacctgattgtctgagtttatttttgagtggctctgctttctgggctgcagcatttttagtcactgcactttgttgttgacattttacagggcggtgggtagcaaagttgatgcaataattttattaattgttgccaagagttttaacaccattgtcttctaccgcttcttgcacctggacccggacataactgggctgtcactttcccgggtggttccaacctgttccatgcaacaggctcctttgttgcaaaagcatttttaactagtaaatccccgcagcagctcacatttcccaccctgggaagaagattcccagagacccggagctgattattctttatgtgtgttttaaaataagcaggcgggccggcggcattgggccaccatggagttccccgtgcgggcaggcgagcccgcgcttctcccgtcccggggtggatccggcctcctctgtcctcctccagggccagctctgggggccggcgcgtggggcaggtgcgcggggcccgggagccccgcgcct

SEQ ID NO: 1242976 - DNA, 4001 bp, Homo sapiens
gttcctgctcaggtccagctcccggagctcggccaggccgctgaagagcgcgggctgcaggtaggccagcctgttgcccgccagcaccagctcgcgcaggctgcccaggccgcggaacgccgcatcggggagcaccgccaggctattccagccgaggttgaggtcccagaggctgccgaggccctcgaagagcccgtcctccagcctgctcagacggttgttgctgaggccgagcgaggccagcgcgggcgtgtgtgcaaacgtgccgagtgccaggctgcgcagctggttccgctccaggtgcaggtggcacaggttctctaggcccagcagcgcctgtggctccaggctgcccagctggccgccctgcaggttgaggaagcccaggctggagaggttctggaaggctgccggggggacggacgagaggttgttgccgtccagccacagggcttgggtgccgcccgggactccatcaggcaggcgcgtgaggttcctggagctgcagaagacgctgagctcatccgcgtcgtcatcgtagctgcagacacaggcggccgggcacgctgggccctcggcttcccccggcgttccggggtctgctccctccaggctgcgggggcccagtgccacccaggacagcagcagcagcgccagggccaggcctcctgcggggggagaggcttggggaggcggcccgaggagggctctgcccgagtgagcctgataccagcacagccggaagcggcgctcaggtgtgaactgaggctcgaggtcacccgctgagatgcgaagaagccggtgagccccacaggtcctccggctcaaaagctgacactgcgcttcccaccccatgggacagaggagtggccgccccgccccgctgcacagacgctcagggcttggctctccagctgtgcgcaggccacgtgggctcggccaggctgggtctcgggctgtctggccatgtggcagccgcacccccaaggcaggcgcttgagccaggccagtctgccacgttggcctagaggaaggggagggaactgagccattggccaaggtccggccattttcagaatattctgcagcaggtcttggtgggcactcgctcactgccctcagaggctggacagggagctgggcacctcctgccccagttaggccccccagcggggtctcacctgcctgcatccaggccttggtcgggtgctgcgggaggggaccggggcaccgccgtcgggggacaggtaggaaccctggaccgtcggccaccaaagctcacattgcctttcaggacaaggggccacaggccccacagacccagccagcaggctcccaagcagcgatgacccaaaacctctactgtatggcccccccatcctcagagagtgtggaattgctgggatggtggcaggggcgaggtggggcccccccgactgcccttctgtcacgatgggttgggagtggcctgagccagctctggagctcagctcaggcttgggggtggccgaagctgcaaggggtcaccccacagagacaatggggtgtgagccaacgtctcctgcctgggccgggcccacaacgcgggccgtgcggggcacttcccgccgctgtgctgggagctgaagggtccggcctgcacctggccctcctcccctgtgccgccgccagcgcccttagggtggaggacgggacagagacccctggtgccaggcacagctgtgtccccctgccaaccccagcagccgcatttccgactgtgggctccccagagtcccccgcagacccccagagctgagccccccagagcttccttgggggctaccccggcctctccccagcgggctcagggtcacagactggccacccctagagtgggtggcggggcactcgggggcctcacctttcctcagggccatcctgcatgcagggcaggctgcaggcaggcagcgagggagggtacgtctgctgtgccggccacccctgccctctggatttccccactgcggggcagcccgcgcctgtcacctggctggcccaacccagctggccctggctctgttaaccccctcgtgccgggcggccggcatcagcccggagccctggggtgcagacagtgcagggggtgagggagcttcagtcggggcccgaggtagccgtaatgcggccctgggggctgacggccagtgcccgggccccctgcagggctgactggggagggctgggcagccaggttggggtggggaccccttgcagcagcctgggaggggctggggcttgaggccggtttggggagcccagggttttaccaggtcctgttgcgggcagggggctcctcgggcagctcctggggtcttgagcccacccctggcctgagtagccagccgtgtggggctaaggggctgccgccccttccccgtgccccacccagccatccacccgccctcccgggggttccctacagcctgggtgggagctgccgtttgggcttcaggcccacggtgctgtccagggcccaagctcaccctgcctctcccgtgaccccaggggcgctggtgtctggccactgccccgcccccagcctcttctaggaatgcctggcagggctgcaggcgcctgtttgcttttgccctgcgccatcctcggggagtgtgtgggggtggcctggccatgggagccaggtcttgtgcctcagacaagcctcacctgccccttgctgtcccccaaggctctggtgagggcctggccgccccacagtcaccgcttgtgtgcagagaggccacaggaatgtgtgcccagccatgtccaaggccacccctgggctccgtctccacctgcctccagaggcccctggttcccctccacctgctcaaaccacttcccaaccagtcgctctctcccccagggcctgagcaggtgcagcccctcccctccaggtccctgcaggcccctcccctggctgtcagtggggcctgcccaccagtccctcggcagtgggaaagtgtgcagggaagcagccggaaggggtgcaggcgggggcacagccagggctcggggagaccacagttttccagggccctaccccatcctcagctccggcctcacctggcaggccccgtgcagagctgtgggaagccgccggcccactgtcatcgtcttccctttatcgagaattgatcattttccaggtggcgtctcggctcctcttctgagaaattatagatccacggggagaaagtccacacccagaaagacccacgatccgtttactcagcagaaaacgcagactcagcaggggcctggggcctgaggccagcagacccgggcggcctcctctcaggagaggtccccgtgggggccccggcctccgtcaggccgcgcaccccacctgggagccccacacattccaggtgggaagggagaatctgtccctgttctcttcctttgggaggggccgggtgtcgcgggcgggcagagcctcaccagggttgcggcagccgcgtaagggggctccaggcctctttgattcctgtggtaacgcagaggcctacacacacattcagcccattgagttccagaggcccccatcactgccgccacccccaatggccccactccccgtggcctctcccagctcaaggccggtggcctcccaggctcctccatgagccgcattctgcctgtcttcaggccgcacagggcctggctttctgtaggacaggacccgagggaggtgaggccatgtctaggtcacgtcctggaatacatctgtccctgtccttctcactgtttccagcaatgccaccgagccctgtggctctgcatcctgtgggtgcatacctgtctacactcaggccagtggcgagtggacggtggccatcacctgggagaccgagcatcttgtccagcacacagccacagggtcatctggcctcagccactgctggtttcggtctcttgccgattttctagttagctggctgatttctgatttgcaagat

SEQ ID NO: 1242977 - DNA, 4001 bp, Homo sapiens
gtgggagaaaaccaattgtaatgatttcctctgtgagcaggaacttgtgatgaaactgtggttccctcccccaaccagttaggcaacctattaacaaaaaagagaagtttggatatgtcacaccacagcctgcttctgtgaatgatttcttttaagaatcctcatattctaggaattgttttttaaacacagtatccaatgaaaaggttgaagatttatttcctccatggagggaatagaaagattattcttattattttaaaaaaccatattgaggctgggcatggtggctcatgcctgtaatcccagcattatgggaggccgaggcgggcggatcacgaggtcaggagatcgagaccatcctggctaacacggtgaaacgctgtctctactaaaaatacaaaaaattagccgggtgtggtggcagatgcctgtagtcccagctactcgggaggctgaggcaggagaatggcgtgaacccgggaggcggagcttgcagtgagccgagatcttgccactgcactccagcctgggtgacagagcgagactccgtctcaaacaaacaaaaaagccatattgaaagtaggaagagaactaattcttgacatttaaacaaagctgtctctctatctagtaagtaagaagtaagtaaatgtcttgctctgttgcccaggctggagtgcagtggcacaatcacagctccctatagcctgaaagtcctgggctcaagtgatcctcctgcctcagcctcccaggtgggtgggactgcaggtgcagtgcaggtgccatcacgcccagctatttttttttcttgtgtagaaatgggggtctcattatgttgttcatgctggtcttgaactcctgagctcaagtgatcctctcaccttggcccccaaagtgctgggattacaggcatgaaccaccacgcccagcccaaagctttattatattagatttcaaatttctaacatatcaaagtagcgaagtagtacagtcaaccccctgccatcacatggcttcgacccaatcttgtttcttttctcctcccacctactccctcactcccatattattttagagcaaatcccagccattttatctgcatctttcagaatatatctctaaaagacaggaattcttctttaaaataatgctaattaaaatagtctatgaaagtaatatatacttattagcaaaaaacaggttattaaaagtagaagcaaaaagtcacccatagtccttttgcctgaaataactcccattaacattttgatatatttcttcacagatgagaaaaaattaagaactttccccccttccctgccctataatccaaattgtgtgggcaaatctgagattactagatgtattggaaatcctttctctttcatagataaaaaaacagaagtagacagaattttaaaaatagatatactatgggatggctattggagtcatggcagttttttttttcttaaatgaaaagtacttttatagaaattgttctttgaaaatattcagcaaataatcatttattgctttctatgtgcagatcaagtttgtatgataattaaattattgataacttatacctacgattttaagaatattttcaaccctttggtcagattgtctccaattagcataatagcaaagagacttttcaaggttaatatgaaactttttctcagctatttttttattgtctatttctcaggggaaaaaggaaacttatcctcttaggcagttttcataatgttatacatttaaaaattaatctgaaggagcttaaaatataaatgcattaggtgaaaaatagcagttgatttaaataaaatgaaggaggagaagaaaaagaaccttaccgacacaaaatagaatgagattggtttgcagatggcgagcgatgttgcttctgctcgcagtccccatttctgtgtatgccggggcgggttggggtgtgtatttgaaaggaaagttggctttcttttttcagaagggaagaagagctgaagagaggaacctcttatgaaggaaccataatcaggaactttttgaaattgtgcaaggatggcttcaccatttaacattgagattttggcctggagcacatttagaaatgtgcatatcttttttttttccatggattttacagttgtcataggtgttagatgtttctgggtgagattttgatttacacctagcacatatttccaggaaggagtattgtttgacaaataattcgtacttggatttttcagaacagttcagtcactgtctagggtacctgctctgggtgccactctgggccagtaactgctgggaacaaagaacagcagaaggagaagtggctttgtgtagagatgagaaaagttagtaaacaacacattctaatgcagcgaataaataaattgtctgttattaactttttgtactccagttttgaatccaaagacacctgccttccccccttttttgacagggtctctatcacccaggctggaatgcagtggcaagattgcaggtcattgcagcctcagcttcctgagtagctgggactacaggcatgcaccaccacccctggctaatttttttttttttttgtagattctgtgttgtctaggctagtcctgccctcaagcgatccccctgccttggcctcccaaagtgttaggattacaggtgtgagccaccatgcctggcccaaagacccccttttaatgtgttgagaaacaaatatgtgggccctctgtcctctgtgtcctctcccccagcacttagtggtgattcagtaagggtcttctttgtaaagcagcagaaacagactcaggctgacttaaaaggaaatttatgcaaacatttgaaggtagatcctagagtcactgggagggctagtgaatcttgtgtggggtccacagccaggaagaatgcctcaaatcacaccataaacaggtctgaagaggatgctactgccactgccaaacactaggtgccatcagccctgttgtcagcatcgctcaaccactgccccagccccttggtctcactgccattgctccacccccagagaaggagaagctcacatccccactactctgggtcactggctctccattccagggcatgggcaagtgtgcctggcttaggctgcgtgccagtgcctcagctgcacggcaggccaggaaagcggctcccaggccttgtgtctctcccagactctgggcaggcaattccccagacatgggaagagcgtcatctgcaccactgaaaattatgaaaaatctccccaccatgatatgatgtctgtgcccttggcatctgctcatgatatattttctcattaacagaaagttattctcagtctgttttgtttttttttttttttttttttttgagacagagtctcgctctgtcgcccaggctggagtgcagtggcacgatcttggctcgctgcaagctccgcctcccgggttcacaccattctcctgcctcagcctcccaagtagctgggactacaggtgcatgttgccatgcccagctaatttttttgtattttttttagtagagacggggtttcactgtgttagtcaggatggtcttgatctcctgacctcgtgatccgcccacctcggcctcccaaagtgctgggattacaggcatgtgccaccacgcccggcctcaatctggttttaacacttcaacagatgtatgtagtttttgtatcaccatagcacctaaaaagtacccccaaagttaaatatactgtcatctctgtgtgtgtgtctgtagtcagtgccaggtttgtatgtgaatttgaggaccttccctagtccccttgtcccccaggcatctcctgctcataggtttggaaatgactgatagaggcttcatctctagtccaagaaatgctggacggtgtatccatcctactgttccatctctctctggtcctggagcttaatgtttatgaaattgttctgaaaaggcaaagaatgagtcaa

SEQ ID NO: 1242978 - DNA, 4001 bp, Homo sapiens
ccacctgcatgcactgctcgcggctgcgtagacctttctggaaggacaccccagaattgggtccatggctggcctggaccagggctgaacgggagaatgtcgcattgaatgttggcctctggggatgtgttcatcagtttaataatacacgtacacttaaataattgtttaagaaacaggggtacttccaaggaggttgggaagaggcagcctgcgggggcctgaggccagtgatagggtaagggaagccgggagcaggacagggagccaaggtacaggcagccgtgtgacaccttttctgcagctttaagggctggaagaggtgctgagctccttctacccccaactactgaggctggagatgaggagaacagtggggggctgtcctccagacacggggaatgcccagaccccaagggtagtgttgggggaggcatataaataacaataaatacacataaatagggggtgccctctggggagcacacgtgtccagtctaggggccccacggcctcggcggtcacactgaacggggcagcacgcaggtgcagccgacggggacgtggatgaactcggtgtggaaggcaaaggccccaggtgtggggagccccgagccgtcgcgggagcagggccggcggcgcagcaccagcaggctctggagcagccgcacggagttgagcgcagctgtctcgcggcccgtccgtgcatcgatacagcctctgcacaggcactcggcgaaggccagcttctgtggatagcggtcctcatccgtgtccacactgcgggacggggtgcacagtgagtctctggccctaccctgtcctcctggaggcccctctcccctcagggcccctctccgtgtactcaggataggacctgaggcagcgagggctgagccacacgggcttggggtgcagtcgggctcacatgtggtggtaatccacgtctccccagggccctccaagagcacagagcagggtccggaggcctctaggagcctcccttccacttcatcacccagccccacttctgcaggagctcaggtgacgggcccagaatttccccaggggaccctggccacctaggacagtgggaggcagggcacggccagccgcaagcagcagctcagccgtccaggtcaggagggccggagggagggagctcaggtggccacgcccacttgacaggtgagaaccaccaaggcccagagagctctccgggcagtcagggccccgccaggggaggggcagccccacgccacagcggaatccccaggtcctcaccggtatctccagggtgagatggagcgctggtgggtgtctgcctccaacacctcctccggccgcagcaccgggcactgggtcgtagctgagggcctctcgtgcctccccctgtggcttgctgcctccaggctggacaccagggctacaggcaaagcctgcccccacttggcacctcgagccagcaggtgtgggggggcctggccgaggggcagttcctcagccgagtagcagtgtggggtaccgtgactgtgggggtgccccctgagggaggggtcatggtgggccaggcatgtgtgcagccaggtcagaaacaggaggccggggaggagctggtgaaacaggcaggtgggtggttaggaggtgcccagggcagggggcacctcacttccacctcagctttccttgttcccagcggaaagatggagtacagccctccctctatagatggggaaactgaagcccagagaggctagcccttcagcccaagacacccagcatgccagcgctccgaggatctgcagctgcctcccctacccccagactgaggggtttcccagaccccatcccaacaccctcctcccaggctcagagaaccccagcccttccatgccaggctgcacatccaagcagcatccatccgagcggcatgtggagaggctcaccgtcatggtggcggcagcggggcaggctgggcttggagcggcctgcacacctggcggcaatcccacaggtgcacctggccatgcacctggcagcagccgctcttatacctgaggccacacctgggggaaattccggcaccacttcctcctcgggaagtgcccagctggggcgcttcttccttctctggtccccgcagcccccgcctgctgtgcatcaggacacagacatgcaaggaggccccgggaggcgctgtcctgttacccccctcccccgagagagactccgcccaacctgagcacctacacagggtgctgccttgtctgacattctcaaactttttttttttttttgagacagggtcttgctgtcacccgagctggagggaaatggtgctgtcccagctcactgcaacctccacatcccaggttcaagcgattctcctgcctcaggcttccgagtagctgggattacaggcaccccccaccatgcctggctaatttttgtatttttagtacagacagggttttgccatatcggccaggctggtctgaggctcctgacctcaagtgatctgctcgccttggcctcccaaagtgctgggattacaggagtgagccactgcgcccagccttgaacctcctataagagggtttctgcttgcgtatccgtcagcaccttgctgattcaacttgtaggttttcatctggacctgatggtggcggggcgcttttgcaccctatacagttcttctccgtctgctgctggtgggtgccaagggtggttcagtgttttagctgagatggtcaagatcaggtgaggctcacgtgcccccttcacccaggtgggagaggtcccggagatgggggaggcaggcacgtcttcaggtctctgttgggtttctgtgttgtttttttttttgttgtttttttgaggcggagtctgactctgtcgcccaggcggggagtacagtggtgcgatctcggctcactacaagctcagcttcctgggttcacgccattctcctgcctcagcctgccgggtagctgggactacaggcgcccgccaccacacctggctaatttttttgtatttttagtagagacggggtttcaccatgttagccaggatggtctcgatctcctgacctcgtgatctgcccacctcggcctcgcaaagtgctgggatcacaggcatgagtcactgcacccggcctgggcttctgtggttttattgagaaaaaagttcaagctaaaaagtctgagttggaggtgtgaggagtgaggtgtgaggtgtgaatgaggcatgaggcgtgaggcgtgaggtgtgaggtgtgaccagcacacacaggaagctttatgtaagcggggccgggagctgcctttggcctccttgatcggtgaggctggctgggggtgggggcgctggaggtgcctttgtttccccggaaagggacagctgcagccagaacttgggaaggtttgaatgccgggggtttgacgtcatcctgaggagggttgtcctggagtccccagggcccctggccacatcagaggtgggggaatctgtccgccctggtcccctcagcttcggggtgagggcgggagggagggtgcttgtgtgcccccagcctttcctcccctgccgcggtgcagatgtgttccacggaggtgtcctctaagctgaaaacctcagtctctctgaacacaaaagctcccaagtcgggtggggctgaggcagcactgggacccctgggccctccagcacctcctcttggccgctgtgtggctctcagcttgtctgctgtgggcctctgggggtgaaggaggctgtgccccagggttaacagtctgggaggaatcaaagacagattgctggagtccccagggctgctcctcccgacagtgcccctgcccacccaccctctgcttgcatacctcctgtgacggggagctcactatccgtgctggtttcctagggctgtgctaaccatgcaccacaaactggggggtgtgaaatgggagaagtttattccacgaggccgtggagctgggcgt

SEQ ID NO: 1242979 - DNA, 4001 bp, Homo sapiens
aaagccagtaaattggcttttttatgtttattttttagacaaagtctcactctatcgcccaggctggagtgcagtggcccgatcttggctcactgcaacctctacctcccaggttcaagcgattctcctgcctcagcttcccaagtagctgggaatacaggtggccgccaccacgcctggctaatttttgtatttttagtagagacagggttttgccatgtggactaggctggtctcgaactcctggccacaggtgatccacccacctcagcctctcaaagtgctggaattacaggcatgagccactgcacccagccatcaataaattggcttcttactgaataataaatccaaagttaacccacaaagttaaccactgctgaatacttaagataaggttagcccaataatgaggctccttactccatcacaaagcccagattagcccactcgggagcatgctaggaaatccaggcctgaccaaacagagacaacctgacctcctaatttgggccaggatggagaaggaacctctttggggagcagagtgagtttatccagaaagagtgccctctactgtcttgggcagaggaatgccccaccagtctggcgatgccaggcttctcctgggacttgtctgtttcacccaccagctctgtgtctgtttgaggaagtgccagccagagggcagtggtccacctgcccagactcaggagcccctcccagaccagcccctatagacaagaatggagctaaagctaaacctaagagggatgccccatgcaggacccaagtcacaggcatggctttctccagacgccatccctgactccacaaggggaagatcctcctcctctgtgccggggttcccaaagatcctactctggccccatccatagttccctctgacctccctcacagagccatcaaagaaccctggggcagggcacaggctggggggccaggaaggttcagatgaccagctgtgtggctccgggccagtcccttgccctctctgagccttgtaaagtggaaacagcaaggcctgcttccaggcttgtgagaattcaaggaggtgatttgcataaaaccctgcagatggcccccatcacataaacactcaaacaacagctgtaattgatggagaaggtagagcctcagaaacagagggggtctcagaatgatctagccaagagttgccaaaatatctcatatccaaaattttggccatatttgtatattgtgtgcactgttgtttattttaatacatattttaatatattttctatagataagcacacttaaaaatttaactccagcatcatcctaagcaataacatcactactcaaataaaataatgttgaggtagatgcagtttcaacctgcttttaggaatatgaatcctgtgtgattccaacccctgcagaggtcctgttatcacactttgaagatgtggcctctgatcgcaggagggggagtctgtgtctgccccctcactattctgtccacatccatcaccccagccacggtgcgagtcctgacatagctctgtccccgtcactccctgatggttttatcttgaccacagcacagcaaaaagtgcaaactcctttgcccagattcaatattcctcatctccagcttgaccaacatagcaagaccttgtctctaccaaaaataaaaatagaagtaaaaataagttagccgggtgctgtgtgcctgtggtcccagctattcgggagactgaggaaggaggatcacttgagtgccggaggtccaggctgcagtgagccatgattgcactattgcactccagcctgaatgaaagagtgagaccctgtctttaaaaaaacaaacagacaaacaaaaaactcctcatccctcctaatttcttacctctgcctacatcacagagccctagggatgtggagggggtacctgctgcttctgcctgcccggcgtctcttcccaaagagctcctctatctgagctgcctctagtggtttgcctgaggctgactccaccccatgctccacaaagtgggctcctgacccaggcttggccaatcaaaacaccccatctgtctgaccacagtgattgcatcagggatggatgtcaacccaggcaaggccagtgaaagcagtcctgagattttttttctagaactctagaaaactgacactttttttggtatcttctcagagcttgtagccatctttgtcacctcttagagacagcctccttgaaaatgacagccatactgagaaatacaggtcaggagtccccatggcatcatgggaggtcctggatccagccatatctgatgtccaccctgtggatttctcattcccatgagccaaaaaccacctatgttgcttaatcatgttgaattctatttctgtcacttgccaccaaagatccctgacacagtggagttgagaaaagggctcagaatttgaagccagaagatcttgaagcaaatagtagctcttctctggctcttttattctctgaactcagttaccatctctgaaatggggacaatagtgctcactgcacctggcagtgaagaagaggctgtgagaaagcagatgtggtagtgcttcacggactgtgaagtgctgtaccagtgcacgggtttcctgccattactggctgactgccctgaattactcatcgtctccccggcagcccaggcttcgtcatgcatctttgcctctgctggagcagactcctgccctccaacacctttcccctcccatcctctcaactcaactttcatggtccatgtgctgtatccctgcagccacactggagtgttccagaactcctgccactagcctattgcgtttgaggttttcactggtgctactattaattatccacttactattgatctttaccttgcctcctattttttactccaataaacatgtctcaaaaatattatatcatgaccatcagcagataactggcatgaaataggcagtgtgcgccatgctggtcaagacacagactatggagctggctggtctcagttcaaatcccagctctgccacttataggctttgtggccttgggcagtttgcttaacctttctgggcctcatctgtaaaatgggagtaatgataatcacagcacctgcctcataggtctttgggagaattaaattagtcaacatttataaagcatttagaacagtgcctggcatatagcagatattatataagtgttacttaaacaaaacaatcaacttaccataaaactaaatacaatacaacataaaaactaaatacaagaaaaacaaaggcagtaattgaattttagtgacatgctactgcctgcctgagagtcctagaaactggagatgtggtttgtctttgtttaaagttaagaaagggaggccgggcacactgggtcatgcctgtaatcccagcactttgggaggccgaggtgggaggatcatttgaggtcaggagttcgagaccagcctggccaacacggcgaaaccccatctctactaaaaatacaaaaattagccgggtgtgatggtgtgtgcctataatcccagctactcaggaggctgagacaggagaattgcttgaacccaggaagaggcggaggttgcagtgagcagagattacaccactgtactccagcctgggcaacagagcaagacactctgtctcaaaaaaaaacaaaacaaaacacaaaaaaagagagagtagtgtttaagatgcgatagcaccaaattgagaatcttgcctcctccatcagcagggcaagtgatgaaagagcctacgctttcactaggggatccagggatatttaacactgtttaaaataaactgctcacttctgggaaacatcagcttaaaaacacagactttctccatcactccctcctcatgctcccacagcaccaaatggggcctaccctaattccactgccttctctgccccgaatccatccccttttgggtctttgcacgcaggctga

SEQ ID NO: 1242980 - DNA, 4001 bp, Homo sapiens
ggagcaggtgagcagggcctctcctctgggggttgcctgtcctcgtgggaatgaatactccgccatccccatccaatgctgcttcccagaagctacccaagcccatgagtcttgttttcatgttattctatctagcaggtggtggccttgtcctacagactggcatccaatcccagctccatgtcatctggtcacagttaacctggggcaaggttgtccccactaagcctcactcttgtcatctgtgaaatgggctgaatgaggctgcccgcttcacctgttgaggactatgggagacgcttaagtgcctacaacatggtgagttggcactgggggggccagagccaggtggctggccaggcaggaccacagcagcctgagtgtgtcgctccccctctgtcactcttggagtcgggcccgtctccatgggctcaaagcttctcatgccacaaactctcttcctcaaaggaaaagggccattaggagcacagctttcaccctgttcggccctgaggtccccacaactagctccaccaggatgggggtaccttggtccccatttcatagatgagaaaaccatggcttctcaaggctagaagcagagagacttgcccaagttcaccgagtgaggaaggcgcgtggccgggttttgacctggcaggttttccccgactccaccatgtgcttctgaaagccccactctccccccagggaatcacagatgtcctcctcgcagcagcctcctggctttgaatgtcccgcacctggtcttctgccttcactgagcagagacgtcattcctgcggcaagtcctaagttcccgctccccagggctcctccaccaggaatgttcttcctttcccatccttcaaggctcagcctccactgacctccccaccctcctctcctccacatgcacagggaactgggttggcctcttaccatccgacccgttccccgtgcttcatgagaaagatgcagcgacagctcatggggtcacctggcttgactgcccgacctgctacgtcccagttgagtcaccgagggaaaatcactctacctctcgcagcctcattgcctcatctgcgaaatgggcacaccagccattgttttgaatgactgggtggaatcaaggtggtaagacatagaaactgacacagaatgggtcccatcaggctctacacccatgcccgtcacctcccgactcagccgcccagaatcgggtgattgacatgttatgtttggcttgaaactggctttccttccccagcccgctacattttggaggctggttttcaagatagagggtcgtctcagccacatccctgctgctgggcccctaagctgtgctgaacaagagaccccaacctcatttctgcccagcctcactgcatgaatcttctttgcctcagtgtccccaattgtgacttgggcacagtcctccgagccctcccactgtgacactagatgcagcaggcagggaacagtccctcctgggcagagaaggcaccctggtcccagcagaaaaccagggctggaattaccttctgtttcggcttctttctcagaaatccattccgtgtgctgggggcagtctgatgggcttctgggggtggcagctgggttcagcgtgggggtgacagatgagggtctgagaaagcaggcagaggcctggggtgagaatccacacccagcccgagtcaccaatcaggctgtcataagacctgtcactctgatgacgggcagctgggcctccaggcaggtgtcccacagagcagcagacagaggaaagagacggcaaggaaggtaccaggcggccgcagcagggatgcacgggccgcagacagacagacacagctgcgtggctgtcagccacactcagggagaggcaggcagagggccagacgccgagcttacggtcactcagcagagagacgccagtgggtctgtctgaggccgctggctgccacccagccgcatgtgcagagtggggaggaagaggaggatgtggtgagccgctccccgccagccccgcccacccgcagctgggctcctcctgggagggagtgagaaagaggtgggagggggcctggccccacagcaggcacccactgtcaccaaaggtcacctgcaagtaagacatttggggccatcggggtgacacttccctcttagggacctgtgacatcatccccacaggcctctcagtcataacccatgaggcaggcagtgcctcctggagccaccacattgcacagatatggaaactgaggccagaggtgtgaagatgtggcacagtttcacccgtggacccagagtcctcagtggccgactccagcccctcagcacagagagaaggaccagaaccttgcccaaggtcccacggaagcccctttttcagactttgcaaaccagcctgtttcttattcctgagccttacctgcctaatagggtctgagcttgggaccctctgctctggcttgacccccatgcctctctgcctccatttcctttggatccagtctcctgctgcagagctccagggagcaggaccccttgggcacgtcacatcacctctctgaatgcctcactttgcccatctgtcaaatgggggcacctagctatgaggaagagggcagacattaacacatgagaattcaagaagaaaatagagaaaagaaattctcaagagagttttcatcttgctaacatgccagaggcccatgagagggtcagatgtttctggaagacattcaagaaaccaggagacaaaatgtaacaagcttaatgcctagtgcagtctccaaaggagagcaagagaattgctaccaccaccaccgctaccaccaccaccactaccactgccatcaccaccacctcgaattactttggtgcctacatgatctcactttatcccacaaagtgtgaggcagacaagattagtcccattttacagatggagagactgaggcccagaggagtgaaacgtcacacaagccaagaagaattagagctgggatttgaacctgggtgtgtttgattcctaagcttataccaggctgtgaaaacggggccataccaggatgaaatgtcccacagttgggggaggctattttatgctgttttgataacaagatgcaatttgtagctctccctgctgactcatttttgggaatcaacttgctgttgactttcgtgaccactccagagaaaaaagagaaagcgtcttgctattctttctttctttttttttctagctgtttttgaggaacttggtacaaattcccctgtggttgatttgagggatcctggccctgtagagctcttcccagctaccgaagtgtgtcgtgttctctggagaacgaaccttgggaagacaccagcttttgtttttctttctcttgatcttcggggtgaattctctgataacatgcactgaaatttgtagtggttgaaagatcaggagaagagacagtaaaaagagctaatatttgctgaaagctcattgtgtgccagggttttaaggactttaaagatgcaccctctcatttaaacctcagaaatactcgagaaggctgtgtgcagcggtgcacacctataattccatcattttgggaggctgaggtgggaggatcgattgaggctaggagttcaagaccagtctgggcaacatagcaagaccctgtctctataaaaaaatttaaaaattagacagtcatggtggtgcacgcctgtagtcccagctactctggaggctgaggtgggaggaccacttgagccaaggagctgaaggctgcagtgagctatgactgtagtgctgcactcaagcctgggcaacagagcaagactctgtcttcaaaaataaaatccccaaaatgaaaaagaatgagtctagaagatagttatcatcatcatcatcatcgtccctgttttacagatgaggaaactgaggctcagagaggttaagtgacttgtccaaggtcacacagctgatgagtgcc

SEQ ID NO: 1242981 - DNA, 4001 bp, Homo sapiens
agcctcccaaattgctgggatcacaggcatgagccactgtgccgggacagagactggattttgacccccataaactcccttggccaaatgcctttttcagtgagcaacctgcacaaccacgtgtggcagcctcagtgctattgttctccccaatttgcaggtgaggctcagtgaggttgacttgcccaaggtcaaatagccagaaggtgggaagccaggactggattccaggtttttccaaatgcagagcccatgggttttccccagagaatgcagagggaggcagccatctgccccaggagtgggcacaccatgttctggcaaggattctttgggctcagccaagcggctctgatggcttgaactggccatgaggtccccagggatgggctggcaatgccagaggctctattccagggagtcaaaaggacaggtttgtccagtttccaccacggcaggtggatcctagcagggtaacctgcctggggcgaatccacagtatgggagcttttttttttttaagacagattctcactctgtcacccaggctgcagtgcagtggcgcgatctcgactcactgcaaccttcacctcccaggttaaagcaattctcctgcctcagcctcctgagtagccaccacgcctggctaatttttattatatttagtagagaggggttttgccgtgttggccaggctggtctccaactcctgacctcaggtgatccgcctgccttggcctcccaaagtgctgggattacagacatcagccactgcgcccagcccagaatggctgaattccgagtgtgcttcctgacctgtgttttcctggaaagaggggcagcggatgggcgctctaggaagagggcagcattcatcaatttccccctcagggagaggaaatctagcaagcacaagagttacacaattctcctcgaaacacaaaccaaaactggcccgaagtccatcctgctctcccttctctccctgcctcttccctgtcctctctcaatctctaacccctgggctctgctcttcgaaatgtcccctgataaaggtgaaggggagcttctagggacatctacctccctcgtgggcttgcagatgtggtgggcgatgcctaacgtaagatctctggcattcagactccctggttttggggccactcggaccctctgacatcctggagacttaaggcagagtggggttcttcctagctcaatgttggggacagggtgggtgcccccaggccctggtggatcaagcccaaccgtaagtgagctgtgccatctccaacctgacctctggagaccccagaccccctccttaccctctgcagctgatcctgggtcattggctctggcctttgaaggctctgtctccatcctccagcctttggtccctacctgccctacgtggcatgttaccttctccactgcctactgctctggttctagcccctgagttctgcagccaccagccgcagattggacctctttccaacatcaaactaaagacctttgacccagtgaggctgctgacatcttggtcccagtgctccacttgtgccagcacctcgttctgctcttcctccagccggccccattctcagtcttagccaagctgtttggcttctgcttattcactccaaactcttcatttatctgcctagacctggtccttgtcaaattgctggtccaaccctccccattcccactagccaaggcctccttctcatcctctgcccagccctgggtcagaccaccaccccactgccccaggcccccacccagtcatgccagcctcccttcccatgcagcagccagccgaatcctcagtcttggccaagttgctgctctcagctctcgaccccccatctgcaccagccaagctcgtccattctctgcccaaactcaaccaagccccccacccctggcttcaaactcacgccagccaaggtcgcctgccgtctggcccatggcggggcccagcctctttggtcagccatctcctgggtagggggggtcttatactgggggctgtgcccggtttcactttccgtcctgcttgtactttcagctttgtgttcactcattcttccctctcgccaccccttgctaaaatggggaaatgtaatttcccttcccggagggggtgggaggtatgatggggggtgacgggaagctggggtttcgggacatccaagctccagactcactgctaagctcccacgtccagccctgtcctcaatgtcccatgcttgggtgagccatccagccctattcactggttgatcccagagtcccaaaccccctcctgattctcggctctgccaccatcatcctagggtctactgtccttccaaagatggatagccaggtaaggggattgcccacccgaggggattcggggttttgagtcatctgactcccttatggtttaccagatggctgagggaggtggcgcagagagagtcagtgctcagtgggtggctgggatgcacctttgcatggggccaggcagaggctcagcgtgagggtgggattggagctcagtttgtaactagggtcagggctggataaaaccaggtccgaggccatatctgggaccagggttagggttttttccagggccaagggctctgtctccatctttaacctgagtcagatataggatttgatttcagtctataatcaggatcaggaatcagtgtacagctgaactcacagcctagtcccgggccaatgtcccggctgtgtctgtgtttagggtcagagctatcagtgacctggggctttgcttgtggcctatagggttgggtctagagcttggtctttggccaaggtgctgactgggactgggactcagcagggggtccaggcttgggctgggatgagagctcagtcagtgaccaggatcggggctcagcctgtggccaggcttgagttgagtgaggtcaggatcagggctcaaccaggtccaagaataatcttggtgtttctgctctgtagaggccatggtcagggctgggccacatggaccacaggtctcccttccagcacagccccaccctcagccccgccctggatttcccatcttcagggagaggatggggtttcttggtcttccccaagaacaactgctgccactttctttttaggacctgtggggtttccctgccgggtccctggtgtgagatagaaaccaggcggggcttccccttcctgctctctgcctcctcggcctgcctgggcactgcccaccaggccacttgggaacgagcgcaccagggaaataccaacatctgccgagggagcagccccacaggccactggagacggacagggaactggggctggagtccagcccctgtttcctctgcagcaccccccagtggtggcagctcactccccggcagcctatgcagctggggctccccacagcgggtcctggaggcatgccacctgctcacccccttgaccacatggggcctcgcttcggctctctccatggcccctcccaacctctactgtcacccagaactgccttacctctcacatcttgaaccctggctgggcgactctgctctcacctgtaatctcagcactttgggaaactgaggtgagaggatcccttgaggccaggagttccagaccagcttgggcaaaatagcaagaccccgtctctattaaaaacacaataaaataaggccaggcgtggtggctcatgcctgtaatcccagcactttgggaggccaaggcgggtggatcacttgaggtcaggagtttgagaccagcctggccaacatggtgaaaccccgtctctactaaaaatacaaaaactaaccaggcatggcagcaggcacctgtagtcccagctacttaggaggctgaggcaggagaatcgcttgaacctgggagacggaggttgcagcgagccaagattgcaccactgccctccatcctgggcaacagagcaagacactgtctcaaaaaaaaaaaaa

SEQ ID NO: 1242982 - DNA, 4001 bp, Homo sapiens
atacacacacacacacacacacacacacacacacacacacagagacacatggcagaggtacaggataagaggagacagcagtcccaggagcccctcacagcctggaaagaccggccagggctgtcctcgaaacgactcagaaagcgcttctctcaggagccggctcagctgggcaggcccaagagcagggccagcatgggcctaggtgacccctcctcacaagagcagggcctgcgtgggcctaggtgacccctcctcacaagagcagggcctgcgtgggcctaggtgacccctcctcacaagagcagggcctgcgtgggcctaggtgacccctcctcacaagagcagggcctgcgtgggcctaggtgacccctcctcacaagagcagggcctgcgtgggccggggtgtcctccctgcacacacacacccccccatgtacacacacgggaggatggacactgtcctggagcaggctggctcagctgggtttcccacaaccactatggtcccaggtgagagttggccaaggaaaaaatgtttagggacatgacaattgagaaggtaacagcagccattcctctctgatgagctgattaatatttggggtgccaggtaggtccaccctacaacctgccactcttcccgactgccaacatgcagacccacaggtcccgggccattcctgcctgcagacacgtggctgcatccacagaggccagaggcaccccacagaatccccgctgagcccccacgtcaagggcctagtctcgggggtgacatgcctggtttcccccactatagagtggtgacagtcacccacagagtgcgcagggcctggggacatattctgggcagggcagctgtctgcacactttcaggcagcgatggtcccatcccgctagcctgatttcccaggaaccagggtgaaagcagcaccgtgccgacatgcgggagccatgtgtcctccgggtcactgtcctgaacctgagccaggccacatcatggaaacccctattgtcacaggccgaagagctccctggagggtgtggtgggcctagcatttgcggtggggcagtggtagaggatgggaggtcggagggaacccaggaaaggaggaagagacaccaggacccacacaggccttgctcttgggcccacccagctgagccggcctctgagagaagcattctccgagtcgtttccagcagagccctgccccacccctgccccgggctttccgggctgtgaagggctcctgggacaggtgctccctctcatccacacccctgccgttctccagcgcccccgacacatatgacctccagcgcctccactgacactctcaccccatcactatcctcctgccgctgggtgcccctgactgagccctgacacacaggcacctcgggaaatactgagggcacccgcacccttacggtctgttttcagacatgcccacaaaagcacacgcagcctctcactcaccttcgggaagcacatggcggccaaaagttcaaggagccaaggcctgctggcgaggaacaggtgtgaggaaaagaaagtgtctcagagaagcaccctcctccccagagggtcctcaccttcggggaccccaactccccacctgagatgacccagctccactgagacagtcaccttctgcacgcagtcttcctggcacaaatactcagctggttttatggggaaagtggggggtagtgggcggagcctctctcagggcaggaggccttgctgagtgcgtgaaaaacagacagagacagagacagagacagagacagacagagatggagacttacccgagagagacagaggtctggggtccctgggaggaatgagggtccgtccctggctgggcccctgctccctctgagctggggtgggagtctctgagcccaggaatgggctgctttccccaccccaccagcctgagagtggggaggggcagagggaaagtccagactcgggacagctggctggggaaactccctgagtacaggaaggtgacgtcagccaagtgggatccaaggacaaaggaatttggaccctgtccttgcatgaggtgtgccccggctccagaggccagagaaacttctggatcagaaggaggcaggaactgccggacctaagaggggcgccgtgagggcaggggcctgtgcacgttggaggggtggctagtggtgatgtagatctacctgtgggacaagataggaccctctgcagggtggaaggcatcctgccggctgtctgagcttggctgaccaggtccttctgacccttctgggccaaggcaaggccatctggggccgaaggtcactggtctcagcaatcttggggctcccctacgggctcttctagctccacgggttctgaccctccagcctggctgggcctcccacctcctcctcacggcccccagcccccttcccccagctgagcacaaccacgcccttgcctttgggatggtttcctggggccaaactaaggaagtaccacgacaaggggccctaagtcgaagacgtctcttccctcacgatctgcaggctggaggtccaaggtcaatgtgggcagcgtggggtccttctgagggcccggagctgggattctgttcaggtttctcctgcccttgtagatggccatcttcatcttcatcacgttctgcctgggtgtgactgtccccctttcccctttccaaaggacaccagtcatattgaaatagggtccaccctaggccgggcgcagtgggtcacgcctgtaatcccaacactttgggaggccgaggcgggcagatcacctaaggtcaggagttctagaccagcctggccaacatggtgaaaccttgtctctactaaaaatacaaaaattagccttgcgtggtggccggcacctgtattcccagctactcgggaggctgaggcaggagaatcacttgaacccgggaggcgaatgttgcagtgagctgagatggtgccactgcactccagtctgggggacaacaatgaaaattcccctcggaaaaaaaaaaaaaagaagtaggatccaccccagtgacctcattgtaccttaagtacctccataaagaccctgtttccaaataagggcatattctgaggtcctggggcttaggaattcagcatggatgcaatgtatcccattatattctcaaaggggactcggagagacagaacctataaaacacgctccatggagaaatcttcccttgggtgaagtagacaacggttgtcacctgcctgccacttaggagtccattccactgtgcgcaaccgcctttccacatacaggatgtccagatctttccctgagtatcctctgaattgtagtgggagacagaaggaagccactcctgcaccagctaaaagtcatgctttaggcttcagctccaaccctagcccctcatgactctcaaaggccaccatctgaagacatcttgggatccacccagactgtatgtaccctgtttttatagctttatggtgatgcaatttacaggcaatgcaattcactcattgagctgtacaattcaaagcacagaactgtgcagctatcaccacaacccattttagaacatttttatcacctctaagagaaattctgcccttctgagacatcactgccagtcctcatttccctggataaccactcatctactttttctttttctttttttttcttagagtctcgctctgttgtctaggctgaagggcagtggcacgatctcggctcactgcaacctctgcctcctgggttcaagcaattctcctgactcagcctcccgagtagctgggattacaggcacgtgccaccacacccagctaatttttgtatttttagtagagacggggtttcaccatgttgatgaaggagtctcgaactcctgacctcaagtgatctgcccgccttggcctcccaaagtgctgggattacaggcatgagccactgtgtctggcctcatctactttct

SEQ ID NO: 1242983 - DNA, 4001 bp, Homo sapiens
cctgggggcggggacatgtgacctggtgcctgaggggaaatccacccacctgtccacgtcctgattctgcattttgcattttatcataaaatctttctatggcctggtgctgtgaagagaggcagagttggcaccaaagggccggatccttgtccctccagggtcccaggtgtcccacagtgtcctcagtgtcacacgctgagacccaggcccccaacccctgagcagaagtagggaggagcattaccattcgggccttcagcttcttcatgtcatcagagaggacctgcggaaataacggtgacactcagtctccatgtgtcaccttaacctttcctccaggataatttatacacacacacacacacacacacacacacacacacacacagagacacatggcagaggtacaggataagaggagacagcagtcccaggagcccctcacagcctggaaagaccggccagggctgtcctcgaaacgactcagaaagcgcttctctcaggagccggctcagctgggcaggcccaagagcagggccagcatgggcctaggtgacccctcctcacaagagcagggcctgcgtgggcctaggtgacccctcctcacaagagcagggcctgcgtgggcctaggtgacccctcctcacaagagcagggcctgcgtgggcctaggtgacccctcctcacaagagcagggcctgcgtgggcctaggtgacccctcctcacaagagcagggcctgcgtgggccggggtgtcctccctgcacacacacacccccccatgtacacacacgggaggatggacactgtcctggagcaggctggctcagctgggtttcccacaaccactatggtcccaggtgagagttggccaaggaaaaaatgtttagggacatgacaattgagaaggtaacagcagccattcctctctgatgagctgattaatatttggggtgccaggtaggtccaccctacaacctgccactcttcccgactgccaacatgcagacccacaggtcccgggccattcctgcctgcagacacgtggctgcatccacagaggccagaggcaccccacagaatccccgctgagcccccacgtcaagggcctagtctcgggggtgacatgcctggtttcccccactatagagtggtgacagtcacccacagagtgcgcagggcctggggacatattctgggcagggcagctgtctgcacactttcaggcagcgatggtcccatcccgctagcctgatttcccaggaaccagggtgaaagcagcaccgtgccgacatgcgggagccatgtgtcctccgggtcactgtcctgaacctgagccaggccacatcatggaaacccctattgtcacaggccgaagagctccctggagggtgtggtgggcctagcatttgcggtggggcagtggtagaggatgggaggtcggagggaacccaggaaaggaggaagagacaccaggacccacacaggccttgctcttgggcccacccagctgagccggcctctgagagaagcattctccgagtcgtttccagcagagccctgccccacccctgccccgggctttccgggctgtgaagggctcctgggacaggtgctccctctcatccacacccctgccgttctccagcgcccccgacacatatgacctccagcgcctccactgacactctcaccccatcactatcctcctgccgctgggtgcccctgactgagccctgacacacaggcacctcgggaaatactgagggcacccgcacccttacggtctgttttcagacatgcccacaaaagcacacgcagcctctcactcaccttcgggaagcacatggcggccaaaagttcaaggagccaaggcctgctggcgaggaacaggtgtgaggaaaagaaagtgtctcagagaagcaccctcctccccagagggtcctcaccttcggggaccccaactccccacctgagatgacccagctccactgagacagtcaccttctgcacgcagtcttcctggcacaaatactcagctggttttatggggaaagtggggggtagtgggcggagcctctctcagggcaggaggccttgctgagtgcgtgaaaaacagacagagacagagacagagacagagacagacagagatggagacttacccgagagagacagaggtctggggtccctgggaggaatgagggtccgtccctggctgggcccctgctccctctgagctggggtgggagtctctgagcccaggaatgggctgctttccccaccccaccagcctgagagtggggaggggcagagggaaagtccagactcgggacagctggctggggaaactccctgagtacaggaaggtgacgtcagccaagtgggatccaaggacaaaggaatttggaccctgtccttgcatgaggtgtgccccggctccagaggccagagaaacttctggatcagaaggaggcaggaactgccggacctaagaggggcgccgtgagggcaggggcctgtgcacgttggaggggtggctagtggtgatgtagatctacctgtgggacaagataggaccctctgcagggtggaaggcatcctgccggctgtctgagcttggctgaccaggtccttctgacccttctgggccaaggcaaggccatctggggccgaaggtcactggtctcagcaatcttggggctcccctacgggctcttctagctccacgggttctgaccctccagcctggctgggcctcccacctcctcctcacggcccccagcccccttcccccagctgagcacaaccacgcccttgcctttgggatggtttcctggggccaaactaaggaagtaccacgacaaggggccctaagtcgaagacgtctcttccctcacgatctgcaggctggaggtccaaggtcaatgtgggcagcgtggggtccttctgagggcccggagctgggattctgttcaggtttctcctgcccttgtagatggccatcttcatcttcatcacgttctgcctgggtgtgactgtccccctttcccctttccaaaggacaccagtcatattgaaatagggtccaccctaggccgggcgcagtgggtcacgcctgtaatcccaacactttgggaggccgaggcgggcagatcacctaaggtcaggagttctagaccagcctggccaacatggtgaaaccttgtctctactaaaaatacaaaaattagccttgcgtggtggccggcacctgtattcccagctactcgggaggctgaggcaggagaatcacttgaacccgggaggcgaatgttgcagtgagctgagatggtgccactgcactccagtctgggggacaacaatgaaaattcccctcggaaaaaaaaaaaaaagaagtaggatccaccccagtgacctcattgtaccttaagtacctccataaagaccctgtttccaaataagggcatattctgaggtcctggggcttaggaattcagcatggatgcaatgtatcccattatattctcaaaggggactcggagagacagaacctataaaacacgctccatggagaaatcttcccttgggtgaagtagacaacggttgtcacctgcctgccacttaggagtccattccactgtgcgcaaccgcctttccacatacaggatgtccagatctttccctgagtatcctctgaattgtagtgggagacagaaggaagccactcctgcaccagctaaaagtcatgctttaggcttcagctccaaccctagcccctcatgactctcaaaggccaccatctgaagacatcttgggatccacccagactgtatgtaccctgtttttatagctttatggtgatgcaatttacaggcaatgcaattcactcattgagctgtacaattcaaagcacagaactgtgcagctatcaccacaacccattttagaacatttttatcacctctaagagaaattctgcccttctgagacatcac

SEQ ID NO: 1242984 - DNA, 4001 bp, Homo sapiens
ggtgcctgaggggaaatccacccacctgtccacgtcctgattctgcattttgcattttatcataaaatctttctatggcctggtgctgtgaagagaggcagagttggcaccaaagggccggatccttgtccctccagggtcccaggtgtcccacagtgtcctcagtgtcacacgctgagacccaggcccccaacccctgagcagaagtagggaggagcattaccattcgggccttcagcttcttcatgtcatcagagaggacctgcggaaataacggtgacactcagtctccatgtgtcaccttaacctttcctccaggataatttatacacacacacacacacacacacacacacacacacacacagagacacatggcagaggtacaggataagaggagacagcagtcccaggagcccctcacagcctggaaagaccggccagggctgtcctcgaaacgactcagaaagcgcttctctcaggagccggctcagctgggcaggcccaagagcagggccagcatgggcctaggtgacccctcctcacaagagcagggcctgcgtgggcctaggtgacccctcctcacaagagcagggcctgcgtgggcctaggtgacccctcctcacaagagcagggcctgcgtgggcctaggtgacccctcctcacaagagcagggcctgcgtgggcctaggtgacccctcctcacaagagcagggcctgcgtgggccggggtgtcctccctgcacacacacacccccccatgtacacacacgggaggatggacactgtcctggagcaggctggctcagctgggtttcccacaaccactatggtcccaggtgagagttggccaaggaaaaaatgtttagggacatgacaattgagaaggtaacagcagccattcctctctgatgagctgattaatatttggggtgccaggtaggtccaccctacaacctgccactcttcccgactgccaacatgcagacccacaggtcccgggccattcctgcctgcagacacgtggctgcatccacagaggccagaggcaccccacagaatccccgctgagcccccacgtcaagggcctagtctcgggggtgacatgcctggtttcccccactatagagtggtgacagtcacccacagagtgcgcagggcctggggacatattctgggcagggcagctgtctgcacactttcaggcagcgatggtcccatcccgctagcctgatttcccaggaaccagggtgaaagcagcaccgtgccgacatgcgggagccatgtgtcctccgggtcactgtcctgaacctgagccaggccacatcatggaaacccctattgtcacaggccgaagagctccctggagggtgtggtgggcctagcatttgcggtggggcagtggtagaggatgggaggtcggagggaacccaggaaaggaggaagagacaccaggacccacacaggccttgctcttgggcccacccagctgagccggcctctgagagaagcattctccgagtcgtttccagcagagccctgccccacccctgccccgggctttccgggctgtgaagggctcctgggacaggtgctccctctcatccacacccctgccgttctccagcgcccccgacacatatgacctccagcgcctccactgacactctcaccccatcactatcctcctgccgctgggtgcccctgactgagccctgacacacaggcacctcgggaaatactgagggcacccgcacccttacggtctgttttcagacatgcccacaaaagcacacgcagcctctcactcaccttcgggaagcacatggcggccaaaagttcaaggagccaaggcctgctggcgaggaacaggtgtgaggaaaagaaagtgtctcagagaagcaccctcctccccagagggtcctcaccttcggggaccccaactccccacctgagatgacccagctccactgagacagtcaccttctgcacgcagtcttcctggcacaaatactcagctggttttatggggaaagtggggggtagtgggcggagcctctctcagggcaggaggccttgctgagtgcgtgaaaaacagacagagacagagacagagacagagacagacagagatggagacttacccgagagagacagaggtctggggtccctgggaggaatgagggtccgtccctggctgggcccctgctccctctgagctggggtgggagtctctgagcccaggaatgggctgctttccccaccccaccagcctgagagtggggaggggcagagggaaagtccagactcgggacagctggctggggaaactccctgagtacaggaaggtgacgtcagccaagtgggatccaaggacaaaggaatttggaccctgtccttgcatgaggtgtgccccggctccagaggccagagaaacttctggatcagaaggaggcaggaactgccggacctaagaggggcgccgtgagggcaggggcctgtgcacgttggaggggtggctagtggtgatgtagatctacctgtgggacaagataggaccctctgcagggtggaaggcatcctgccggctgtctgagcttggctgaccaggtccttctgacccttctgggccaaggcaaggccatctggggccgaaggtcactggtctcagcaatcttggggctcccctacgggctcttctagctccacgggttctgaccctccagcctggctgggcctcccacctcctcctcacggcccccagcccccttcccccagctgagcacaaccacgcccttgcctttgggatggtttcctggggccaaactaaggaagtaccacgacaaggggccctaagtcgaagacgtctcttccctcacgatctgcaggctggaggtccaaggtcaatgtgggcagcgtggggtccttctgagggcccggagctgggattctgttcaggtttctcctgcccttgtagatggccatcttcatcttcatcacgttctgcctgggtgtgactgtccccctttcccctttccaaaggacaccagtcatattgaaatagggtccaccctaggccgggcgcagtgggtcacgcctgtaatcccaacactttgggaggccgaggcgggcagatcacctaaggtcaggagttctagaccagcctggccaacatggtgaaaccttgtctctactaaaaatacaaaaattagccttgcgtggtggccggcacctgtattcccagctactcgggaggctgaggcaggagaatcacttgaacccgggaggcgaatgttgcagtgagctgagatggtgccactgcactccagtctgggggacaacaatgaaaattcccctcggaaaaaaaaaaaaaagaagtaggatccaccccagtgacctcattgtaccttaagtacctccataaagaccctgtttccaaataagggcatattctgaggtcctggggcttaggaattcagcatggatgcaatgtatcccattatattctcaaaggggactcggagagacagaacctataaaacacgctccatggagaaatcttcccttgggtgaagtagacaacggttgtcacctgcctgccacttaggagtccattccactgtgcgcaaccgcctttccacatacaggatgtccagatctttccctgagtatcctctgaattgtagtgggagacagaaggaagccactcctgcaccagctaaaagtcatgctttaggcttcagctccaaccctagcccctcatgactctcaaaggccaccatctgaagacatcttgggatccacccagactgtatgtaccctgtttttatagctttatggtgatgcaatttacaggcaatgcaattcactcattgagctgtacaattcaaagcacagaactgtgcagctatcaccacaacccattttagaacatttttatcacctctaagagaaattctgcccttctgagacatcactgccagtcctcatttccctggata

SEQ ID NO: 1242985 - DNA, 4001 bp, Homo sapiens
gtccacgtcctgattctgcattttgcattttatcataaaatctttctatggcctggtgctgtgaagagaggcagagttggcaccaaagggccggatccttgtccctccagggtcccaggtgtcccacagtgtcctcagtgtcacacgctgagacccaggcccccaacccctgagcagaagtagggaggagcattaccattcgggccttcagcttcttcatgtcatcagagaggacctgcggaaataacggtgacactcagtctccatgtgtcaccttaacctttcctccaggataatttatacacacacacacacacacacacacacacacacacacacagagacacatggcagaggtacaggataagaggagacagcagtcccaggagcccctcacagcctggaaagaccggccagggctgtcctcgaaacgactcagaaagcgcttctctcaggagccggctcagctgggcaggcccaagagcagggccagcatgggcctaggtgacccctcctcacaagagcagggcctgcgtgggcctaggtgacccctcctcacaagagcagggcctgcgtgggcctaggtgacccctcctcacaagagcagggcctgcgtgggcctaggtgacccctcctcacaagagcagggcctgcgtgggcctaggtgacccctcctcacaagagcagggcctgcgtgggccggggtgtcctccctgcacacacacacccccccatgtacacacacgggaggatggacactgtcctggagcaggctggctcagctgggtttcccacaaccactatggtcccaggtgagagttggccaaggaaaaaatgtttagggacatgacaattgagaaggtaacagcagccattcctctctgatgagctgattaatatttggggtgccaggtaggtccaccctacaacctgccactcttcccgactgccaacatgcagacccacaggtcccgggccattcctgcctgcagacacgtggctgcatccacagaggccagaggcaccccacagaatccccgctgagcccccacgtcaagggcctagtctcgggggtgacatgcctggtttcccccactatagagtggtgacagtcacccacagagtgcgcagggcctggggacatattctgggcagggcagctgtctgcacactttcaggcagcgatggtcccatcccgctagcctgatttcccaggaaccagggtgaaagcagcaccgtgccgacatgcgggagccatgtgtcctccgggtcactgtcctgaacctgagccaggccacatcatggaaacccctattgtcacaggccgaagagctccctggagggtgtggtgggcctagcatttgcggtggggcagtggtagaggatgggaggtcggagggaacccaggaaaggaggaagagacaccaggacccacacaggccttgctcttgggcccacccagctgagccggcctctgagagaagcattctccgagtcgtttccagcagagccctgccccacccctgccccgggctttccgggctgtgaagggctcctgggacaggtgctccctctcatccacacccctgccgttctccagcgcccccgacacatatgacctccagcgcctccactgacactctcaccccatcactatcctcctgccgctgggtgcccctgactgagccctgacacacaggcacctcgggaaatactgagggcacccgcacccttacggtctgttttcagacatgcccacaaaagcacacgcagcctctcactcaccttcgggaagcacatggcggccaaaagttcaaggagccaaggcctgctggcgaggaacaggtgtgaggaaaagaaagtgtctcagagaagcaccctcctccccagagggtcctcaccttcggggaccccaactccccacctgagatgacccagctccactgagacagtcaccttctgcacgcagtcttcctggcacaaatactcagctggttttatggggaaagtggggggtagtgggcggagcctctctcagggcaggaggccttgctgagtgcgtgaaaaacagacagagacagagacagagacagagacagacagagatggagacttacccgagagagacagaggtctggggtccctgggaggaatgagggtccgtccctggctgggcccctgctccctctgagctggggtgggagtctctgagcccaggaatgggctgctttccccaccccaccagcctgagagtggggaggggcagagggaaagtccagactcgggacagctggctggggaaactccctgagtacaggaaggtgacgtcagccaagtgggatccaaggacaaaggaatttggaccctgtccttgcatgaggtgtgccccggctccagaggccagagaaacttctggatcagaaggaggcaggaactgccggacctaagaggggcgccgtgagggcaggggcctgtgcacgttggaggggtggctagtggtgatgtagatctacctgtgggacaagataggaccctctgcagggtggaaggcatcctgccggctgtctgagcttggctgaccaggtccttctgacccttctgggccaaggcaaggccatctggggccgaaggtcactggtctcagcaatcttggggctcccctacgggctcttctagctccacgggttctgaccctccagcctggctgggcctcccacctcctcctcacggcccccagcccccttcccccagctgagcacaaccacgcccttgcctttgggatggtttcctggggccaaactaaggaagtaccacgacaaggggccctaagtcgaagacgtctcttccctcacgatctgcaggctggaggtccaaggtcaatgtgggcagcgtggggtccttctgagggcccggagctgggattctgttcaggtttctcctgcccttgtagatggccatcttcatcttcatcacgttctgcctgggtgtgactgtccccctttcccctttccaaaggacaccagtcatattgaaatagggtccaccctaggccgggcgcagtgggtcacgcctgtaatcccaacactttgggaggccgaggcgggcagatcacctaaggtcaggagttctagaccagcctggccaacatggtgaaaccttgtctctactaaaaatacaaaaattagccttgcgtggtggccggcacctgtattcccagctactcgggaggctgaggcaggagaatcacttgaacccgggaggcgaatgttgcagtgagctgagatggtgccactgcactccagtctgggggacaacaatgaaaattcccctcggaaaaaaaaaaaaaagaagtaggatccaccccagtgacctcattgtaccttaagtacctccataaagaccctgtttccaaataagggcatattctgaggtcctggggcttaggaattcagcatggatgcaatgtatcccattatattctcaaaggggactcggagagacagaacctataaaacacgctccatggagaaatcttcccttgggtgaagtagacaacggttgtcacctgcctgccacttaggagtccattccactgtgcgcaaccgcctttccacatacaggatgtccagatctttccctgagtatcctctgaattgtagtgggagacagaaggaagccactcctgcaccagctaaaagtcatgctttaggcttcagctccaaccctagcccctcatgactctcaaaggccaccatctgaagacatcttgggatccacccagactgtatgtaccctgtttttatagctttatggtgatgcaatttacaggcaatgcaattcactcattgagctgtacaattcaaagcacagaactgtgcagctatcaccacaacccattttagaacatttttatcacctctaagagaaattctgcccttctgagacatcactgccagtcctcatttccctggataaccactcatctactttttctttttctt

SEQ ID NO: 1242986 - DNA, 4001 bp, Homo sapiens
cagatcccccacccgcccactcactgccacccaggtgcaagcatttgcccacggtaaggggtgagggagcctgtgggtccctcttcatccttctcaccctgagccccacacagggtggagtgcctgggggcggggacatgtgacctggtgcctgaggggaaatccacccacctgtccacgtcctgattctgcattttgcattttatcataaaatctttctatggcctggtgctgtgaagagaggcagagttggcaccaaagggccggatccttgtccctccagggtcccaggtgtcccacagtgtcctcagtgtcacacgctgagacccaggcccccaacccctgagcagaagtagggaggagcattaccattcgggccttcagcttcttcatgtcatcagagaggacctgcggaaataacggtgacactcagtctccatgtgtcaccttaacctttcctccaggataatttatacacacacacacacacacacacacacacacacacacacagagacacatggcagaggtacaggataagaggagacagcagtcccaggagcccctcacagcctggaaagaccggccagggctgtcctcgaaacgactcagaaagcgcttctctcaggagccggctcagctgggcaggcccaagagcagggccagcatgggcctaggtgacccctcctcacaagagcagggcctgcgtgggcctaggtgacccctcctcacaagagcagggcctgcgtgggcctaggtgacccctcctcacaagagcagggcctgcgtgggcctaggtgacccctcctcacaagagcagggcctgcgtgggcctaggtgacccctcctcacaagagcagggcctgcgtgggccggggtgtcctccctgcacacacacacccccccatgtacacacacgggaggatggacactgtcctggagcaggctggctcagctgggtttcccacaaccactatggtcccaggtgagagttggccaaggaaaaaatgtttagggacatgacaattgagaaggtaacagcagccattcctctctgatgagctgattaatatttggggtgccaggtaggtccaccctacaacctgccactcttcccgactgccaacatgcagacccacaggtcccgggccattcctgcctgcagacacgtggctgcatccacagaggccagaggcaccccacagaatccccgctgagcccccacgtcaagggcctagtctcgggggtgacatgcctggtttcccccactatagagtggtgacagtcacccacagagtgcgcagggcctggggacatattctgggcagggcagctgtctgcacactttcaggcagcgatggtcccatcccgctagcctgatttcccaggaaccagggtgaaagcagcaccgtgccgacatgcgggagccatgtgtcctccgggtcactgtcctgaacctgagccaggccacatcatggaaacccctattgtcacaggccgaagagctccctggagggtgtggtgggcctagcatttgcggtggggcagtggtagaggatgggaggtcggagggaacccaggaaaggaggaagagacaccaggacccacacaggccttgctcttgggcccacccagctgagccggcctctgagagaagcattctccgagtcgtttccagcagagccctgccccacccctgccccgggctttccgggctgtgaagggctcctgggacaggtgctccctctcatccacacccctgccgttctccagcgcccccgacacatatgacctccagcgcctccactgacactctcaccccatcactatcctcctgccgctgggtgcccctgactgagccctgacacacaggcacctcgggaaatactgagggcacccgcacccttacggtctgttttcagacatgcccacaaaagcacacgcagcctctcactcaccttcgggaagcacatggcggccaaaagttcaaggagccaaggcctgctggcgaggaacaggtgtgaggaaaagaaagtgtctcagagaagcaccctcctccccagagggtcctcaccttcggggaccccaactccccacctgagatgacccagctccactgagacagtcaccttctgcacgcagtcttcctggcacaaatactcagctggttttatggggaaagtggggggtagtgggcggagcctctctcagggcaggaggccttgctgagtgcgtgaaaaacagacagagacagagacagagacagagacagacagagatggagacttacccgagagagacagaggtctggggtccctgggaggaatgagggtccgtccctggctgggcccctgctccctctgagctggggtgggagtctctgagcccaggaatgggctgctttccccaccccaccagcctgagagtggggaggggcagagggaaagtccagactcgggacagctggctggggaaactccctgagtacaggaaggtgacgtcagccaagtgggatccaaggacaaaggaatttggaccctgtccttgcatgaggtgtgccccggctccagaggccagagaaacttctggatcagaaggaggcaggaactgccggacctaagaggggcgccgtgagggcaggggcctgtgcacgttggaggggtggctagtggtgatgtagatctacctgtgggacaagataggaccctctgcagggtggaaggcatcctgccggctgtctgagcttggctgaccaggtccttctgacccttctgggccaaggcaaggccatctggggccgaaggtcactggtctcagcaatcttggggctcccctacgggctcttctagctccacgggttctgaccctccagcctggctgggcctcccacctcctcctcacggcccccagcccccttcccccagctgagcacaaccacgcccttgcctttgggatggtttcctggggccaaactaaggaagtaccacgacaaggggccctaagtcgaagacgtctcttccctcacgatctgcaggctggaggtccaaggtcaatgtgggcagcgtggggtccttctgagggcccggagctgggattctgttcaggtttctcctgcccttgtagatggccatcttcatcttcatcacgttctgcctgggtgtgactgtccccctttcccctttccaaaggacaccagtcatattgaaatagggtccaccctaggccgggcgcagtgggtcacgcctgtaatcccaacactttgggaggccgaggcgggcagatcacctaaggtcaggagttctagaccagcctggccaacatggtgaaaccttgtctctactaaaaatacaaaaattagccttgcgtggtggccggcacctgtattcccagctactcgggaggctgaggcaggagaatcacttgaacccgggaggcgaatgttgcagtgagctgagatggtgccactgcactccagtctgggggacaacaatgaaaattcccctcggaaaaaaaaaaaaaagaagtaggatccaccccagtgacctcattgtaccttaagtacctccataaagaccctgtttccaaataagggcatattctgaggtcctggggcttaggaattcagcatggatgcaatgtatcccattatattctcaaaggggactcggagagacagaacctataaaacacgctccatggagaaatcttcccttgggtgaagtagacaacggttgtcacctgcctgccacttaggagtccattccactgtgcgcaaccgcctttccacatacaggatgtccagatctttccctgagtatcctctgaattgtagtgggagacagaaggaagccactcctgcaccagctaaaagtcatgctttaggcttcagctccaaccctagcccctcatgactctcaaaggccaccatctgaagacatcttgggatccacccagactgtatgtaccctgtttttatagctttatggtgatgcaatttacag

SEQ ID NO: 1242987 - DNA, 4001 bp, Homo sapiens
tcccaggctggtctcgaaatcccaggctcaagcaatccacccatctcagcctcccaaagtgctaggcttacagacatgagccaccatgtccggcccctaacaagttttataacctctattttacacatgaactaactgaggcacaatgaagttacgtggtggaagttcatggtcaggcagctactgcatacaaacccagactagtcagccttctaaagccaagctcctaaccactgcgttagactgtctctgtccccttcctgagaaatcccagagatctcaaatcccctgcccagcccattctgccaccatggccctggaaattagtaaattagtcccgtaattctcatgagtgagctgaccccacacataccgtgagctgagcttcaaaaatgttcttgcccttggcccagagtattcattctggatgcagaatacactccaaggaaaaggggggaaaaaacaataacttcaaataccaaaaaaaaaaaaaaagttatttccacagagttgtccagaaaagtcgaattattcattgcaaaacacctagaagcaactcaacttcatcagcggacagaggctgcccgtccagggatgggtctgttaacttggtgaataccacgtggaccttaaaacaacatctagttagttggtttatgtgcatttaaaagtaagtgcaaagttggccgggcgtggtggctcacgcctgtaatcccagcactttgggaggccgaggtgggtggatcacttgaggtcaggagctcgagaccagcctggccaacatggtgaaagcccgtctctactaaaaatacaaaaattagccaggtgtggtagcgggtgcctgtaatcccagctactcaggaggctgaggcaggagaatcgcttgaacccaggaggcagaggatgcagtgacctgagatgacgccactgcactccagcctggtcgacacagcaagactccatctcaaaaaaaaaaaaatgcaaagtttaaaagcagaacacttcattttaatttcagaaatcccacctgcatgagaaagacttacctatgctgttgacttttttgcctctttcctttaaagaacttaaaatcaattaattttttttttttttttgagacatagtctcactctgttacccaggctggagtgcagtggtgtgatctcggctcactgcaacctccacctcctggtttcaagtgtgtctcctgcctcagcctcccaagtagctgggattacaggcatgtaccaccacacccggctaacttttgtatttttagtagagacagggtttcatcttgttggccaggctggtctcaaactcctgacctcaagtgatccgctcgcctcccagagtgctgggattacagattacaggcgtgagccactgcgcctggccaagtcaattaatttttgataaagtaatacatgcaagtgataatccacacacacagtacattaaggtccaaagacctacggcaatatatagtggagcagcgccccacggcccatgccaaccatttgagaatgtaggtttgtcaattgactaaactctgaagggcacacacagagaagtgacttgctttatggttatgtggatcggctttttcctgcaaggctgatgaaggcaaaggttaaaaattgaaacccagagcagacagttctgctgagatatacttctctgaggcatacttcagagcatcttggctgggactgtctttgtcaagtctagctcaggtccctcttcctgggatcagtgaagcagcagcagaatcggggtggggaagccaggccgtcagaggcagaggaaagccaggcataggagagaaagcctgctgccttcttacctgttcacgtgccaagactcggtctcctaggatttgctggtggccttaaggggctccaggaccccaagcaggtgcctaagggccacgggcagtgggtgccaggttggagaggctgaggctgcccccaacccacagtccaggcttcccgtctgatgagaagggcggggaaagcaggccactgcagctctgctcaggaaccgaagccagcaggggcggggcagggccacgtggcccccgcctgccttggactgtgaagtaggagggagtcttcaacccagaggacccgccaggggactgctctgactgagggcgccagccagttgactacaagaagtcccccaaacccaggccctggctcccaggcagcttggactgttctaagggactaccccagctcctctccagaacactcggcctagacaaaagcttcgtctcataaaactaaaagccaggtgatggggagttgggtgtagtgtgtagtgacatgagcctcagggggctgaggcaggagactctcttgaggccaagagttcgaggctgcagtgagctgcaactgcacctgtgaataaccactgtgctccagcctgggcaatatagcgagatcctgtctctaaaaaaacgaaacaaaacacaaaactgagtgatgtggtggtgactggagtgtgtgtgtgtgtttgtgtgtgtgtgtgggactgggggtccattaggtggaagaaaaggcctttctctgatacatcatccctgttgagcaccaatgagttacccagtctacagatgaagagacatgagctccaaaaggtgaataatcttttttttaattttaattattttttgagacggagtttcacagcagggactacaggcacgctccaccatgcccagctaattttgcatttttagtagagatggggtttcaccatgttggccaggctggtcttgaactcctgacctcaggtgatccgcccatgtcagcctcccaagtgctgggattacaggcatgacccggcatgccttgccttttttctagacaatgtctcactctattgcccaggctagagagcagtggcacaatcacaacccactgtggtcttgacctcctgggctcaatcgatcctcccacctcagcctcccaagtagctgggaccactacacccagctaattatttatttatttatttatttatttttttgtagatacagacgtctccctatgttgcccaggccggtctcaaactgctggcctcaaggaatcctcctgccttagcctcccaaagtgctgggatttcaggcttgagccactgtgcctggccttgggtaagattcctcaccccttttctggggcttgagcccaggagttagagaccagcctgcgcaacatagaaagacccccatctctgcaaataaataaataattaaaaattagccaggcatcatggtagctcatgcctgtagttataactactcgggaggctgaggcaggaggatcacttgagccctggaggtcgaggctgcactaagctatgaccaagccactgcactccagcctggatgacagagcaagaccctgtctcttttcttagaaaaaaaaaaaaaaaaagagagattgagagagagagagagagaatcttacctaagattccccagctggttactgaggtctgaccccaaagccaggttttcctgagggacacaggacctgtcctggtgtaacacgtggcctcagacccagcacttacgggagttgaggtcctttccctcagcaccatcaccaaaggtacagccattctcccttcacctgggtcagagtgggcaactgcaggggcatcttcaatatctctgtcaagttttcatagcaggcttcctgattttactagactgcatttggattcattagggatgggccagtgggggaggataggagaacggctgtgttcaaagcctcaaactatccaagaggggagtctgtagtgtttcactgaatgtgagcacagaatcctggatttaggaaccccttattaacacccagtcttccacagccaacctagtctggagtgctgaccttgctggatgcggtggctcacgcctgtaatcccagcactttgggaggccaaggcaggcggatcacctgagatcaggagttcgagaccagcctggc

SEQ ID NO: 1242988 - DNA, 4001 bp, Homo sapiens
cgggggacctcccttgggagatcaatcccctgtcctcctgctctttgctctgtgagaaagatccacctaccacctcaggtccttagacagacaagcccaagaaacatctcaccaatttcaaatccggtaagtggccactttttactctcttttccaatctccctcactatccctcaacctctttctcctttcaatcttggcgtcacacttcaatctctcccttctcttaatttcaattcctttcattttctgggagagacaaagcagacacgttttatcggtggacccaaaactccagcgcctgtcacggactgggaaggcagccttcccttggtgtttaatcattgcagggacacctctctgattattcacccacgtttcaaaggtgtcagaccacgcagggatgcctgccttggtccttcacccttagcagcaagtcccgcttttctgggggaggggcaagttccccaactccttctctccctctctaccccttctctgcttttctggggaaggggcaagtacccctcaaccccttctccttcgcccttagcggcaagtcccgcttttctagggggcaagaacccccaatcccttatttccgcaccccaacctcttatttctgtgccccaatcccttatttccatgccccgaccccccttcccacttttctggagggtaagaacccccgaaccccttccctccatatctctatgctctcttttctctgggtttgcctccttcactatgggcaaccttccaccatccattcctccttctcccttagcctgacttctcacgaacttaaaacctcttcaactcacacctgacctaaaacctaaacgccttattttcttctgcaatgctgcttgaccccaatacaaactcaacagtagttccaaatagccaaaaaatggcactttgaatttttccatcctgcaaaatctaaataattcttgctgtaaaatagacaaatggtctgaggtgcctgatgtccaggcattcttttacacatcagtcccttcctagtctctgtgcccaatgcaactcgtaccaaatcttccttctttccctcccgcctgtcccctcagtcccaaccccaagcgtcactgagtctttctaatcttccttttctacagacccatctgacctctcccctcctctccaggccaagctaggtcccaattcttcctcagcctcccctcctccaccctataatccttttatcacctcccctcctcacaccctgtctggcttatagtttcgttcagtgactagcccttccccacctgtccagcaatttattcttaaaaaggtggctgaagctaaaggcatagtcaaggtgaatgctcctttttctttatcccaaatcagatagcgtttaggctctttttcatcaaatataaaaatccagcccagttcatgacttgtttggctgcaaccttgagacgctttacagccctagaccctaaaaggtcaaaaggccatcttattctcaaaatacattttattacccaatgtgctcccgacattaaataaaattccaaaaattggaatctggccctcaaaccccacaacaggatttaattaacctcaccttcaaggtgtacagtaacagaaaaaaagttgcaattccttgcctccactgtgagacaaaccccagccacatctccagcacacaagaacttccaaatgcctgaaccacagcagccaggtattcctccagaacctccttccccaggagcttgctacacgtgccggaaatctggccactgggccaaggaatgccggcagcccgggattcctcctaagccgcgtcccatctgtgtgggaccccactgaaaatcggactgttcaactcacctggcagccactcccagagcccctggaactctggcccaaggctctctgactgactccttctcggcttagcggctgaagactgacgctgcctgatcacctcgaaagccccgtagaccatcacagacgccgagcttcgagtaactctcacagtggaaggtaagtccgtcgccttaatcaatacggaggctacccactccacattaccttcttttcaagggcctgtttcccttgcctccataactgttgtgagtattgacggccaggcttctaaacctcttagaactccccaactctggtgccaacttagatgatactcttttaagcactccttttagttatccccacctgcccagttcccttattaggccgagacactttaactaaattatctgcttccctgactattcctggactacagctacatctcattgccacccttcttcccaatccaaagcctcctttgcatcctcctcttgtattcccccaccttaacccacaagtataagatacctctactccctccttggcgactgatcatgcaccccttaccatctcattaaaaccttatcacccttaccctgttcaatgccaatatcccatcccacagcatgctttgaaaggattaaagcctgttatcactcgcctgctacagcatggccttttaaagcctataaactctccttacaattcccccattttgcctgtcctaaaaccagacaagccttacaagttagttcaggatctgtgccttatcaaccaaattgttttgcctatccaccctatggtgtcaaacccatatactctcctatcctccatacctccctccacaatccattattatgttctggatctcaagcatgctttctttactattcctttgctcccatcatcccagcctctcttcgctttcacttggactgaccctgacacccattaggctcagcaaattacctgggctgtactgctgcaaggcgtcacagacagcccccattacttcaatcaagcccaaatttcatcctcatctgttacctatctcagcataattcttcataaaaacacaggtgctccccctgctgctcgtgtccgattaatcccccaaacctcaatcccttacaaaacaactccttttcttcctaggtatggttagtgtggtcagaattcttatacaagagccaggaccgcaccctgtagcctttctgtccaaacaatttgaccttaatgttttagcctagccctcatgtctgcatacagcgggtgccgctgcattaatacttttagaggccctaaaaatcgcaaactatgctcaactcactctctacatttctcataacttccaaaatctattttcttcctcatacctgaagcatatactttctgctccccggctccttcagctgtactcactctttaagtcccacaattaccattgttcctggcccggacttcaatctggccccccacattattcctgataccacacctgacccccatgactgtatctctctgatccacctgacattaaccccatttccccaaatttccttctttcctgttcctcaccctgatcacgcttgatttattgatggcagttccaccaggcctaatcgccacacaccagcaaaggcaggctatgctatagtacaagccactagcccgcctctcagaacctctcatttcctttccatcgtggaaatctatcctcaaggaaataacttctcggtgttccatctgctgttctactactcctcagggattattcaggcctcctcccttccctacacatcaagctcagggatttgcccccgcccaggactggcaaattagctttattcaacatgccctgagtcagataactaaaataacttttagtctaaatagacactttcactgaataagcaaagacctttcctacagggtctgagaaggccaccacagtcattttttcccttttgtcagacataattcctcagtttagccttcccccctctatacagtctgataacagaccagcctttattagtcaaatcagccaagcagtttttcaggctcttagtattcagtgaaacctgtcaggcctctgagcccaagccaagccatcacatcccctgtgacttgcacgtatatacgcccagatggcc

SEQ ID NO: 1242989 - DNA, 4001 bp, Homo sapiens
actgcatgtgttgtaaatggggtgagtgactgcaggttttcctccctgctgcctccccagcgtctccctccagattcagatccagaggcccagggtggggcccaggaatctgcattgttgcttttacaactcaagccaaggtgaatacactggcccaagttccttggcatggcattcaaggctttccacaatgcagcccagcccaactttccatccatctctggcttctgcttactccctaggttctgtacacagtgccctttcacacttcccagcctccgcccactctgtgcctccctttacctcccatcctctacctgccagactcccctgctctactcacaaggctagctcagggtccctgggtgctgggaagcctggcccagtgacctttgaagagctgatcccctctggcttgtggtcctgcagccgctggtgcatccgcaccctcccagccctcacgtctgtcttcctgcagagggggtgctccttgaggcaagcaccagtgcccagaacaccacccagggcctcgcaggagctgaatgagtgctagtgagtgaatgagtggcttagcaggtcacctcccattcatgggctgggctagccgagttctaagaaacccctgcaggaccctggaatgccctaatgtgcaggacaccctggccaaacctacacctgagcctgtttccccattggactttgggattttgataaaggcactgaggtcccagcaaatgccttgggctcctcataggctactgggggcagggaagtgcagtgggtcatgcctcccagagggctggggaaggggagagactagaactggagcagggttagcgctggcctgggggcattccttgaaccccagaagcagacaaactagtggtcccctatcttgcttaagtctaagaaatccagattttgtttaaaaaaaaaatcagggctcagtggctcacacctgtcatcccagcattttgggaggccgaggtgggaggatcacttgaggccagcctggacaacatagtgagacaccatctttataaaataaatttttaaaaataaaataaagatcagattcctgggtttactgaatctgaatctcagggcaaggacctgggaatctgcattttaagcaaatctcccggagattctggttattgtgggggctcctcaaacgtgattgagagatggagagcagctggctctggcgtgggattgcctgggctctagtcctgctgccccacggactcccaagtgggcggcaccttagggcaagttactaaagcggctggggtcttggtgacctcatctgtacaatgtccatgacgcacagcaccggccacagagaagttagtgggaggtttcacttggcatcctttcagtaaaacaagtcccagtcaatgatcgcgattattgggtccatctgatattcggaggcggagaccgccccgattcactgacctactactcaaatttacagttctcagaactttccccaccctttctctctccgaagtcctcactgacttcctgagcgcagggctgggcgccactgcccggagaagaggggctgcgtggcctccgacagcctaaccccaagccccccacccccgcaggccgtcccggcggaggtctcactgccagcaccggctttggggagcgctgggtgtccacgtaccccgggcctcgcgcctccgctgccgttcggcggcaaggacggaaccgggcgctgctccgcgcgcaccgagagtcgcgggctcgggccccgctcggagtcggggtggtccccgtggtccccgccggcggccgagcccttcccgaacgccctcagccggcgtgcccgggcgataccttcgcaacccgatccgcgcgcgggccccggatcctacctgcgcgcccctgctccattcgccgtccgggcgcccaagcgggaagtgggggacccctgggtggcccttccctggcccgcgccgcgcggggctttcctgggcgcggagacccagcccgccccggcttcctgctccccgccccggcgcccggcagatttgcatgcgccgccccgcccggcgcgcccggcccgggtcccggccacctcgcgcccctgtcgctgtccccgccgccgccgccggacagtccgagccgccgtcctctcctgggggcgaccccagcacctcgctgggtgtcttgccgcgcgcttcctcccacgccgtagcccgaggtcacgcccagcggagaactctgcagtggatccccttggtctcggaataaaacgcccacgccgaccaggcctccaggacctgctcctgcctggcctccgcggcctcttttgcgccggggcagttgcgtttggtgggggagggctgggcgactggaatcctcctccccttcctaacagcccggcttccaagtgagagtggttgcacattcttcaataaatgtttacccaactcctactccagccacatttggatagtaaaacagcccttcaatcagtaactagtacaatctgtcgggcactgcaaatgttaactcgttcaatcctggcaactaccctataagggagtgatactatcaccggttttacaaatcaggaaactgaggcacagagtccttaagaaattcaaaatgggttgggcaaagtggctcatgcctgtaatcccagcactttgggaagctgaggcgggaggatcacttgaaccccatagttcgagaccagcctgggcaaccctgttagcgagacccctatctacaaaaattgacatttataaaattttaaaaaagaaaagaaagaaactcagaatcactctgcaggtaagcaggagcaggggtggagctgggattcgaacacaggccccatagaccattaacgtctggacaccataagaacccggatgcagccagatgactggggggaaaacactcaacaaagtatttcaggtcaggagggcccaagaagaaagtagggacctcttagaccagtggggcaggtggtctggaagaggctttttgagtagaggccatttgagctgagactctgaagagcctatgggggaagacttgtgtagggagagggaagagctagtgcaaaggccctgtgggaaccagctcagcctgcaggaggaattgctgaaggccggcatggctgtggagccctgagtgaggaaagagcggagacaggggaggtgggagatatttggactcacactgggcagtgctgagaacccagagagtaatttgaccccctgctgccctcaaggagctctcagtttgagggtggaagccaaggactgcccaatgggatcaagtgctgtggtggagggtgagggttggcttcccagggcaggggccactgcacgtcaatcattctttttttttttttgaagatggggtctcattccattgcctaggctggagtgcagtgggtgatctcagctcactgcaacctccacttcctgagttcaagcaattctcctgcctcagcctcctgagtagctggaattacaagcgtgcaccaccacgtccggctcatttttgtatttttagtagacatgaggtttcactatgttggccaggctggtatcaaactcctgacctcaggtgatctgcctgcctctgcctcccgaagtgctgggattacaggtgtgagccaccacgcctggcccatatgtcaatcattctttcatgtacttggtctgtcttggtcctactgtgtgtctaaccttgtgacaagcgctgatgacgcagacctgaagacatgaaacagacacaatccctgccctctgagaccttacaaccaagtgagcaagacagccaccaacccacccccggaagtgacagtaaagataagtcagttccctggggtcagggatggcttcctggaggaggtgacctctgaccagtgcctgaatcaatgcagaaaaacatgcaggtggaagggacagcatgagcaaatacctggaggtggcgtgggagtgtggaaaaactcccatccttcggcatct

SEQ ID NO: 1242990 - DNA, 4001 bp, Homo sapiens
cacgccattcttctgcctcagcctcccgagtaactgggactacaggtgcccaccaacatccccggctaactttttgtatttttagtagagacagggtttcactgtgttagccaggatggggtttctttcttttgagacagtcttgctctgtcacccaggctggagcacagcggtgctatcatggctcactgcagccttgacctttcaggcaagggatcctcctggttctgcctcccaagtagctgggaccacatgtatacaccactatacatggctaatttttttttaattgagatggggtctcactatgttgcccaggatggaaggctggtttcttctctggtcccaactcaaatgtcactctgtgaaaggcctttcttgagtactccattcagaggttgcctgctgcctgcttgtgtggtctgcaagctaagaagggcgtttttttttttttttgagacggagtctcgccctgtcacccaggctggaatgcagtggcagcgatctcggctcactgcaacctctgcctccagggttcaaatgattctcctgcctcagcctccccagtagctgggattacaggtgcacgccaccacacccgactaatttttgtatctttagtagagacgaggtttcaccatgttggtcaggctggtcttgaactcccgaccttgtgatccgcccacctcggcctcccaaagtgttgggattacaggcgtgggccactgcacctggccaagaatggcttttaagcttttaaacggttggaaaaaaaaaaaactaaagaaaaatttttcatatggaaaaatatgaaattcaaatttcagtgcctataaagttttatagaaacatagccatactcatgtatttgcctatggggtacggctgctactacaatggcagagttcagtaggtgcttcaaagattgtatgttgcaaaaagcttacttaccatctggccctttgcagaaacaattcatcaacccctgttctactataatcattaccgcataactgttttcattaccttcaagtccttcctatgacctaaaattctagtctattgtcttcatttacttattcttcccaactagaatataaattacaagaggccaagggctttgcctatctctgcctctgctgtatcccctgtgccaagcacagtgcctgaaacacaataggtgctcagtaagtgcctgaatgaaagaacggtggaggtggaaggcaagcaactaggcttaaggaccactgggggctgcatcagccaccactgcctaaaaggcgggggcccaggaagcttgctaagtaccaggaaccatgctctccaccaatttttgaagaccttgctcacccgaagagtcttcatccacgttctcgtactgcagaagtcggtctaggaggaaactgaggggagggaaggagacacggacagtgattttccagcgcagcaatgtcctcctgggtacctgtccctcccagctggcccatcggatacttgaaagagcccatgcacttgtggccctactcggggatggggtccgaatgtagatttcctaggaagcacatcgccctccgcccctgcaacgtgcctcacctcttgtcccgggacaccttcagtaatttcctttgcgctttcctcagctcctcctggaagcactcgtgctcctgtatcacgggcaaggggtgcgctgggccaacggtcctccgtgaagggccccggaaccagcggccgctcgccccacccactttacacctgggtaaactgagatcttgtccgcgccaggcctcatcccccacagccttcccgcggcagcactcacgtagatgaggaacttgagcttccgcttcagattccggtatttttttttgtagtccacttcgccgtccgccggcccgttcatgaccggcccgggagtggcgcccagagtctgccctcccgctaccccaagcagtggctgccgtgccgctcccgcctccacttccggagacgctgcaaggctgtgccgtcaggactacaactcccggcgtaccccgcgctcaggggcgtcaccgcacgggccgacctcccgggggacactgggacaggagcgcggcagccactgcgctggggatggcgtagcagcgacgcggtgacgccacaaaaatggcggacgctggaaagcgccgttcctgactctaatgtacttagacacttgaagccacaaaaggatttatccccgaggttcctcatctgctcgcgaggatgccttttctcttctgccttgcgaaataacagcagcctagctgttgcccgtgaccagtgagaaaggcagcgtcgcgggctgattaggtttcacccaaagggtgccggcgccgaattggtttctaacgagaacttttaaaatgatccgttccaaaaaagggtaggagccgcgagaccctccaactgcccagagaaaacaagtctcgtctggcaaagttctcggcccacgcggtccgcggccaagggccaacggtccctcgccccacgttgccgcagcactgcgcgtgcgcgagccgctgtcaaacgcgctgacggaggccgagaagaaaaaaaggcgggagccgtcaatcccgggttgagcaaaatggcgcgggagaaggagatgcaggagttcacccgtagcttcttccgaggccgcccggacctcaggtgcccagggggttggagatggggttggaaagggcgcgggtgggtcgggactccgtcctgacaccatgtccctgcagcacgcttacgcattccatcgtgcggcggaggtacttagctcactcgggccgcagccacctggagcccgaggagaagcaggcactgaagcggctggtggaggaggagctgctgaagatgcaggtgtgccgggccggagcctgggccgcgggaggcggaggcggggcttgctgctgaggaggaggggcctgacggggcgcggtgagcgcagccttggtgcatagtttgccctcttggcgcacacacaggtggatgaagccgcttccagggaagacaaactggaccttaccaagaagggcaagaggcctcccaccccttgtagcgacccggagagaaaaaggttccgcttcaattcagagtcgggttagtgcttcctccctgctgtgggggccttctgcatcgttggttcactcaagaagcattcactgcgcatctcttatgtccccaggcgttagatgagggagcaaggctagtgagtcaggaaccgggaacagcaagtacagatagctgtttcctgctgcccctccaactgtcagggcagggctcgaggcaacctatccgaagtgaagggagaagggacaggaggagcctgtctcaaccctctctcctctccatattccagagtccggctctgaagcctccagcccagactactttggacccccagcaaagaatggggtggcagcagaagtcagcccagccaaagaggagaatccaaggcgagcctcaaaggcagttgaggagagcagtgatgaggaacggcagagggacctgcccgcacagaggggagaggagagcagtgaggaggaggaaaaggggtacaaggggaagactaggaagaaacctgtggtaaagaagcaggcaccaggcaaggcctcagtcagtaggaagcaggccagggaagaaagtgaggagagcgaggcagaacccgttcagaggacagcaaagaaggtggagggaaataaaggaactaaaagcctgaaggaaagtgaacaggagagtgaagaggagatcctagcccagaagaaagagcagagagaggaggaagtggaggaggaagagaaagaagaggatgaggaaaagggggattggaaacccagaaccaggagcaatggccggagaaagtcagctagggaggagaggagctgtaagcagaaaagccaggcaaagaggctcttgggagactcagacagcgaggaagagcagaaagaggcagccagcagtggggatgacagtgggagagatagagaaccccc

SEQ ID NO: 1242991 - DNA, 4001 bp, Homo sapiens
tgacggctcggtgacctgccacgacgagacaggcagctcgcgggacgcgagagacacggtgggcaccggcgtccgggtgaacgacgagtctgtagagcagctgggcttgaggcgcactatgtggctggggatttgccgcggtgccgccatggccgcggtttccacggtaaccgcgttcgccggaaggccgcgacccggaagaagccggaacccgagagggtgggccggcgactcgaagtggacttccgggtcacggcggagctggctctcacgtggaggcggggaaatttcgcccaccggtgagtgccagggcgcgttgcaggcgggccggcgcggggtgtggagattgcaccagaggaagtgcgcggcggggaagatggggaaatgcggtccacccacatccctgaatccgacccctccagtcggtgtgcgcccgctccggcctgaggccgccgcctccagaaagttttcccgcctcagagccggccctgggaccccacgtaatccctcccagtctgttgatgcggaggcttgggcccatgggagccttggaggtacggatcttacttcctggctcccgcgcgtcctgctggtgatcctgccgggggagtggggtgttgctgcacaggctttggagtcctgtgggcggaattccagtctccgttttccacttgctggctttggaacctagggcaagtgaattattgtagtctctggagcttgcgaggtcgggtattcacaaagatcttcacaaggctgtccctggaatttaaaagcggttttggagaaagcgtttgcgtttgcaggagatgcactgtaacgttcttttcctttctccttgaaagagtgaatgcatttggtcgcagggctaaagaggaggatgctatacttttctaaatggcaagagatggggagagaaggggattaagagttgacccgcaacctcccggtggattctttgttcttaccagatctcttggccactcccctattctgaagtcgtcttggctctcttgactgctcccctattctgaagtcgtcttggctctcttgactgctcccctattctgaagtcgtcttggctctcctgactacactatttcaaggtttgcaccttcttctttgcaagctcctttatctctgcccacttatttaaatgccaatacaatagtccccctcccccattatccgcgggcagtacgttcctaaacccccagtggatgcctgaaaccacagacagtaccgaaccctaaatataactgttttttcttgtgtatactatctatgagaaagtttataaattaggcacagtagggccgggcgtggtggctcatgcctgtaatcccagcactttgggaggatgaggcgggcggatcacctgaggccagtagttggagaccagcctggccaacatagtaaaaccccgtccctactaaaaatacaaaaattagccgggcgtggtggtatgtgcctgtaatcccggctactcgggaggctgaggcgtgaaaattgcttgaacccgggaggtggaggttgcagtgagccgagatgatgccactgcactccagcctgggcaacagagccagaccttgtctcacaaaaaattaggtgcagtaaacgattaccaacaatctagctagtaataaaatagaacaattacaacagtatactgtaataaaagttgcatgcatgtggtctccctctcaagataacttcctgtactgtgctcacctattttgggaccagggttgaccaggggtaacggaaacctgggattaggtggcgagctactgtatttcttgaagtcttgtctcaggcttgttctgttcaaggcttatcaccacccatacattcctaactttatgtcgcccgtgtcagcacggccacccaaactcctcatccatatatattcacctgtccagtgaacatctccaagtcatctgtccaatcaagcctgttcttcagccacttgccttcagtacctttgtctcagggattaataccaccatcctgcagttgttcttcagaaattttcctgacaactggtaggacaggttccacaacctccaccaccctgaccttagcactgtccttgcttttatcacctgtatcattgtattacaccttattccctcccacacctacttgcttcttgatgggtggtgttttatcttgttcatctctgtatccctagcatgtgtgcattcattcagtgagtatgtattgagcacctgctatgtgccaggcactgagcaggacactggaaataaaccaggaaacagggcagacagcaatgaatgagtatagttattcccttgactctccaggtgcgcctggagtgggttatgaatgaacttgacctgtagctcaggcctggctctttgaagctgctaagagagagccagctccagtgtggaccctctgagttccgaagctgaggagggctgcaggatggagaagtttttcctttccctcccatgatcctaacttgctatgaaatattttgggatattttgcttctagattctgggaatgtctagtgcaggaacttggctggggactggagtgagagcagtggtccagctggacactgatgggtattgaggaccccagcccattctcacaggtgcttccacgatatctgtccaagacaagctgggtgccctcagtactgtgcatcattgtgactcattcagtgttggcaatcaacttcaaattttaaaaacagtggaactaggccaggcaaggtggctcatgcgtgtaatcccagcactttgggaggctgaggcgggcggatcacttgaggtcaggagtttgagactagcctggccaacatggagaaaccccgtccctcctaaaaaagaaaaaaaaaattagctgggcatgatcacgggtgcctgttatcccagctactcaggggaggctgaggcaggagaatcacttgaacccaggagacggaggttgcagtgggccgagatcacgccactgcattccagcttgggtgacagagcaagactctgtctcaaaaaaaaaaaaaaaaaaagagaaaaagaaaaagggaattaacagtgtaccaagccctttccatgggttatctcatttactccctccaacacccttttgaggagggaggtgttatattcccccattttccagatggagaaattgaggctcagggaggttagctgatttacttaaggtgagagaggcatttaggtttgaacctagggctgtgtggatttaaaatttacgctgtttctgtagtatttctttttttgctttaaaggaatcatgtccattttccctgtcccacaacgctttgaccacccactcaaagaaacatggctcttggcaatgcttagtagaattgaacacaggatggcttggtatgggataacttgtaccatttgttttttcaggaatgatcaccaagacacacaaagtagaccttgggctcccagagaagaaaaagaagaagaaagtggtcaaagaaccagagactcgatactcagttttaaacaatgatgattactttgctgatgtttctcctttaagagctacatccccctctaagagtgtggcccatgggcaggcacctgagatgcctctagtgaagaaaaagaagaagaaaaagaagggtgtcagcaccctttgcgaggagcatgtagaacctgagaccacgctgcctgctagacggacagagaagtcacccagcctcaggaagcaggtgtttggccacttggagttcctcagtggggaaaagaaaaataagaagtcacctctagccatgtcccatgcctctggggtgaaaacctccccagaccctagacagggtgaggaggaaaccagagttggcaagaagctcaaaaaacacaagaaggaaaaaaagggggcccaggaccccacagccttctcggtccaggacccttggttctgtgaggccagggaggccagggatgttggggacacttgctcagtggggaagaaggatgaggaacagg

SEQ ID NO: 1242992 - DNA, 4001 bp, Homo sapiens
acttgggagagggtacctgagaagagaaatggaacaccaataccaaagacccccccacactccccgaaaacaagttagcagctctttcctggggcaaggtagaaaaatttctcctagattgaggaatgagctgcacagaggtggccagaacacaacataggggttggcttctgagactttcaactcccctgatttccttgctacaagtttcttaaactagaatccacagttcctgagcctcctgcaaccaaaagcaaaattttgttagtacacgcatttttctagaaagagggtcaacactttcttatcaggattcctaatggattcataacatctaaactgttcaggacaactatcttggtgatttacaggaaaaagaaattttaaaaggaaaaagagaagagtaagtcatagcatctgaaagctggaaaatactttagaaatcatctaatccagtcccctctttatttaagagaggaaaaactgaggcccagagaggcacggcaaataccgaggcagccagcggactgtgttggaacccaggccggcgccccaacgccagcggcagcttatttcacacatggtgcagagaaaagccatagttacgttacaagatctctgcacatgtgcagccacgtctgtgtgtccttcgtggtctcctccaagattctaagtaacatcaaaagcctgagattctactacagttatgatccataatgatttattaaacattaacaaacgaattccaccaaatgcccagccaggaaaaattaataagtctaatcacatgtttataacttcctcttcttgattttgaggtaatctattggccaagccctatctgcagccctagaaatgtatacagcagtcaggctttccaggagggacgtgataagaggttgccctgggcccacctaatccagattacaggtcacacctgagctggcagcagcagaccccaccctctcccccgcctcggagggcccagggcactcgctctggcctagcatacccgcatcactagaccagaaagcaccaaagccatttctctctctggcaccaaccttcctcaagtgactgaatcactcccaaatcttttcatagaggaagctgccgtaacccaaaaggacaagctttgaactgtcattttaactaccagttcttacctttggtttaaaaaaagaaagtggggggccattggttggggagacttcttaaaattctggaaaattcagtctctagtttccatccgtaaagcctttcacagctctgggtaagtaacacatctcaccttaggaaagtctgtcctatgtattgggactcattttacaaacaatgttctttcaataaattttttcaaacaatgcttttgtgagctgtggcccatatacagactctcttgccaaggacgactgggctgtgatggaagcaaaggccctcaagccagactcagaaatcttaattgactgtcattaaacagaattttagaagcagtctgtcccctccttcacaaactaaccctcagtaacgactggttattgggcagttccacaactctgaccctccaagcattattccacgtggtagaatttcagtgggatgatagagcgcgtttcaagatagggggttgctattgccgttcattatatgagctctcctaacgttttccatgtaaaccagatttaaagaaaaatgagatttttaaaaaggcatctatctaccaatctttggaaacaggcaaacgacaatcaacgacttgggcattcagattggacttaggtggctggaaaataggcaaaaagcagagagggacacgggtggccactgagctgcgcccggggacattacggtaggtagttccacccccacgccccgcctggcgtcggggaccccgcgggaccggaccgcgcgggacacgggcgccctacccgcccactgtgcctacctgccgccgtcctgccgccgtctcgccgcccgcgttcccacgcttgctgccgcgctccaggcgatgcgccagcggtcgcgcggccttaaaaagggtcgtgggggggacgggcggtgcgcagagcgacggccacaccgaccaatagcgtcagcttggctcgcgcggcccgccttcttcgaagtgctctgctttccgagaaatcactttcccgcccccggcagccacggcagtggggtccgggcctcttctggagccgctggccgagccccgctcctcacacctggggtccaggggcggcgctgcaggggggctttcccaggaattccggaggccccgcggagcgacctggaggcgtcctccgccttccaggccggctcgggcggacagccccgggagtgcggcggctcccgagcgagccactagcaacgagccggacggtgcagaccgtgcgcctgcggcccattaatcagaatccacagccagaaactagctgccccgccggtctccgccttcacgagcgctggatattgggcagtgatgcccgccgcgcgttattccacggggacggggacgcgaaggtcgtttacagaccgtcccgggtcaccggtggcctgcgctgcccgggaggggcaggagaatcccagcttcaaaggaggccactgcccgctgagaccgcgactgaaacaggagcatcgaaggtgctaggcgctagaaggtccccttggggaaattttcatcacaaatccttttctccagaaagcgtcagcgttaagaggtcctctgtgggaccagccgctcctgggtgggcgttaagatgtcccctgtgggaccacccgctcctgggtgtgcactgacatttattgtaaaaatgaagtgggggagagggagaacgacactggaaaaagaaagaaatccctggaaacggaaaaagaagcgtttccgcgttctatcctggggaagccctggaatggggggaaaatgagggtcgcgattggcttttattgcccagtagagaatcacacatgggggctgttttttgcgttgagcttttcagggacctatgaaaatgtttgagactgaaaattttattgactgcacaatacaaaaagtatactgcaaatctgagattaataaatgtttaaatgaaggtccccaaaacatgttaatttcataattgtaatgtattgatggataaatgtttcattatattttgaaactataacttagacatcacttggtatgaattccctaatgccgtgattgccgggaagtcatagtcattagaaagtgagttccgcaacatcaaataatttcaaatgaaactactgttttaacactcacattatttaagagtatttagagaatatgagagtgttttaatatatttgctacgatgtgggatggagcttccagaaatcagagcatctaggacatcagaagttcttaaaacagcttctgtatatgtttactctcatatatttttatcaatgtggccctaagcctacacagatttacttacaaatgctgtctgctgcacaaagatgtatcctcaagtttccaccaacatccacttaaagacaagggtaagtgaatataggaaatcaacagtggaagggctccagcacgtgtcattggcagtaggtgtcactatgtacattacaggaactggcttgcattaacactgctccagaaaccccatattttccacgtgttggttccttgctgcctaggaacaatttctaaccagatgtgtttagttctgctcttatttaatgggtatttatgaggcaactactatgtgctagatatagtgccaagaacaggagccccaaagaatgaacataatgtctcaatctttgagacactcctgcccaggagtatcagaatccagaacccagcctgctctgccagtctcagcctctcagcctggaggctccacggagcctgcccctcagatatcgggaggcaaaaaaaaaaaaaaaaaaaaaatcctttagcgcttgtgtgtgttattacttgtcatattacagtgtggttctattctttattctctgga

SEQ ID NO: 1242993 - DNA, 4001 bp, Homo sapiens
cccgctccgcgcccagcgctcagcagtcacctgttccgccttcgggctccgctggccgagcgaaggcggcggcggcagccgggtggcccgcggctccgggaagtcccagcaggtgcggaggggcagagcccagcagggagagcgggtgcaggcgggggccgggcggtgggcctggaaacggccggttggtccaagccgggaacttgcccagcggcgctgagaccagtctgtgagcggcggcggcggcggcggccggagagagctgcagggcggaaggcgcgaccgctgcccccggtggagacccccccgcgccgggaggcgagcggcgcgggttgtccgggcttgtggcagtctccgcgagggaccagatcttgggcttctgcagggcggaggcgggggctggtgcgggagcgcaggggtccaggctcacggggggcgacggcagagacggcgaggccacggccactggtggtggcgctggagccagactcaggaccggtagtggccggtcctctaagccctcagagctatcttccgagtcgctatttttggagtccgaaatgggtcccaggcctaggtcgccatccctgcgcgccgccccagccagggacagctcaggctcggtggccgcgccgtctaagttctccaaatcgatctcctcgtcctcgtcgtcgtcagccaggccctcgccccccgtgtcctcctcctcccccccgagctcctcctcctccagctctagctcgcgtttgccgtcctcctcgtcctcctcttcgtcttcctcctcgcgctcgctcccataagcgtttccctcctcgtcagtgcggctgcgaggcgcccaagtcatcttattctccttcttgaggcgccggcgcgcgttggcgaaccaggtggacacctgggtgagggtcatcttggtgatgatggccagcatgatcttctcgcccttggtggggtaggggttcttgcggtgctcgttgagccaggccttcagcgtgctggtgctctccctggtggcgttcttgggacgggacgggtccccgaactggtactggccatacgggtagaaggcggggtgcgggtgcggaaacgcggcagccgcggccggatgctgcaccccggggctgtccttcagctcatactgcgcgccctgtacgcacatggagaaggaagggacacgcgcggagggagcgcgagtgagccccagccatcgctgcctcccccctcctggcctgcacccctctagtccggcccccgcgcgctcagctcgccctgcgccccagcgccaacccctccttccctggctccgcgggctcttaccagctgcgggaagatgggcagctccgcggcgtagggcaggaaggcgccgtagccttgggcggcggcggccgcagcggccgcggcgtagggcgccccgtacacggacgagagcacgttggacagggaccccgaggcgttcagctccgaggctccggcacccaggccgccccgggcccccgcgctgccgccgctgccgccagcggcccccgggcgctcggacgggtaaagcgggcggatgtattggtatcccagctgggggaaggacatggtggcccgcggggcacggacggagaggggggccgacccccgggccgcccagctcagcgccgcccgcgggctccggcgcgcatcgggggctgggccgggcttggggccgcgctgccgcccgcgctgcgctgtgctccgcgttcgcctattgatctgctccgcggcggcgacggcggcggcgagggcggcggcgaggagccaggtcaggtccgaacagattggcggagattcccggggctccgggctctgattgacatttctacggggcgcaagcccctcctctctgcgccgcgctccctcctctcggccgccggagctgcctctgcccgctcctcgctcctcactgccctcctctccccagcagtgtcgcgcctcgcttccttcgccctcctctagttttcactccccctcctcgcccttcctctcccctcccctctccgcactcctcttccccccaggatcgcttccgctgcttcgggctcctgcactgccctggacgctatgaaactctcctttctcctctccccttctctttccctttctcacgagggcttttgctctccggtccgttcccttcacttcttcctttctcactacttctattttgtaaatctctctctttactcacacgatactccccgcgacctttccagcctctgcgccctgggctaagtaaggcagccaaaagttgtggacacttagggtgccgcgcggggggtgtgtgtcggtgtctgtctgtccatccccgcccttccaccccctccctcgcctttccccaaatctcgggtctgacgtcgcgccctcttattcgacttttccccgcgtctcttccccgagtcgccaatcgcctgggcgccttacgggcgaggccgcccacccccgcggatcccgcgcgcggggcggggcggggcaggggcgggagccggagcgccgcgagtccctgcccgccccctcctgctcgcgccgggcgggggagcgagaggcgcggggactgggtgagtgcagggtcagctcgcccctcccgcctcccgcccctccgagcctgtccccaggctgaggcgcgggacctgggccgaggctggctccgggagctcccctgtgcccgggccccttttacagctcgcacctctcgactcccggccactttcagcagcttagggagggagctagcagccggcgtgggggtggggagcgagggagtgcgtcctaacagagtctccagaggccacctcgctgccttgcgggggcgaggcagcccccaacccagcaggaccaaacccagagattagccacttaacgccgcccccgggtccgtgtgcgaatcccttactaaaaatggcgggctggctccgggggctgaagggtggcagcccgggggcactggaagggtagggagccgccacaaatcggtgaagcaggcccgcgccccaggcggctgggaatgggggaggagcagggcgccgggggacggaggccctaggaacttttggagagctcttcgagaagtttctgtattggcgtttttgtctgtggagaaccttccttgcgcgacccctaccccttctcccggtcccggcgctaacctcttttctctctgcaaggatcctcccaccgcctccggtggggatggaaagcaagagttttggtttaatgatgggatatttcctaaatcaaacttgaaatctcaggatcgggcgcccaccttcacggattagggcgtgcagtcgatagcggcattgaaattcccagcattgccgcggctgggggctcagagctttaggccgcggcggcgacccacaagccggccaggcctgcagtgggcacgccccggagacaaaacgggggtggtgactctgccgtggagtggccagccccagctcggaggcggaaaccgtcaccttgcatggatggatccaggaatcgaattcgaattccaccagagtggcgggatcagaggagatcagagggtcttggccccggctgtctctgatcacagctctggggagcccagctctggaatgaaaaattcttccacctccacggcagacacccagttttgatcccacccccaccgcccacctcccacttcccacctcccacctctttccgtgggtcttggcacaagcccacggccctagtaggtgtgaacgccaaaaaccttgcgcgggcgggatgggggcggggaggaaacaagggaaagtttggggaggaccaggttttgggggcaatgagggaaagcggggtattcccagactgcatctgagtagtttccctatcaccttctcttccgcctctgcctggtgctggggagcctggtgccttctcaggagcctcgccggaggaggcgtcatcaggggccgccctggctttgaaatatctcttcgacgcctgatttcgtttcccgttaaacctcacag

SEQ ID NO: 1242994 - DNA, 4001 bp, Homo sapiens
ggccctccgagggcggctccttaaaatccgagtcgctgaggctgccctccgtctccttgcctgcaggggtgggtggtccctgaagccgttcgcagcccgaagccgccttctgctcagctcctcctgcgggcgaaacccaggctgtcaggggcgcagaggccgcgcggcgggacccggttcccgcccgcaaaggcagggacccctgcccccaacctccaggccccgtgcgcgccccctccaggcctctcttttcctttttactcccgcccaacacgccctttcccatgtccaccaacctgcttcggggccctcggggtcgcccttgtcctcgggcttctggggctcgtcctcgtcgttcttctccaggtcaatgttctcctcctcttcctcgtcctcgctgcggttccgcggcgtccacgtcattttattctctttcttgaggcgccggcgcgcgttggcgaaccaggtggacacctgggtgagggtcatcttggtgatgatggccagcatgatcttctcgcccttggtggggtaggggttcttgcggtgctcgttgagccaggccttgagggtagccgtggcgtcccttgtggcgttcttccggtacgctgggtccccgtaagggtacgatcccaggggcgccgcgtaaggatggtaccccaaggagcccgccatgccgggtgtgtggtcgtagggagagccctgcggtggagacgcagagaggtgagtgtggaccgtggtctccactgccatcggaacgaccgaagcacccttttccctgcgctccccggggtctgtgggtggacgaggcccgcactccagcttcctacggggcaaggctggcggggttcagacctaggagcaactcctccccctcctcagaaggcagcggggacctcaatttctgggtcaggtccttctggggcccctgaagctgtcccggcctcggtgtcaccccgtaggcccccatctgcccgggcacgtccgtaccccgtgcgcagatctggccacggcggcccggccctccatgcagatagaggcctgggcaactgaggcgactccgcgctcggcgggggagcggacgcacgttgggcgcaaggggggaaaacaagggaagtcaaggctctttttttcttttttcaacagctaagaaatgcaaacaaaaagctgagccatgcccacgcactcccaccctccaaaaatactaccccagaccgaagttacaacccggccgaaaaatcccggatgcaccgcagctcgaccgacttttcagaaatttaatactcccaaatcggattgcgaagataggattacggatttgcaacattttggaggactaattaaaggctaggccaaacacatttacatagacttagcacgcttctgctcaaatttcgagtctatttcttttgaactacttttccaaaatggcaaaaccaaaaatataaaatttgcagggcagcccggagcttacgtttacaccaaatgctgctctttaattgcagctacctctccccacagaaccccttcccgccagctcagcgatccgagcaagacgcggctctcttttgcgagcaactcttgagtccaaggcctgggcgaagctggcggagacaatcgcccaagtttgaaggggccgcgaagcttggcgggggaggtcggtgttggcgcctaggcccgtgtccccctccgcccccgtcctcccgcccggcccctgctgcccctcgcccgccgcggatcccgctcacttaccacgtacgaggagaaggcggcggcggcggcggccgcggggtcggcgccgtactggaggtgcgagttgtagcccggcgagggcgccgtgaaggcagtcgagccagcgtagggcgagaacgcggagcccgaagaagagcggccgagctcatccgtgcggggccccgaaatgacgctggtgctgtacgccgggcacgagtagagcgccagcgaggcggacggctggtacaagtagccctgcggataggacatggccacacacgggcatggggcgcgccgcgccgcggccgccaacgagccgggcggcgccctgcgagggcgagcgggcgggcacctggcctctggctgccctgggccgccgctcctctggccccggctccggggctccggcccgcggcgcctcctcgctggcttcccgcgcgcctccggctgcgaccgccgcgcccgctcctctgcgcgcctcgctcgccccagctgggctttttttcccctcccctcccctcccttgctgctttctcttttttcccctcgctctttgcaccggggggctctgcttttgcctttgcaaaggtcctgccaagatgctaagttggaaattgaggattctgacgccttgtgcgcgcccgaagctcctccttcccggggtgtagtcggtgggaggactggcaggagcttctgggcggccgcagccaacccggccgccaggcgcgcctcgccctctccctcttcctcctcggctctctctcccgctcgctggcgctcctctcgcccctccctagcgcccgcctcccctccgcggccccccctctcacccctcctctttgcctccccttttcccctccccggtctctccctctctctcgctttctctcagactctcgagcgccggccccaggatgacaatcacatcccaggagcgccgatctcttccaactttcctcttctgctaactcggggcggagtggcagtcccgccgccccgaagcacaaagggaacgaggccgcgggctgtgcgccggcgaacgctctgcgctctcctagccacagtagatcgcggacttagcggatttcttgttctccggcaggctgggctccgaggccattcgttgcccacccccctctggcgtcttccccaagccagggggcccggagagccagctggagatccggaatgaaagtctctgggagagccgatggatggcccgcgcccagggcgcaggaagtccgggatgactgcccctctgcgccggcagcagcaggtgggcgagagacaggcctcagacgtctgcacgtctccgcctcgccttccttctaccgaccccccgccggacggcgagggagaagacactggttcctggaactaccggggtagcctttttctagagtaggggtggtgggcaagaactgccagacagagaatcagctacacccgaggagatctcgggaccgtccccagctccactcccacgcctcgcagcctctttctcccggttttcccaccgcacgcagctcgcaccgccaagtcggtggtggtggagggtgcgggtccccttcccttttgtttaactaagtcgccttccccttcgcacgcactctcgcatccgcccacgctccactgcaaacactgggcagagcagtgcccaacccaaccactgtttgttcagcgaggcgctggcgaagcaaacacacacaactgagtcagaggcagagcccttgcccacgacggccacacagttagaatacaaaacagaccctctcctcttctctccacctcccgccaccacaagccacggacgcactcgaactctgggacagacaggggcgctggtgaaccaggacagaagatggcacaggtttgggcacgccgcggaagctcgggatatcgggaacttcgcataatggggccacacgcaagccgaagcataactatatacaaagtttctcgcattgactttgacgggcgagatgtactttatttcgcgatctcacactaacccagcgccgcaccggcacccgctcggtgctgcgctctcgtgcacgcgcgttggctcctcccctccgtctgctcccctcccccagacaccgcccaccaagaggcctgagcggttcagactacattctccgagagcccctgggtccgcccagcccagtgcctgacacctccttcacctatgattgggcgctggcctccctgggctccgccccctggtgacgtaaccccgctttcctccgagtctcggcgccagaggggcg

SEQ ID NO: 1242995 - DNA, 4001 bp, Homo sapiens
tagggcaggtagccagggtagctctgggcagctgcagcggccgcatagggtgctccatagatgcccaaggcggcgcccagctccggtcgcgcactgcccagcagtcgactatcgtagggtgcgcagcagagagcgggcgctggggtggagcctgatgccacatctgagacagagcgttgggtagattcgcagcatgtggtgctggaacttgccgacgccagaaactataggggcaagaaagagggcactggaggtcagagaccccccccccacccccgcccccgctcccgctgaagggagctagaaacaaagaagagaaaatcagataatcagattgctccttcattcattccttcattatgcattaactaaatgccacctgggctgagcattctgttaggtgctgggacgggaattataaattaaccaaactgcccttatagatgctcctactccattgctaaggccccagagccccaggaggccgggaaaatgtgaacattttgaaaccggaattaaagacaccaaaccctctgctcccttccctaccctcctcccaggatcctgcaaaggcggagctagaaggtggccttagagaccattattaacgtctcattcctgctcccattctatagattgggagtggataatcagagagagtgtgagacttgtctaagatcacacagcaggtcaaaggtcgagccggcactagacaacaggaaaatacactcagaactctagagaaaagctggagaacagtggagggggtgtccgcagaactttcccaggaaacccttgtcattgcacaacatccactttggtttggaaaatcgagggaaccggagagcttgggcccgcccaaggaaggggtaggagaatagccgaggtcaacaaatcaacaacaatatggtgagatggacagcgttgtagcctacaagttctttctttctctttctttttctttctttctttccttctttctttctttctctttctttctctctctctctctctctctctctctctctccttccttccttccttccttccttccttccttccttccttccttccttccttatttctttctttcttttctttctttctttctctcccggccacctcagacttctgtataggaggaggcctgactgggagatccctgtgatcccacccacctcactgagcgcgtggtcagagtgctcatgtttcaggtcacaagattttccagcgtgcactccggggtgaaacgttctcatttagggactggggatgtcagaggaggctgtgacacattaccctggtccttgctccttctggcttcccccagaacacaagaggaggatgatcagaggcaggcgccgtgcactaggcactccctccacccagtctgtcccctatcccccatagaggcgcctcttacctgggaagcgccgcggtacgggtgtccaaagtgtgggaaggacatggtggctgtccctggcccgtctctctcttccctgtcgagttcccgtctcagcccagctgttccgcgcccccagcagtgaggtgtctcagttccttacaccgctgcggatgcccagcgccggttccttcgcctggttggccccagtggaggcagagccgagggcagcccggctgccgagccctgcgctccggaaggcgcccctccggcccgtggggtccggaagacagaagggcccatggatgggcaggggaaggaagaagatgcgggttcccaaaggcgcgtggtggcgaggtgaggcgcggcgcggcgcggggctgtgaggctccggaggtgtcccagtccaaggtggccagaggctcaatgtgacgtcacggtaatcccgggccgccagacgggaccccgggccccgggaccctgggccaccaagcgtgccaagcgcagccagcccgtgcgcgcgcgcgcactctcacccacactcacacttgctccgggaggtttgtgcagctggcgaggaacgtcaaaaaccctgaccctctctgctcggcgctgaatcctaccccttttcgcctggagctcacgcgcgcgcgcacacacacacaacctctccaaattacccgggagaagtaggagaaacgcctccctctgagccgcgcaggccccgggcgcagcgcgctcacctcctcccctgcggcccggaggaggcgagaggcaaccggggcggcgagggaggagagaatacaaaagaagagacaggagaaaagtgggggagaaaggcaagagggagaaggaggaggggagaggggagacaggagtctgagtgaacagaggcgcgtgggggagggggagggagctggggtgggcgaaggctgggcggaggctgagcactggcaggtggaggagagcagaggcccgggggagaagcctccagcccggttcctccgcccctgcgctgaagtaaagtttgttcacgccacaggcccggctctcgttggagcagctccgggcagcgtcggtggatcccactggcccgcccatctttgtcctcggggatctggttccccgcctcagcctccccaggactcgggctagattccggctctccaagccctggcctggcccagggccttgaccttggagcttctctgcagctgcctggtcctcgagtaggccggatagcgccccctcgaggccgaggttcgggatccctcagattccgtcgggaaactcgccaggtccgatccctggcagccgcaggctgcttgctaagatccctgggcatctcctccgaaggcaaggcttggctgcctcgcgcgcgcgcctcccgcagtggccgcggggcagccagggagcctgaagaaggctcccggtccgggctgcagcccctgcgctccgctgggggtggcgctggagagccgcagtggagcgctccgggagggcggcccattccctgcgctcctcctggacgcccggctgggcccagcggtctgaccaccccctcactccatcccaggggtcttcaaaggggcactgatgggtgggcggcggcaggggtgggggaggctcgttggtacccaggaaggggctgcctcctctaggcctggccccgagacatggaacctccaatttgcgagcacggtagactgcacatctgaaggctcagtactctggccccagctgcccttctgagagcctccaacccgcgacgtctaggggtgaaaagggactgtcggtctggtaggggaaggtcttcggtgggcactgcaggaatccagtgggatttgcaggccagaaacctcagaaagccttgcctttcacttaccggggtcaccgcgctttatacttttaaaagcgctttatacttttaaagttgcaccaggctcttgctgcaactcctccaaggagccataggggttggttcaagggcccagttttattttctagttgaaacgcgagagcctgtggcccagaagatagcaacggctctgggttcttgtatgaggcggggcaaggtctggggtcctggacggggcgtacctcaactccaagtttgccactagcaccttacactgatctctttagcatgacatctctaggtccccacaccccgttttaaaaacacattctgcagaatgctcaaggagcttaagccacaaaccagagactcctctgcttaagagattgttaacatgaggacaagctccattctaaatactaacaaacacagctactgctgctgctgctgctgctgttaccttggagaaaccttgcgttcatccagggaaactcctagttagaaaaagaattatagtcctcaccagattgacttagtgataaaaattcacagtaatagatagatcccttgatttttcaaaatgcactttggaactatccacacatttgcagcttggatacatctatgctatttttttaaagtaagaattggagagtattcattaaattcatcccttggggaagattactgctaattaattaattgcaaacatttccagagggaaggtatgtcaattgtaaa

SEQ ID NO: 1242996 - DNA, 4001 bp, Homo sapiens
tctgattatcttacaagaaccagagcttaaatcaaacaaactagagatggagattctggagctcctgataatttagaagccagagacataagaacaaagagggagaatgaaaaagtatttggacaaaataataatactattttaaaataagatatacgaaactggatgactttaaaacgtaacactaacactggggattcaaaatacttctaatcccagcattttgggaggatcacttgagcccacgagttcaagaccagtctgggcaacattaagaaactctcccctcccgaccccgaccaaaaaaaaaaaaaaaaaaaagccaggcgtgggcctgtagtgtcagctactactcccaaggctggggcgggaggatcacttgagtcctgaaaggtcgaagctgcagggagtgcactacagcactccagcctgggaaacagagtgagacccccgtctgcagaacaaaaacaaaaataaatacaaaaaaagaggaagtgttttaatttctttttttttttctttttttacacagggtctcactctgtcctccagactgaaatgcagtggcacgattaccgactcactataatctccacctcccaggctcaagcaatcctcctacctcagcctcctggactatagatgcgggcctccacgcctggctgtttttatttttgtagagaacgggattttgctatgttgcccacgctgttctccaactcccaagctcaagtgatcatcccacctagccctccccaagtactgggattacaggggtgagccaccacatctggccagttttatcttctaatgactattaccaagtccccctatcccagaagttctgaggaagcaaatttcccacaaactattggcttgtaggtacaaaagccaaaaggcttctactgggaaaggagagggaaatatatacatatatatttcaactattattaaattagaaaaatacagacataggaagggtatagataaaacaagattaggcatgagttgatcgtgtttgaagctggatgagagaattcattatactcctgtctgcttgaaattttccataataaaaagttaaaatattacacataattttaaaattcaagtttcccctaaagatctaagaccagactttaagtttactacgacagacagtgtcttttgtaattaacctacagctcctgggtcccgaccctcctcaaagtttatgctgttgagttccaagaggtcacctccagcaccccggaagaagagcaccgagaaaaacaaagaggagaggcgcaaggatccttccaagacctctcactacacacgcagggatccgagaaagcgggcagaggccgctccttacttcagcgaaagaaattgtaattttctcaggccaaagtggacccaagtccgttcccccaacccaggaacaagcccaggaggccaccccgcccggtggaagcggcccggactggagggcatccgcctctcgcggcactggaagctctgaccttcccgaagtctctccgggccagaaaagacggggtaggggtgtcgccgaggagccctcgccgaggccgcggcgtttccgccccaaggaagacacacctcggggcaggaagactaggggaaagttaaggggcttcgaggatccaggaccagaggcctccgacccgctcgcggccctgccacgccccccacccaggcctgggcagcctcctgcgccgcgggccctcgagggcctgacctccggtctgacccccacttccactatccttccctttctcctcagctgccccctccgaagtcgtttgaatcccgggccctagcgctaactagagaccgctaaatcaggagcgcagagagaagaggaagacagagacctctgacgccgaggatgccacactcacctaaccgaatcctgccgtgaacgcagcagacaccgacttcagggttcaccatccaaaatggcgactccctcggcctcagcacaacaagcgcgggcggagggatccacggggccgatatagccacgccctcctttccagggattggctgcgcgatcgccgctgccgggacccacgcgctgactcggggcaccctccctcggtttcctttggagtcggcgcggccggggactacttcccgcggcgggggcacggcagacgttgggggaagcgccacgccgactgagtcagctgctgggggcatgcccttaatttcgctctgggcgcggggaggccagccacagctgttgattctcggactctgcgcccacggcctcaccgcgcccagtgccttggttccggattcttccataaccggctgccagtaccgcctctctgacgccgggagttgctccctaagatctgctgccgcctttcgctggactttccccctgggtggagcggccgagggggtttcgaagcctgcgtatccctgactcttcacccagcgcctccgtgtccctctacgggctctaagcgttcccccgccccgcttttaagccgtccggttgccctttggaccagcatcgctccggtctgtgtggtataattcagtagtgtttcctcagcaccacagtctctggcgatttccctaatttatctcggtattcagagaaaactttttccttggttacctttgtttttaacttgaaaaccattatcgctgcttaagcctggaagggaccttcccagcactttgagaggcggggcgggaggatcgcttgagcccgggagttgcagaccagcctggacaccatagtgaaaccgcatcgctacaaaaaaaaaaaaaaaaaagttaaaaattaggggagcagcagtgagcacttgtggtctcagctactcgggaggctgaggcaggaagatcgcttgagcccagaaggtcgctgctgcagtaaaccgtgatcacgtcacagcactccagcctaggctacagaaaaaaagaaaaagggccgggtgcggtggctcacgcctgtaatctcaacattttgggaggccgaggcaggtgtatcacctgaagtcggtaattcgagaccagcctggccaacacagaggaaccccgtctctactaaagaggaaattacgcatggtggcgcaagcctgtaatcccagctactccggaggctgaggcaggagaatcgcttgattctcgagttacagtgagccgagatccggcgattgccctccagcctgggcaacaagagcgaaacgtctcaaaaaaaaaaagggaaaaaagaaaaaggggcctccagaaggaagtcatctgctccctgctgtggaggctgcatctaatgcttgtaccggggcagtcatatgacaagtaggagctagcccttatcataagatgttgatgtgaatttagaaatactgtatctttataaacgtttgcaacatttcaagataaaaccaggttccatgccaggcgcggtggcacatgcctgtaatcccagcacttggggagactgaggcaggtggatcacctgaggtcaggagttcaagaccagcctgaccaacattgtgaaatctcgtctctactaaaaaaaatacaaaaaaaagaaaaaattagccaggcgtgtaggcacatacctgtaatcccagctactccggaggctgaggcaggagaatcgcttgaacccagaaggcggaggttgcagtgagccgagatctccccattgcaatctagcctaggcaatagagcaagactccaaccaaaaaaaaaaaaagtgcagatttttttggctgggcatggtggcttatgcctgtaatctcagcactttgggtggccgaggcgggtggatcacctgaggtaagaagttcaagaccagcctggccaacatggtgaaaccgtctctactaaaaatacaaaaattagccggatgtggtggcaacacacctgtaatcccagctacttgggaggctgaggcaggagaatcgcttgaacctgggaggcggaggttgcagtgatgtgagattgtgccactgcactccagcctgggcagcaga

SEQ ID NO: 1242997 - DNA, 4001 bp, Homo sapiens
atattacacataattttaaaattcaagtttcccctaaagatctaagaccagactttaagtttactacgacagacagtgtcttttgtaattaacctacagctcctgggtcccgaccctcctcaaagtttatgctgttgagttccaagaggtcacctccagcaccccggaagaagagcaccgagaaaaacaaagaggagaggcgcaaggatccttccaagacctctcactacacacgcagggatccgagaaagcgggcagaggccgctccttacttcagcgaaagaaattgtaattttctcaggccaaagtggacccaagtccgttcccccaacccaggaacaagcccaggaggccaccccgcccggtggaagcggcccggactggagggcatccgcctctcgcggcactggaagctctgaccttcccgaagtctctccgggccagaaaagacggggtaggggtgtcgccgaggagccctcgccgaggccgcggcgtttccgccccaaggaagacacacctcggggcaggaagactaggggaaagttaaggggcttcgaggatccaggaccagaggcctccgacccgctcgcggccctgccacgccccccacccaggcctgggcagcctcctgcgccgcgggccctcgagggcctgacctccggtctgacccccacttccactatccttccctttctcctcagctgccccctccgaagtcgtttgaatcccgggccctagcgctaactagagaccgctaaatcaggagcgcagagagaagaggaagacagagacctctgacgccgaggatgccacactcacctaaccgaatcctgccgtgaacgcagcagacaccgacttcagggttcaccatccaaaatggcgactccctcggcctcagcacaacaagcgcgggcggagggatccacggggccgatatagccacgccctcctttccagggattggctgcgcgatcgccgctgccgggacccacgcgctgactcggggcaccctccctcggtttcctttggagtcggcgcggccggggactacttcccgcggcgggggcacggcagacgttgggggaagcgccacgccgactgagtcagctgctgggggcatgcccttaatttcgctctgggcgcggggaggccagccacagctgttgattctcggactctgcgcccacggcctcaccgcgcccagtgccttggttccggattcttccataaccggctgccagtaccgcctctctgacgccgggagttgctccctaagatctgctgccgcctttcgctggactttccccctgggtggagcggccgagggggtttcgaagcctgcgtatccctgactcttcacccagcgcctccgtgtccctctacgggctctaagcgttcccccgccccgcttttaagccgtccggttgccctttggaccagcatcgctccggtctgtgtggtataattcagtagtgtttcctcagcaccacagtctctggcgatttccctaatttatctcggtattcagagaaaactttttccttggttacctttgtttttaacttgaaaaccattatcgctgcttaagcctggaagggaccttcccagcactttgagaggcggggcgggaggatcgcttgagcccgggagttgcagaccagcctggacaccatagtgaaaccgcatcgctacaaaaaaaaaaaaaaaaaagttaaaaattaggggagcagcagtgagcacttgtggtctcagctactcgggaggctgaggcaggaagatcgcttgagcccagaaggtcgctgctgcagtaaaccgtgatcacgtcacagcactccagcctaggctacagaaaaaaagaaaaagggccgggtgcggtggctcacgcctgtaatctcaacattttgggaggccgaggcaggtgtatcacctgaagtcggtaattcgagaccagcctggccaacacagaggaaccccgtctctactaaagaggaaattacgcatggtggcgcaagcctgtaatcccagctactccggaggctgaggcaggagaatcgcttgattctcgagttacagtgagccgagatccggcgattgccctccagcctgggcaacaagagcgaaacgtctcaaaaaaaaaaagggaaaaaagaaaaaggggcctccagaaggaagtcatctgctccctgctgtggaggctgcatctaatgcttgtaccggggcagtcatatgacaagtaggagctagcccttatcataagatgttgatgtgaatttagaaatactgtatctttataaacgtttgcaacatttcaagataaaaccaggttccatgccaggcgcggtggcacatgcctgtaatcccagcacttggggagactgaggcaggtggatcacctgaggtcaggagttcaagaccagcctgaccaacattgtgaaatctcgtctctactaaaaaaaatacaaaaaaaagaaaaaattagccaggcgtgtaggcacatacctgtaatcccagctactccggaggctgaggcaggagaatcgcttgaacccagaaggcggaggttgcagtgagccgagatctccccattgcaatctagcctaggcaatagagcaagactccaaccaaaaaaaaaaaaagtgcagatttttttggctgggcatggtggcttatgcctgtaatctcagcactttgggtggccgaggcgggtggatcacctgaggtaagaagttcaagaccagcctggccaacatggtgaaaccgtctctactaaaaatacaaaaattagccggatgtggtggcaacacacctgtaatcccagctacttgggaggctgaggcaggagaatcgcttgaacctgggaggcggaggttgcagtgatgtgagattgtgccactgcactccagcctgggcagcagagtgagaccctgtcccaaaaaaaaaaaaagtgggccaggcgtggtggctcacgcctgtaatcctagcactttgggaggctgaggcgagtggatcacctgaggtcaggagttggagagcagcctggccacatggtgaaaccccatctctactaaaaatacaaaaaattggccgggcgcggtggctcacgcctgtaatcccagcactttgggaggccgaggcgggaggatcacgaggtcaggagatgaagaccaccctggctaacacggtgaaaccccgtctctaccaacaatacaaaaaaaaattagctgggggttgtggcgggcgcctgtagtcccagctactcgggaggctgaggcaggagaatggcgccaggagatagagattgcagtgagccgagatggcgccgctgcactccagcctgggtgacagagccagactatatctcaaaaaaaaaaaaaaaaaagccaggcagggtggctcatgcctgtaatcccagcactttgagaggccgaggtgggtggatcacttgaggttaggagttcgaaaccgaccaggccaacatggtgaaaccctgtgtctactaaaaatataaaaaattagcagggcatggtggcgggcgcctgtaatcccagctacttggaggctgaggcagaagaatcgcttgaaccgggaggcggaggttgcagtgacccgagatcatgccattgcactccagcctgggtgacagagcaagactctgtctcaaaaaaaaaaaaaaagcctggtttgtggctcgtgcctataatttcagctaattcggaggcagaggcaagagaatcgcttgaaccggggaggcggaggttgcaatgagccgagataacgcccctgcattccagcttgagcgacagaggaagactccctctcaaaaaaaaaaaaaaaaaattttggccgggcacggtggttcacacctgtaatcgcagcactttgggaggccgaggcgggtggatcacgaggtcaggagatagagaccatcctggctaacacggtgaaaccccgtctctactaaaaatacaaaaaaaattagccgggcttggtggcgggcgcct

SEQ ID NO: 1242998 - DNA, 4001 bp, Homo sapiens
gaaagatacctttactttgggtttaaaatagggtgcattctggtctgccaaaaagacgattaagtcatttcctaaagaaaacaaatatatgatattagaaaaatgtttgttgataagatatctaatcagtggttacaagaaggtttctgggcactgttctcaacaagaaaacttttattctactccagttcatctgccctctcaagcatagtcccactagtccaatggagatgcctaacattatatcacaagttcaatgttcaaagtagcagagaaatagaaaggatgaacatgggaaaaagcagctgatcaagagaaactgaagccagtggattctgcgaggagtcagattggttgacttaaaagaaccatataaagatgccttataactatactacatgtcaagacttgtcttccccgaatctagcaatgctgtcccttgtaaggctgtttggttcattacacagatgcatcacaccaaggatgcagggactcccattgtagatatctgacaaagacataattaagcatgtgagcacaaaatgctgaatcctccaagaccctcctcctatggggccatcctccagagggtgacacattcttggagctcaattagcactcattgagacagacttttggaattgtttaatcaaacacaggccatctttaaagtcaaggctactctctgtatccagtttggacacagcagcaacaggtttggcagtacactgcaaaatgaggagtcaaaaagattgggaaaatattcagggtttgtaagaggttcctgcatccccgcaagggctccaagaagtctggttcaggatcctgtcaggcaagctctgagtagctcttccttccttccttcacagcattgatctttaagcagcacctgcttctgtaggtactcaagaaccctaagaccccctaatgcccactgtcagcatcaagatttacaaaaaagttagtttaacgattgtcaaagcaaagaatttccaagaacaagttagcaaagaaagtagacatttggaacactaaggtgatgaccaagatgaggaaggagtacacgaaagaacaggcagctcaagagagaaatttctgtagtttgagactgctttcccaaggaggcattgggtttatcagtggtccctgcaaaatgcttgtgtgagctgtttagtgtttaggcccttggaagggtacattcgcttcatagaaagttgtggccttgacaaagaaaggggtgggcgaattaggtaggtggggaggcaagaagaagccccctatgagaagagattgtcaggttgcaccttttcatgttcatcaacggggaaggaagactgaagcaaaatagaaaggaatgagtgggccttgggagcgaacgttgaggcaagctacaaagattcctaggaatcaggaagcactttggaaaacaggtgattccatggggaggagggggtaaggtgactgggtgagggccgcagacttcttaggaacaaaactgaggtgctgtcagggcttttgagggtaggtcaaactgtagggtagctgggtcagaacctggggttggaaagggtggtgcaaaaggacaagctgttaagaatgctaaagggaaggccacagggctgggagagaaggaccaggaaatgcagaaggaccggccattgggcaatgggtttggggaacaccgggagaggcacacggacagcgaacagagggagggcccggcaagcactgactttcccgcagcacgaagagatccgtctgcttgtcggagttgaggtccccgaaagccgcaagggtgccccaggcctcggccccaaagagctcggccgtgacgttgtgcagcgcccgcgctgggaccggcccgactcccagtagtgcaagccctgcgaggagcggcgagaagagggcccaggagctcgggagccggcccgccgccgccatggcagcccctcagcccccgcccgccggcccaacgccgcgcttgacgacagccgcaaagcaccgcgttaccggccgagagagtggcgcgcagccccgggacgcgtaagagccgctgccggctcctttttctctctcccactagggctgcccttccgacgctaaaaaagcagtggagctagggtgaaagccgccctcacgctcacttccggcaggcgcgcctcccgacagtgtcgtgcggggggcgtggcccggcattgctgacaggcggccccgggggcggtggccaaggcggcgaccggagcgcgatggcgggggcggcgggactcacggcagaagtgagctggaaggtcttggagcgaagagctcggaccaagcgctcaggtttggctggctggggcgccgccccccacccgagtaccttgggtggtgcttcgcctcaagcgccttggcgggaggcaggtgggggccctgggaatgaacctgtgccccgagttcctccttagaaagcaggtggcggccctggccttgtttctaatatcttcctccacctctaaaaattaggtggcagagccagctccactctgcgtgtgcccccgactctattccgcttgtgagccccactcggaaagtaggcagcggtccggacttcccttagagtcttctaacttaaaaatcgggcggcggcacattcctgggaaagggaatgtgtcttccctgtgaatgtgtctttcctgtgaatgttctctgcaaaagtcagatagcttaatcagaccaagtcagatgtaactacgatctggctgcagaaagccggcgtctgggctccttgctttatgtcttatatcccttttacattccccacaggttctaagcagtagacctgtcatctatctagcagaaactgaaggagactgggcctcagatattgaagagtatagttagggcccagaaagaaaagggcttcttaagtggccccaggttgtgtggtttccaaacccgaaagcatagaggtcagaaggtgccttgcaggcagttttaacagttccaagtgtcccgaactgacttgttcaaattgcaacgtcatgacttgtggcgttattaaaacttcctgtattcctggttggctggatataatcttgaacaaaaggcatgcacttaaacaggaaaggtgaaaggcggaatgcaggttttcagctaaggagcttcccttttaaagaattgatgaagtgtcattattgggggtgggtgtgaaaggtgttagctaggaaaattaactttgcacttgcattgatattaagaaattattttcggacgggcgcggtggctcacgcctgtaatcccagcactttgggaggccgaggcgggcggatcacctgaggtcaggagttcgagaccagcctggccaacctggtaaaaccccatctctactaaaaatacaaaaattacctgggcgtggtggcgggcgcctgtaaccccagctactcgggagtctgaggcagaagaattgcttgaacctgggaggcggaggctgcagtgagtggaggtcgcaccactgcactccagcgtgggcgacagagtgagactccgtctcaaaaaaaaaaaaaattattttctcacctaatatgttctccttacgttttgggcttttcctatttatgaagttcttagttgtctgttgtgcacactgacttttttttttttttttttggagaaagtaaatctaatttctgaaaatctaatttcagaaatcatacaccgaacactctgtttttttataccttacaaaaagttcagctttatatacttagggttatagtaaaattaccatctatgaagtatgagataattttttcaaaaagtagtccttagtactactaagaatcaataaagtgacttggaatagtcacatgtatttgtttcacactttttcttaaattgtttttgtgtgatatagaaatactgagttggctactaacgatgtggctatctggatataaaaagtgttattggattggttatgtctgaacaaagagaataactggagttttcttacagggacctga

SEQ ID NO: 1242999 - DNA, 4001 bp, Homo sapiens
ggttcaagctattctcctgccccagcctcccaagtagctgggactacaggtgtgcgccaccacacccagctaatttttatatttttagtagagacgggatttcaccatgttggacaggatggtctcgatctcttgacctagtgatccgcctaccccaaactcccaaagtgctgggattacaggcatgagccactgcgcccacccaaaaaaaatttttaagaaaaataaatatggtggcacatgcctgtagtcccagatactcaggagggtggagcaaaaggaaaaaaagagggccagttgcggtggctcacacctgtaatcccagcactttgggaggccgaggcgagtggatcacctgaggtcaggagtttgagactggcctggccaacatggtgaaacccctactaaaaataaaaaataaaaaaaattagctgggtgtggtggcgggcacctgtaatcacagctacttgggaggctgagtggggagaatcgcttgaacccgagtaactgggattaccggcacctgccaccatacgcagctaatttttttatttttagtagagacgggatttcaccatgttggccatgctggtctcgaactcctgacctcaggtgatccgcctgcctcggcctcccaaagtgctgggatgacaggcgtgagccaccgcgccggcccagcaagctccattttttatttatctaatttactatctgtaccctccagtagaatagaagctccttgaggacaggaagttctttcgtggagtactatatccttagctcctacaaccatccctggttcccagcagacactcggagagtatttgttgagttattctgctctaattggatgcagactgaaattgcaataagggaagtagtgtaatctgatgctggcgccgtaaagacaccggcagccagtacatggaagggagcgcgtcacagcctcctcagctggaatcacaaggtttagaaccagagagtaagtgaaattgcctaccctgatatcctatcagtctgtccaagggcaaactctctccttgacaactctcggccaacgaacgtaggggagagccaggaacgctaatcccagtgttttcctcccatctagcctctgttttgtgttctatgcctgagtccctcccacagacgagcaacctcggctgcgctcggggagctttcccggggtgccggacggacaagcttgcagacagcgtcccgagagaggacacgcctctccgacccccgtgaggcttctcatccacattcttccaccataaaaaaacactctcaggcaacccaggcggcaccaagagcgaaagcgaccacggccggctcacctacgctgcgccacggcggggagctccctaccgggaggtaaaaccccgctttgaggaacatgtgggcttgttctgaatgccactgaaacccaggctgcggcaatgggggaaacccgaaagaatcagcctccagaggcgctgctgccgacccgctgagggacttggggccccgccgcagcctcccggcccgcacccgactcgggaaggcggaggagctagggggcagcacggcggggtcctccaggggccgagggactggggaacctgggggccggggtcccagagcgaaggggcggcctgcggcgcccctgcggcgtgcacgcgcgagtacgaggccgcgctcactcacctgccgccgcggcctctcacccgaccgcgccgctggccccgccccctggcgtcacttccgaccagccgggcgggcgggggcggaaatgcgcaggctccgaccccgccccaccgccatgcttcggttgctcggcaacggggatcttgggcgctgcctccgccgggaacctggcggtgtcctgtttgtcgctgtcgcaatggatgctgaacgtcctcgcccctcttcgttcccgtcccccctccgtcctcgctcctctccgtcctctttcccctccttctctgcgtcctcgctcccctcctcctcctctcccgaccttgtcctcttcccgccttctttcttgacgtcgacccccgatctgcgtcctcgcccccgcttccgggtgctctccccagtgtttctcctctttgaccacgaggagaattgctggcactgaggatgcgaattttcggccttgaaatacggtgccagggccgggggcggtggctcacgcctgtaattccagcactttgggaggccgaggcgggcggattacaaggtcaggagatcgagaccatcctggctaacactgtgaaaccccgtctctactaaaaatacaaaaaattagccaggcgtggtggcgggcgcctgtagtcccagctactcaggaggctgaggcaggagaatggcgtgaacccaggaggcggaggttgcagtgagcttagactgcgccactgcactccagcctgggcgacagagccagaccgtgtctcaaaaaaaaaaaaaaaaaaaaaaaaaaaaaaggctaggggctcatgcctgtaatcccagcactttgggaggccgaggcaggtggatcacctgaggtcgggagttcaagaccagcctgaccaacatgtataaacccagtctctactaaaaatccaaaattagctggacttggtggcgcgtgcttgtaatcatagctactcgggaggctgaggcaggagagttgcttcaacctgggaggcaagagtttgcggtgaactgagatcttgccattgcactccagcctgggcaactagagtgaaactccgtctcaaaaaaaaaaaaaaaaggatggggtctccctctgtccctcaggctcaagtgcagtggcgggatcacagcttactgcaacctctgcttcccaggcacaagtgatcttctcacctcagcctccggagtagctaggactacagctgtaagccaccatgcccagctaatttttttcctttcttgtagacatggggttttgccatattaaccaggctggtcttgaactcctggactcaagtgatctcctgctttggcctcccaaagtgctgggatttcaagcatgggccactgtgcctggcagttgtctgatttctagtaactgtggcagtttggtaggtgcgtaattcagatgatttaattgctttgttcaaatggccaattggaagcaaagtcatgccttaaaacattatttaaaacttgtcagccgggcacagtggctcatgcctataatcccagcactttgggaggccgaggtgggtggatctcaaggtcaggaaatctagaccatcctggctaacactgtgaaaccccgtctctattaaaaatacaagaaaattagccaggcgtggtgacgggcgcctatagtcccagctacttgggaggctgaggcaggagaatggtgtgaacctcggaggcggagcttgcagtgagctgagatcgcgccactgcactccagcctgggcgacagagtgagactctgtctcaaaataaatgaaaacaaaacttgtctaaccgtgtctggacttttgatgcttctagcccatgaacagtctttgttgtattcttagagtaagtcttttttcccccttccagggcagcaatcatattaaattatcatttgtgaaatgattttttaaaatttaaattttattttttaattaattaatttttttgaggtggagtgtcaaaatagaccactcccggcctgttttttttttgagatggagtctccctttatcgcccaggctggagtgccgcggcacaatcttggctcactgcaacctccgcttcctgggttcaagtgattctcctgcctcagcctcctgagtagctggaactacaggcgtgtgccaccacaccaggctagtttttttgtatttttagtagagacaggatttcaccatgttggccaggctggtcttgaactcctgaccttgtgatccacccacctcggcctcccaaagtgttgggattacaggcgtgagccactgtgatcggccttttttttggccggggggagagggagttttgcttttgtt

SEQ ID NO: 1243000 - DNA, 4001 bp, Homo sapiens
agtctcactctgtcacctaggctggagtaaagtggcacgatctcggctcactgcaacctccacctcccaggttcaagcgattctcctgcctcagcctcccaagtagctgggattacagatgcctgccaccatgcccggctaattttttttgcatttttagtagagatggggttttgctgtgttggccaaactggtctcaaactcctggcctcagatgatctgcccgcctcagcctcccaaagcgttgggattataggcgtgagccatggtgcccagccctgccatcattctttacttgcaaaacacaaatgcacagataaaatttttaagaattggcaagacagggtggctcacacctgtaatcccagcactttgggaggccaaggcaggaggattgcttgagcccaggagttcagccagtctggacaacatagcaagactccatctctgtaaaaagtaaaacaaaacaaaacaaaaaacaggcatgatggcatgcacctgtggtcccagctattcaggaggctgaggtgagaggatcacttgtgcccgagagtttgaggctgcagtaagctgtgattgcaccactgcactccagcctgggtaacagagctggagtaaaaataaaaataaaaataatcaggaatttcaagaggtcaagggcagaacattaaactccaaagttaatgagtgtgggccctgtgtgaccatactggccccaagaagtgggccctgcctgggaggcaggttcaaggcttccctcccgaggtaaggtagggtcttgtctagagttttgtggcctttcctgggattgagaataataggtgctgatgtcagggcctccaaggagccaagggaagacttctcacccctgctggccttcctccaggacacctccctggggtaacccacgtgtacccatccacaggacttgatgtagtggaggttggggaaggagggtgagtggggcctaccgagatccaccgaactgcaccacgctctgcccaaagccgcctgcatcctcctggaagatcgtaggctcctccacatccaggttgaatccatgataagaagccaggactgaggaatatttggtgggcggggaggctgggagttaaagaagccccaatccctaggacctcccagcctctttttcttttttttcttttttttttttttttttttgagatggagtctcgctctgttgctgaggctggagtgcaacggcacgatctcagctcactgcaacttccgtctcctgggttcaagcgattctcttgcctcagcttcccaagtagctgggattacaagtgcacgccaccatgcccggctaatttttatatttttggtaaagatggggtttcaccatgttggccaggctggtcacaaactcctgacctcaggggatacgcccatctcggcctcccaaagtgctgggattataagcatgagccaccgcacccagccaagcctgatttttgatggcacgtgaatgtgactctgatgcagttttcagcagggggcctcttccctacgtgcagtcaggacttgggggaaacaggcccagggaggtgatgtccaacctttccccctccctggtggcttctgtggccttccactcccgggggaggctggggagacctctgtcacccacaccagggactccatgagtgggagcagggaagcctgggacaacatagccagctggagaggtagcttagtcgccacctgagcacagcccctgagcccctcttcattcaggtcacactctactgactccgggccactcgcacatgaagcactcccctgcctcagctcctcataagagtggttggagccgaccaccagcccccagcctgccctcccagatggagtcccctcagaactcctccaagcttctccccagcaccctggccccacttaccactcagaagaagcacagtgccgaaggtcatccctgagcagcgcgttgaggggaagtggaaggttggggacagagcacagaaggtgctcaccctcccagggggtagttaaaataatgattcagggcctccacacagcaggaagaggggcacagtgggtaggaggggcgtggttaattatggaacagaagtgggggcaggggccaacaacaccctggggaaaaaccctcattctgtccccctccacaacctgcagggacctggcttccttctcccagaagaccaccctcccccaggcctcaggagccagttggtacccagggagccccgtagctctctgaggtcccacaggagtggaaggacaggaagcagaatggctgcagaggtcttggcatgtggatgtgagccggcagagaggcagggagaaggggagctaggccagggtgtggtttcaaaaagcagagcccctccagaggagaatggacacccaaaataataaagtcatgccatgggctactactcagcaagaaataagatcaaactacagatcagatgccatggctcatgcctgtggtcccagagcttggcaggtggattgcttgaggccaacagttcgagaccagcctaggcaacatagccagaccctgtctttacaataaataacaaagaacaaactgcagttctgtacaacaatacaggttaactcaattttatcttaagtgaaagaaaccagacaccagaatgcctaatgtctggttcctttcatatacaagagaatgggcaaaattcatctacgaagatagaaatcagaagagtggttgtctatggtggggcagagaggaaactttttttttttttgacaagttttgctatgtcgcccatgctggaatgcagtggcatgatcagggctcactgcagcctcaaattcccagactcaagcaattctcccacctcagcctcccagtcactgggattactgatgcacaccaccatgcccagctaatttttttgttttttgtagagacgagatcgcactatgttgcccatgctggtctcgagctcctggactcaagcaatcctcccacctcctcctcccaaagtactgggattacaggcgtgagccaccacatccagccaggaacctttagcatgtgttaaatttagcatttaacacaatattttaatatttattacatggggttggggagaagataaatgagtggttgttatttattttctgtgatttttctgtatgtttgaaatattccatgattaaacataaaagttcctttaaaatgtgaaaaagaaaaaggtctatatataaaaggctaggaataggccaggcgcagtggctcacacctataatcccagcactttgagaggctgaggtggatggatcacctgaggtcaggagtttgagaccagctctggccaatatggtgaaaccccgtctctactaaaaatacaaaaattagctgggcatggtggtgcgcacctgtaatcccagctactcaggaggctgaggcaggagaatcgcttgaacccaggaggtagagtttgcagtgagtcaagattgcgccactgcactccagcctgggcgacagagcaagactgtctcaataaataaaaaataaaaaataaataaaaagcttaggaatatactttgaaggttaaaatataacaagatccctacctataacataaattattttgtatatatatgtgacaattatttaaaacatttggctgggcacagtggcttatgtctgtaattccagcactttgggaggctgaggcaggtgtatagcttgaggtcaggagttcgggaccagcctggccaacatggtgaaaccccatctctactaaaaatacaaagattagccaggcatggtggtgcacgcctgtaatcccagctactcaggaagctgaggcaggagaatcgcttaaacccaggaggcagaggttgcagtgagtcaagatcacaccactgcattccagcgtgggcaacagagcaagactctgtctcaaaaacaaaacaaaatgaaacaaacaaaacatttaaaatgtaattaaacatcaagt

SEQ ID NO: 1243001 - DNA, 4001 bp, Homo sapiens
cctactgtgtgctgggcggtggcgtatctaagaagggttaggaagagagaacagactcctggcttccaggcgctcgcaggggagtaagggagtgtcaggaacctactgggcaatgcgaagtgttttggggctgggatccttccctgttctgcacttccatggcctccctgatcgcgtgtatcccgctttttgatccctcactcctgtctctgaggattcccaccacaggctcctccagacgggaacccctggagagctgcctcgtgccaccgactagcccaggcgagggtcggggaggcggccaccgcctcgggggctgccccagggcgggcatcaggaggaggacttgtggggcacagctcacccgtttccgacctgcaggacgcggtatccaaagtgcctcccggcgcgcggtggggagaagctccgcgcgccccgcacgtccaggttgtagctcgaggccggcgctgaggaaggcaagggtcgtcagctgcgaccgagggacccccgcccctgcacgtgcccagcaggtggccgatcccaggcccacccggatgtcgctccccaggccacccgcaccctgcgcttcccctccagggcgttgacttctgggaatatggaaggagcaactcccggcccccctagagctctgaaagctcttcccagggcctgaggatacaacttcccgtttggcctctctgcaaaaaaggaaggatgagaagttagaggctccagagagaggagcagacccaaggggccccaaggcagagggtgaccaagttctcaggcagaggccaagatggggatgcccccgagccgggtgcgcctctgccacccacttctcctgcggtcatggggcccaggcgcctcctcccacagtctcagattgtagctcccctgatccctggggggctgcctccccaccccaccgggccagtctttcggagcatctgtagatcccagctcccttccccctcagtcagcctgcccaggcgccctggcacacccagctgtcctttccgccctgctttctctccccgcatggagtttagttcagagcatcctagaatgtcatggaggctgggccttcatttgtttagatgaagggtgtggggctggaaaggggaaaggacttgcctaaaacgcgcagaggtggccccagaacccagcaccctcctcccagctctagctactcaataactatctgccttttgtttgtttgttgtttaagagacagagtcttgctctgtcacccaggctggagtgcattggcacgagcttggctcactgcaacctctgcctcatgggatgaaatgattctcatgcctcagcctcccgagtagctgggattacaggcctgtgccaccacgccaagctaattttattgtatttttagtagagacgaggttttgccatgttggccagtctgtcttaaattcctgacctcaagtaatctgcccactttagcctcctaaagtgctgggattacaggcgtgagccaccgcgcctggccctatctgtctttttaaagaacccactgccccttcttatgctcccttctctgtctttgcctccaccccttgcttatttgtttcttttatttccccactctcccctttctccttccaagatccctgggccccatatccctaaggccaatcccacttttagggggcagctccttgtttactccagctgcaccaagccctgcagtttctctggtcacagacacatgtcccttcccctgcctcctcccttgcctaccgaagaaaaagaacccagacagcagcgccatggccatcacagtgatgcaggaatccttcatccttccagcactcgagggacctgtggccccaggggcagcgtcaggaggcccgtgggatttgctggcaacctagacagggtgaaagaggaaaatgatcatgccctttggcctcttacagtggtactttctcacagaggcaacaggctggtgacactggcaggcggggagggaggtgtgcctgcaggagttgtgaaaccgcaggggttcagggaggaagtgtaagcaagttagagacatttcctgtgcctgcttgcattttcacatcatccaaaagctgacagcatgtcagggagatgacagtctccactgctgtcatggtttctcactaacatcccaactaagggctctgtaaagctcagcagaggactggtctaataaacagtggcaaaattacaatggaatgctatgcagcagtgaaaaagaatgagggaaggaaaaataaaacggggagaaagtgagagctttctctggaccttgaaagatgtacatgaactactattaaagaaaagagcagattacagaacagtgtatttaacccattttggttctaaaatgtaaaatctaaagaattggaggctgggtgcagtggctcactggctgtaattccagccctttggggcttcaggaggtggaggtaagagcatctcttgaagccaggaatcaagaccagcctgggcgacaaagtgaaactttgtctttaaaaaaaaaaaaaattggagaaaatatttgcaaatcatatctctaataagggatttgtttccagaatatattttttaaaactcttataattcaacaataaaaagacaaataaccagttttttttgttttgttttaaattttttgagacaaggtcttgctctgtcacccaagcgagagtgcactggcgcgatcacagctcaatgcaaccttgaactcccagaatcaagcgatcctcccacctctgctcctaagtagctgaaaccacaggtgcatgccaccatgcctggctaatttttcttttttgagatggtttttcactatgttgcccaggctgatcttgaactcctatgctcaagtaatcctcctgcctcggcctcccaaagtgctgggattacaggtgtgagccactgtgcccagttttttaaatttatttattttaggctagtcaagtgaagcagagggagtggagaaggaacaaagatattggtaactggttgtgctccattagttttaaacggcctggtgcggtggctcacacctctaatcctagccctgtgggaggccgaggcaggtggatcacctgaggtcaagagttcgagaccagcctggccaacatggagaaacccccgtctctaccaaaaatacaaaaattagccaggcgtggtggcgcatgcctgtaatcccagctacttgagaggctgaggcagaagaattgcttgaacccaggagatggaggttgtagtgagccaagatctcaccattgcattccagcctgggcgacagagtgagactttgtctcaaaaaaaaattagttttaaacaccactgcactcagaccaacctacctaagtttctaaatgagcaaacggtttgagtagacatttctccaatgacatataaatggccaacatgcacatgaaatgatacttaacactattagtcattagagaaatgcaaatcaaaaccacagtgagataccctttacacctactttgatggttagagtttaaagcaaaggaaataagagttagtgaagatgtgaagaaactggaagcctggtgcacattgctggcagaaatgtaaaatggcgtgactgctgtgcaaaacattttgatggttctttttttttttttttttttttttttttttgagagagggtctcactcttgcctaggctggagtggtgtgatctcggctcactgcagcctcaacctcacgggctcgagtcattctcccacctcagcgtcctgagtagctggaactacaggtgcgggccaccacacctgactacttttttattttttgtagacatgggggtctctctaccttgcccaggctggtcttgaatttctgagctcaaattatttgcccgcctcagcctctcaaagtgctgggattgcaaacgtgagccaccgcacctagcccaacagttctttaaaacagttaaacataggccaggcatggtggctcatccctgt

SEQ ID NO: 1243002 - DNA, 4001 bp, Homo sapiens
ccttttgcatcttttgaatttagaatactgtaaattcaaaagatgaatttgttgtatattttgaattgatttatctgttgaaaaagatcactcaaatcgctgatttttttcaggtatgtaagtcttggagagaaagcactgagaaagggggctccatctaagggtctcacctggatccctgaagctggaccacgctctgcccgaagccccttgcgttctcttggaaggtcattgcgttttcagtgtccaagttgaacccatgacataaggtcaaggctaaagggagaatgggggaaggatcaagcagaggaaagtagcatgccagttaggggctgtagtcctagcactttggagggctgaggcaggaggatcacttgagccctgattgtgccactgcactccagcctgagcaacagagagagatcctatctcaaaattaaatacaaaaaaaaaacaaaaactaataataatttaaaagaaagcaatggctgggtgtggtggctcaggcctgttatcccaataatttaagaggctgacgtgggaggatcacctgggctcaggagtttaagaccagcctaggcaacacagtgagaccccatctctacaaaaaataaaaaattagccgggtgtagtggtactcaggaggctgaggtgggaggattgcttgaacccaggaggtcaaggctgcagtgaaccatgatcatgccactgcactacagcctgggcaacagagaaagaccctgtatcaaaaaaaaaaaaaaaaaaaaaagatagcagcatgtcttcctgctccattccctttcccatccattcggtcaccctaactaacccagcatccagatgtctgcctcccaggtccagctctgttagcctggggcggggattagcacacttattctgtaaacagccagatagtaaattttaggttttgcagaccaagaggctgatagaatatgttgtacaagtacttatataacaagacagaaaatacttttccacaaatttgtcattagggaaatttcaaacataatgattgagtacaatttgtttgtaatacgggtttacaaatgagacaaatagaattctttgggggtggtgctccctatcatcaaatcgattatcagtgttcatcttcaatctctagctggcaggttgtgcaaaaacaggtcgtgggccatatcgggcccccaggccactgtttgctgactcctgacctaagaaccaccgtcgtggggcacgtccagtcctgctctgaattccagcctcccttctgagcacctaaatggcttcttcccccggtgtcacaacgatgatttgcccaacagtgaagtttctatacattcttaattagataatttccttcctatgcagctctcaagtatttccttcccttttgaggagaatttcattttccacaacatataagcataaaaggtaacaaactcaaatcattttcattcatcagtcattcaacaaacatttgcacccgggaccttggaaaatagaaccggaggcaaagtggagatggtgagaggggatccaggaggaagcactcaggaaaggggtctcacacctgctgcgcaccctgagccatgtcacttctcctccctgggcctccgtctcctcatgtgtgaagcaaggggaccggcaagcagccttgcacagtccatgaatgtggtcattcatccaggcttccctggccagcctgtctgggtctagctgttctccctgcttcttcttgaaccctttctccttccccaaatcccctttgcctctccccagactgactcctacatattctgggccctctatttatgacagacccaaaagttaccctcctccccacccagagtcccccaccccacccccatgcacctgttaacagaaggactctgagagccatggctggaaggagccagaacctggaaggaggtgaaccaggggttgcaggcaccactgaggaaccacaaggaagccaccaaagcaaagaagggcagaaaaggagaagtaggaggcagaagtctatcagagattcaaaggaagagggcggaggctcagtgagcacatagccctgcctggtcttccgcccaggactgcccacagcctgcccacccttcctccccagcttcctgacccaaactttcaaagtcaataccactatccaaaaggtgccatttgtcacccacttgtttcttgggttggcccaagcatatgaacaagctgaacagacttagcctgcctcctggaattcgtgttctaaacattaatacgggccaggcgcagtggctcacgcctgtaatgccagcactttgggaggccaaggcaggaggattgcttgagcctgggagtttgaaaccagcctgggcaacatagagagaccctgtctctacaaaaaaatatttttaattagctgggcatggtggtgcgcgcctgtagcccctgctactggacaggctgaggtgtgagaattacttgagcccgaggtccaggctgcagtgagctaggatcacaccactgcactccagcctgggcaacatagggagaccccgactctacaaaaaaatacatttaaaaaattagccaggcatggtggcacatgcctgtagtcctagctactccagaggctgaggcaggaggattgtttgagctcaggagtctgagactgcaatgagcctcaataatgccactgcactccagcccaggtgacagagtgagactctgtctcaaaaaaaaaattaaataaataaataagcaaacattaatacagatcaaacaagtgtaggaggtaaaactctgtgtcttcctgaaaacacactttgcaaaatgtccctccttcagcccatggaaatggaagcgcccttcagccagagctgtcctcatttgtagccatcaacaaagacaactcaagtacaggcatacctggtgctttttaaatattattttgtgctttttttagagacagagtctagctctgttgcccaggctggagtgcagtggtgtaatcacagctcactgcagcttcaatcaacctcctgggctcaagcgatcctcctacctcagccttccgagtagctggtactacaggcacatgctgccatggccagctaattttttttaaattttttgtagagacaagatcttgctatgttgttcaggctattctcaacctcctggactcaagtgatcctccttcctcagcctcccaaactgctgagattacaggtgtgagccactgcatccagcctatttttgtgtgtgtgtgtgtgtgtgtgtgtaaaggcctcaagctcttcacccaagaattttcacttctagtaatttatcctaagaatagttaagaagtgtagtcaaaaatatatgtacaaacttggctgggtgcggtggctcatgcctgtaatcctagcattttgggaggctgaggcggggtggctcacttgaggtcagcaattgaaaccagcctgcccaacatggtgaaacctcatctttactaaaaagacaaaaaaattagccaggcgtggtggcaggcacctgtaatcccacctgggaggctgaggcagcagaatcacttgaaccctggaggcggaggttgcagtgagcagagattgtgccactgcactccagcctaggcgacagagcaagactcttatctctaaaaaaaaaaaaatatatatatatatatatatttgcaagcttgttcattgcagcattattgttaatatgaaaagctaaaaaaacctgaatattcaacagaggaatggttcaatgatacttcactctgtgatatatccttaccctcccctgtgtctgtcacttttaattctgttttcaaaggcacaggaaaataggtatccttccacacatacatggaacacaaacctcacctttatgtgaccgccaatgtgattctcaagccaatgatttttttcactctttctcaacacattttctttttttttttttttttttttttgtgaaacggagtctccctctgtcgcccaggc

SEQ ID NO: 1243003 - DNA, 4001 bp, Homo sapiens
ctcagaagcctcctgtgacccagggccactcaccagcagctgggaagggctggtggtagacgccagggacaggcccagggacatgttcacggcctccgggggcactgtggggacagatatgtgcatggtcactctcgggggtacagagaaggctgtggaagagctgggcaggggtcacctccacctgggagacaaggaggtctgacggtgaaggaagctgtcgggtcttgacagagctgcgggagtgcgatgggcggggaggccttaaggggccaggaagcatatctgagggtgagggtctcagacacagtggaagctgaaagtgacactccggtgagtccacgggcccctggagcagggaagcctgggagcccggccctgggtcccgggaggggcggtgactcaccctgcaggccgatgggctcacaggcaccagtgctgtagccacactggtagaggccacccgtttggttggcagctgttatcttttggggggctccaaccaccaccctgcgaggagacaaagaacactttaggtaagagtgtggacgctgcagcacagctgccactccggcaagtttgcgttccctccctgagcctcagcttcctcatctgcaagatggattttaataatttaaagtccatgtggaagggatttctgtctgttggattctctggcgtatggagacaagaaatatttgttgagtctgggtgtggtggctcacacctggaatcccagcactttgggaggctgaggcgggaggattgcttgagcccaggagtttgagaccaacccaggcaacatagtgagaccctgtctctatatatttttaaatgtatagaaaaaaagaaagaaaaaacaaataagtgtttgttgcacgactgattcctactcacaggctgtcgtgtggactaaatcagcatccacctgtgatgagcctggcactgcacttactgctctgtaaatgttagctgtgagaccgtgcctgccttcaaggcaaatcttcattagccagggcagtcgctacaccagacagagaggagagtttgcaaataacagggcagggccgggggcatggggccctgagcagggagaggatggatggagccaaaggccagcaccacctgggcctcaccaggagttggcatactggaccacgctgtctccaaacccagcgctgtccacacggaaggctgtcagctcctctgtgtccaagttgaaacctagagaagttgctaaggctgggaaagaggtgggaagagagctttggagaagggtcttccttctgcctggctgccctccacccccggccccagcgtcccaatctcccctccgagcctgatgcccggggtgcctgggtcttctggacacccaactcatccccttctctccttcccagggtccagggatgccccttgcccaccatccactatcgagttgcagttctccatttctgcagagcagtacccaggctctaaaaaggatctttccccaacgtgcacctcgggcgctatgagagtgagtccaggaaaacttgcggaccaaagcatcctgtccacagagcacaagttggcgcattctgcctattttaaaaatctctgcagtacagagacaactggcctctcttccagcatctctggaactctcccaaaattggttcatcaatatcctctccctccacaaactccaaatctcagaccctatgtgcctgcctccccctcaggcttgactgagtctctcttcctacccagatcctaaccccccagcctgagcccccagttcagggccctggctcccttgggcctgggtccccagccctacttcattggggtccaggctcacctgtgaacaggaggagtgctgccctggtcctggtcatgactagaaggtcagatgtggagctctgagctcctgggccgttgcaggaagagctggaccaaggtactgaggaagcaagtgggcagagaggtggccaggggaaggaagaagattgtcagcatgagtcagagggggcgggcagagtacgcaactgatccgaggacaggctcggcctcccacacgcccccaccccccaaccggagtcactctcatcagatgacttggcttgatgccctttgcttagatggatgcaaatccctgccctgcccctcccaggctcacccttgactgccagaaggcaccccttgaccttgaaatttcagccagactggagggggtttgggcagatgccaacccctcaggaccctaaaggaaaccctggtgggagccctccactctgacctggaaagtctgggccaaggagtggggcatccgggtccctaggaggagcacagagcgagtatttgttcattcattcattcactcatttattcatcatttattcaagaagcctaatttgagcctggagatgcaagccctctgctaggtggggaagaaaatataaaccacaaagcaccagccctggggtcagtggagaggcagatgtataaacagcaagttcattgctgtgagggggaagcacagagaccacagggtgcctcacccgggttgtgaaggtgtggctttctgagaaggcttcctgaaagaggtggtgcttgagctgagcattgaaagcaaccaaagttgggagatgacagagcagccagacatggatgaggcaggggacaggagggtctgtgtgtgaaatcagcaatgggaaccagacagtcagggtgggaagttgtaagagacaaggtcagggccactgggaggaaagcaaggggaagcaggcctcaggccgtggaagcccccctaatgtacatcaatttttttttttaatttcagaaacagggtcttgctctgccacccaggctggagtgcagtgggtgcatagttcactgctgcttcgaactcctgggcccaagggatcctcctgcctcagcctcctgagtagccaggactataggattgcaccactgcacctgaatatatatatatatttatatatatatattttttaattttagtagagacagagtttccccatgttggccaggctggtctcaaactcctgatctcaatcaatcctcctgcctcagcctcctaaattgctgggatcacaggtgtgagccaccacacctggtgaagacacattgattttgtcctgagagtggaggacagcattgaagggaattcatggggactgagatcttcacattttcattttagaaagtgggttatatgggggcatggtttctttttttttttttttttttttttttttgagacggagtctcgctctgtcgcccaggctggagtgcagtggcgggatctcggctcactgcaagctccgcctcccgggttcacgccattctcctgcctcagcctcccaagtagctgggactacaggcgcccgccactatgcccggctaattttttgtatttttagtagagacggggtttcaccgttttagccgggatggtctcgatctcctgacctcgtgatccgcccgcctcagcctcccaaagtgctgggattacaggcgtgagccaccgcgcccggccggggcatggtttctttgggaagcagctggagactgatttgtcaggagagagatgttgggggtctttggggtgggctggtggctgtggggatgggctggaggctgatcggtcgctgcagggaggacgaaggtgatggaggaggaaggataggggttaggccaacctcagttttgaggaaaccagagtgcagtgtttaagagcttggactatttcaacctctttgtgcctcagtttcctcatctgcaaaatgggagtgatcatgaaagtccacaccccctgttgttgctgggagagttgagtagtgtggagggctcgggagagtgggtagaaacctgggctggcagctgtgatcattgctgtgctgtgacagctgtcctggtgggaagagggcatctgtggagcctccgagagagaggtcggaggtagctgggtgtgtgggtctggacctcaggaacag

SEQ ID NO: 1243004 - DNA, 4001 bp, Homo sapiens
gttcccgggcgtgcccgtcgaaagcggccaggaggtcaactggggcggcttccctcagtgccttgggcaggggacccacctcggcagccgccccaccagggcccaggacgcagtggaagagcgtatggcgtcgcagcaggcagtccctaaggaactgcaccaactcctccaaacaccttcccaggtgctcctcgtcccagccttgcccaggggcccccttgcgcagcagcactgccagcagcactgtcttgagcacatatgaggataggatgcgtccccactgggtggcggccgctgagtccagcccacgggcccccagatcgcgcagagccttaagcaactgcaggcacttgaggtagcaggcacctggagctgcccgttcctgcagccaactcagcagcttctgctcctggcgtgctgtgttcacaccccacagtgcctccgcacgcaggccctcagggagctccaacaggggcgcgctgggcaagggtggcggtggtggcgccacaaggaagaccccatctcccagatggacagcggggatgagacgcacagccatagaaaggcggcagcagccgtagtcagtgcggcagggcaagatgtgtaaggtggggggctgttccaggccacctggggtcaaggtgacccgacagcgcccctccaggctgtaacgcacagtggccaaggagcgctgcagatgcgactggaaccagcgcagcaccagagtagcagagaggtgacgccgcccgcgcacatccacgcagaaggcatcagcaaagggtttgcagtcccgaagccagtggccccccgaggcccccgatggtgagggtggtgccttgagggcgcacaagaagcagccgcggaaggccggggccagcgctggctcctcgcccaggctccgtggctccagcgccacaagcggcgggaggcgcagtggcaccagcacgtcgaagctgtcgggccggcggattttatgttgctcgtaggcgctgcccacctggatgaagtctccgcggaaggccaaggccagcgctcccccaggaatgagaccgggggacccccgggcgcggccagcccgcaccagctcgcccacgatccggctcacgtgcgccttgctgtggcccaacacgtgcggagacaggcgcacctcatgctcgtagtaactctccagcaggatgctgaggcccggctctcggaagtgtctcgaggagaaggcggcgtgaccctccagacggggagacccgggcaggaagcgctgccggacagcgtggcgacagcgcaggaggacatagctgaggaggagcaggacggccaccttaagcaacgggaagccgccatccacgccgtcggcgggctcggcccgggcgcccccgcttccccgcaggacatggtagaggcacaccagggcggtgcacaggccggtcaccaggggccagaagacgcgtagattgagggtgtagtgcaccgacatgccgggcgcccggggcggcggtggccgagcagcccagggggcaagccccggcggcgacccaagcccagcatgcgcacagcgcccgggcagccccgctgtccccgtctcctcctccgcggcggcttcccgaacgcaggcccgagggaggccgccctccagctcggcctcctctcccagctcaagtgttccttccagctgcggcccgccctgcgctctcgggccccgggccgcgccctgccccggctgcgcgctgagtccggcccagcggccctccccgcccggcgcccccgcgcgccgccgtcggccagcttctggcccggcctggctcgcctcctaccctgggcggccctcctggctctcccgccgctcctctccgcgcctgaccctgttactcggaccccgggagtttcctcttccgagggggaggcgaggccgcgccagctagcggggaggaaatgccggagtctggagccgagcgtggagctggcgagccgggtcggccccctcccgggcctccgccttaaagcgacgcggggcggcgggagggacttcaggacgctcttggaactggcctcccgcggcccacccccatcctccctccccgaaggcagaattgggaaggccctgattccggggcggtagcttcgtccagggagcctctggagttgcgctcccttgaagttatactgggacgttgaaaaggagaaaagggcgcacagccagactgtccagtcctccccacccccaccgcacaagctgcggtggcgtggcaggccctggcacaggagtggcccttgccgtctgccgcagtcgtctgttcaaaccagtattcaccgagcacctaccatgtgccaggtcggagccacagtgctggggaaatcatagttgacaagatggacaaggtttctgtccttcgtgaagcttacagccttgtaaaaatgggaatcaaaaaaggaaggggctgggcgcagtgtctcacgcctgtaatcccagcactttgagaggccgaagtgggcggatcatttaaggtcagtagttcgagactagcctggccaacatggtgagacccccccccccgccccccatctctactaaaaatacaaaaattagccaggcgtagtggcacgcgcctgtaatcccagctgttcgggaggttcaggcaggagaatcgcttgaatccgggaggcggaggctgccgtgagccgagatcgcgccactgtactccagcctgggtgacagagtgagactccgtctcaaaaaaaaaaaaaaaaaaaaaaaaagtggggggaaggattccacagcaagaaaacgctctaaaataaacaaaagtgcccgagggagtgagaaggtgctggctaccctgtggaaaccagaggatgacaggggtgacatttggcctgagacttcatcggaacatgctggttcacccctgtaatcccagcactttgggaagccgaggcggcgagaagatcgcttgagtgaggccaggaattcgaggctgcagtgagctatgatagcatcattgcactccagcctgagtgacagagcaagactcttgtctctgaaaaaataaaataaataaaatgaaatgaaattaaaataaaattattttcccagtggaggaaaggggcacaaacaggttcagctcaggcaggttcagctgccccccttcccccctcccccacaaggttacacagcctttgtagagctgggcagaaaccaaggggtggaactcccaggagggggcccagggaaggtctcttcctcatctgctgggaattttgggggtcctttgtctgggtctacattggaacctcagtcctaggaagcttgttttgtttcataacagggagcacttcctgaaataatctgatctatttaaataattgtctttctttattcacactcattacaccttctttgctggcactgacctttaaagagagcaagggtgaatatattaaaacatgttagaacccagctgccacctgggaaccaggactcaaaagatggcttctgggttgttcccagtaaatcctaaattgggcccctgagagctaagcagatctgccttcagatcccatctactaatattagctatgagatcatcatctaccagtcaagattcttaggtttgcaagtgacagaaacacagctccaactggcttaagtgcacgcacgcatagacacacacacacacacacattattgtatcatgttaactgagatccatgaggggatttcaggtacagctgaatctaggtgcctcaatgctatgcagacctgttctcccttcacttcttagctctctgctttttaagtgggctgtcctccccacaggtcctccatatgcccttggctgctgtagtctcacattgtcttcagtgcagaagaaaagagagcctttcctgtttttgtttgtttgtttgtttgttgtttgtttgttttaaagacagagtctcactctgttgcccaggctggagtgcagtggcacgatctcagctcactgcaacctccacctcctgggttc

SEQ ID NO: 1243005 - DNA, 4001 bp, Homo sapiens
aggttattgacgcattcatctctgagaatggctgggtggaggactactgaggttccctgccctacctggcgtcctggtccaggggagccctgggcagaagcccccggcccctatacatagtttatgttcctggccaccccgaccgcttcccccaagttctgctgttggactctggactgtttcccctctcagcatcgcttttgctgggccgtgatcgtccccctttgtgggctggaaaagcaggtgagggtgggctgggctgaggccattgccgccactatctgtgtaataaaatccgtgagcacgaggtgggacgtgctggtgtgtgaccggcagtcctgccagctgttttggctagccgaggaaggtggagatgaagacgctggtgtcaaggttgagcgtagcatgccaccagcggtcggggaagtacagcacctggtggaggaagggggtgcagcagagattagctgcgggcctctagcctggcctggccctctcctgccagccactgacctcaccagcccggatggtacactccaggggccgtgcagacggtggcagggctgggtatgtgtcccggagccaggccagcgtggtcttgttggggtggaactctggcgtcttctcaggtgggtaaaggaaccagcgctgggggcatgagcagcagtgtcacccttgcccgttttggtcagcgagtcccaagcctcaacccccaccccgtgctgaccttacgaccgtagatcacttctgagtacccgggtccatgccagtggaagggcacccccgagccagctcctgtggggttatgagcacctggtgaccaacccattttgtactcaccgacagaagcctcagtccttcccagtcccaagaagcacccacctgcgattccaaagctgtaagctggagcggttcccagcaggccaaatgggggtggggagtagtgccgaaagagagaggcccactcggtgaagttgttgtccccgaagaagtacagggtgtctgccaacagagacggcggggacagggatcctggcacctggagactccaagcgtccccaccccctaccgccgcctagggctgcctcaccattgcccagggaggtggggtcctgggggtgcagcagctgctccacatactcctggaagggcaagtccactgcaggaaagagacgggtcaggaccgtctggtccagccgccccggtgttggcaaatgggcgggccccaggggtgaggccgcgtacctttgtggtaggagtaggtgttggcggtgctcagccggaccactctgtccccaaacgaagccagcaacctgtcgcgggagcacagggcccggaacctctgcgggggcggggaggggacttagtggccgggcccagcacgggcgagagtggccggggacggacgggcacgcgctcaccgagttgtccgtgagtccctgcaggatgacgggcctgacgaaggcgtacctggaaagaagggcagagtcgcggccaggccggaccgccagcctcgccgccccagccccacgcgtgcgcgcgaggtcaggggaaggcggccttgggcggtcggggcagacgggccggtgaacaggacgcgacctccgcgatcaggggcgcacgtactgctgcacgaactccgcgtaggtgaggtcggcccgacgctccaccgtgcagcgctcctcctccgccacggcccccggcccgcccgggcgcctgcgggcacagctgggtcagcccgcgccccgcccgccgcacgtgaccccaccgcccggcccctcccgggccgctcaccacccgccgtcgccctccgccccggagccgggtagagccacagccgccagcgcccagagcgcgagcaaccgcgacgccggcgccatgagcctgccgccctcaggcagccgcgctgcacgccgggaaccttgggcccatccgccagccattggccggcagcttcgtcgtcgtggcaacggccgggaaccgggacggaccccggaagtgacctcctttggcccgccccggaagaggcctctacgggaggcactgggaaggccgccccgagagcgactatgggcgccgccggttaccatggcgacaaccccgccgaaagcccccgcccgccagctgccccgcgggcctacggcgagcccgccgcgctatggggtgacacgcagtgccgacagcggctctacttcctttattgaggtctcaagttccagcctccgcccgtctcgggcacaagaccaggcggggttctgcacgcggccgcccgggcaagcccagcagatgccccgtcaggagtactcgcagaggtggccgcagcctgcgggacagtgggagctgccttccagccacttcatgatgtgctgcaggtggccgccgtggctgcagccctggcaccacacgaagagacccttgactacgtggtggcagacggcacacatgctggcgcagcggtggcacctgggggcgggcgggagggagggtgcctcagcgggggctgctgcgctgcctgcaggcccctgccccacctcccgaccccactgccccacctgtcgcagacccagccccggctgctcatgggccgcttgcagtggctgcagttgacgtgcagggtggtggaggcctggttgaggcagctgacggcgcggctggtgctcagcttgaccacctcgttggacacgttccagaggcggaagcgctgcagcaggtcgatgtaggaagtgtaccagtgctcctgggggagggagcgcccggcagtcaggatctgggtgccaggggcggcgctgcaggggggaggccccgcccaccacacacctgggtctgctcgtcgatgtccttgcgcacccgttcacccaggacgatgagcacagacacagccatctgcacgtcgccctgctcagcgtagaagtgcagcatgtcgcgcaccagcacgccgaagaagtcgggcggcaggcggctgtcgtagagcgcgtgtgagacagacaggagcgagaaggaggagtccacgggggccagggaggccacatccgcctcgctgccgctcacgtgcggggagtcggccttgtcctgcaggtgctcgggcccgggaggcgtgtccacgatctcgtggcgcagcggaaaggcctcctgcggcagcacgcactcagggtcctcggctggaaggcagggaccagcggaggctctgagtctgtcctccatccgcctctgaaccccaccctgcccggacccccactcacggtgcgcgtgttccggatccagcaggtacagctcgtcctcctcaccttccacgtcacccagcaggtagtcggcaggtacgtcgctgccctcggtttcctcgttatctgcccgacaatggggcgggcattcagggtcgtctgggacacccccacccctctcccatcagcacccctacccaccccagcctaccctcattggtgatgagtgtggccgaggagtcgagcagaactgtgtcgctccgtgcatctcctttgctgcggtccagccgcgtctcactgcccaaccctggggccatatccttcaggttgaaactgggggcaggaagggcccatgggtgggtgggctcgagcagccccagcccctggggagagctgcccccggcatctacctgttcatgagcgggaggccacaggagccacccttgcccacactgtggttgaggtttgcagtgggcactaggccagggctgcagtagatgatccgcagcatggtccacgtttgcgccacctaggggcgggcactggtcacttgtgggcgtcctggacacccagcaccccatgcaggtccctctctgcctggacagtcacaagccctcagcattcagctgccctcagtacccaatgtccaggcccaccccaggtaggaaagctgaggctcatgggaaagacaaaaaccccggtccccgccctacagcagcacagaggaaaacagaattgggcagtggggacttgcggggcagctagagatgggcatgggaacgg

SEQ ID NO: 1243006 - DNA, 4001 bp, Homo sapiens
aacaacaacggcacagaaaaggccgcctgagaccggggctgggcacggctttgacaggcaggagcattatataattaactgccccagactcctcctcctcttcgggtaataacgaaccctgcttttcagttgcataagccaaaataataattactctccagccccctgccactcctggatgtggccgtggagcaggtgttccgagctttcttcatgagactcggaggcagcgagcgggcggggaggactagagcacacgtacgctcaggatttttattctcggcagaagcacaagtcattgctgcgtctcactcccttcccaggcatccatgcctgaaacaggcgagccgcccgagggaggcagaggacccagtgcctctgaggataagctcccacatgggagtggactggtcggggaagccagtttgtttggggtctggcttccaggaaaggaccggctccatgcgtgtcaggtgcactgaggagtggatatcggagagtccaggcaggcgggcagctgcagagccggccaaggttccctgcacagaaaccatcttacagcagcagcagcagcagcagcagcagcagcagcagcagcaggcagctccctggcttccggccccggctctgccccgaatgcggtggcatcttagaatgaaggcacagatcgattccctcaactaatggtgaaaacgatgcagccactgaaagacgagattcctgggctctcactgagcagatgggcctccctcctccctccagcagcctgcttcgacagcgctagtccgcgtccaaccacctagaagtgtactgcctggctgttttggttcgggttggcatcccccgcccctagcgctccccatcactccctttctctcggcttgggcagattcggggctgaggaaggccctcgggcgccgcaggaacaccagaagcgaagctggggcctgatcgaagggcggcctccagggtggggggcaaagccaacaaggggaggggcccttctcccagccccctctgcccttgctgggttccccagggccgcgggcccagcctggcccttcccgcaggtctccggcctgctgtgtccgacgcacggaggctctgctgggccccgcctggctctgcccctggaaagcccccaacacccttcagctggcacaggggcactgtccccaccaggcagcggggcaacctgtagccaggagccgccgtggcttccagggaagcccgggaaaggcccctggtgcccacggcccaaccggaggacgcagctcaacttccccagagatccacagaaggggcgcgatcggaagcacgtccctcccgccccggcccggcccggcccgcggcacctacctccgtccgagtaggtctcggtcccgtagccgtcctgcagcccgttgctccaggtcccttcgtatttggccccgttgcccgcgcactcccgcaccccgtagcgccccttgaatccgtgcgtccactcgcccttgtacacccacttccccttgctctccaggccgatgccgtggcgcttgccctgcgcccaggtgccctggtacgtgttgccgctgggccaggtgtagacgcccagcacctcgaagccgtggctccacgagccggtgtattcgccttggcccttggggccggtgcagacgccatggccgtgcgccttgccgtcctcccagcctccacagtaggaccctccgtcgtcaaaattaaacctgcccccactggacatgcatgtaactcggttccagatcccgcaaacggtgaaaacggactcaggcgatcgacacagcagagtcgcggccgccggcggccctgggtcgcgagcgttttccggaggagaggaggacgcggccccggagcgcggtctcgggcgcgggcggccgcggcgccggctccggaggaatttcagtcaatcgggggcgattattccttttcgagctgcgccgcggagcctgaccagcgtctcgcgctcccgctggagacaggaccggaggggagggggaggggaggagggagggagggggcaggagcggcggcggcggggcccgcggctccacctcagcggcgagagggcccctcgccggcagccccgcggggagggcgccgcgccgaggccgggcggggggcagctcaggcccgggccgcggccccccacctgcggctgccgcgctgcgggcgcccgagggcggcggcggggcccgcgggcggcggcggcggcacgggcggcggcgctggcggctgcaccatattgggggccgcgggccgggcgcggggcggcggcggcagcagcagcagcaatgcggcggctcgggcggcggcggcggcggtggcggcggcggcgtgcgctccgggcccggctcgcgcgctcgggccgcgcggcgcgcgcccgcaccccgcccgcccgcgcgcccccgcccgccccccgccccccgccccccgcccccgcccccgcccccgcccccggagcgcggcggtcccaagaggggcgcggcccagcaggctagggcgcggcgcgcgggcggggaccccgggcgccccgccctccgcgcccccagccccgcgctccccgccctgggcttccccggggcccccgccggactggaaaccggggtccagccggggcgcccccgccccctccgggagtgggatttaaaggcacaggaactgcgtcatgggaaggcgcgcagcactcagggcgccctcggccccctcccgggagctgggcggtgaggcctgcagagcaggacctgccagctgagcgcccctaccctcgcccctgcccgcccccgcgcctcgcccctcccgccgggctcggatctgccccgcctgcccctgactcgactgaggccctttgcaaaccacaggtggttttctccggtgacaaacaatgcttccttcttccttccgggcagcttgggtccaagagtggggggaggggggcttaccccagaaaacagggatttggcgagtccctctcccctataaattgagtgagagtcgggacacacgcgtgtatcttggagcaaagtcacccgaattccgtgcgccctgcgccctggccaacaggtagcgcccccccactcggggaacggtcgcgcttttggggagcaaagtgggaccgccattcgggcgtttctaggtctctctccagacatactctcaccctccgcccctcttcccacgcacaagagagagtctgattcttggatccgagcatcctgggatccatttaaaatgcatttcctggaccataaatcctcaggcagaagccggcgtccccagccctcctgaaatgcgtgcgggaaatggcagcagaccggtgcagtgggctgatgggggtgtggaggctgcccagggtcctcgctcctgggagtgtgggccggtgaccgcagcgcggtgagccagaaactgcaagccaggcctggagcctgagattaggacaggagaagaggtgcgattcggagcctccaatcagccaggagccctgctcagatcttcccctgtccgagagaatcaggatggtccccactcttggctcacggggctctcagaaaaatcagcccctcctgggagtcccagagttcaacctcagtctcttgccttgggcaccaaagctccctccccagagtaccagcagccaggaggacagtcacctcctcatacacccactgtcaatgaggaacatttagggcggtcggctttgttttgttttgtgcagttacagtgattcattgagctttctagcgctgtctccctgtgcccctctacagaagttctctaaatgtctgcggtggcatcattggaccagctacgtcttggactttattggaagctgccaaattgctttccaaacacctggagcaactgacctctcacccttcagtgtgcctgggtttgtggttctctatttcctggccagcactggtgtcctcaaacttctgattttctttccatttattttactttgttcatctaaatgggtatgaaat

SEQ ID NO: 1243007 - DNA, 4001 bp, Homo sapiens
acacaaaaatttaaccgggtgttgtggcatgcacctgtagtcccaggtacttgggaggctgaagcaccagaattgcttgaacccgggagttgcaagttgccgtgggctgaaatcgcaccgctgcaatccagccggggcaacaacgactctgcctccaaaaaaaaaaaaaaaaaaaaaaagtcagtaaagaggaattaaccagttttttccgtttacctaaaaacacactctgaactggaaaccgtgctttcacctgtgatatacagtcctaaagttcaattcaatgtaattgattatcataggtggtttgaaagaatgaactaaactttaggatcgtatatcacagatataccacattcaattaaatttgacttaataaagtcaagtcaattttctctaaggtagcagtccaaagaccaggttccaaacttttatggaagtccatcggattgctctaataaaggacaatatattaaggtcctacccaactataaacttcgacaatttctcttatactttttctaagatatttgaagcacaaagccagggacacaaaaggaaacatcaggccaggggtggtggctcaggctcacgcctgtcatcccagcactttgggaggccaaggtgggcggatcacaaggtaacgagattgagaccatcctgcccaacatggtgaaaccctgtctctactaaaaatacaaaaattggccagccatggtggcacacgcctgtaatcccagctactcgggaggctgaggcaggagaatcgcttgaaccctggcagcgaaggttgcagtgagctgagatcgcgccactgcactccagcctggcgacagagcgagactccatcttaaaaaaaaaaaaaaagaaacatcatttctcttttctttttcattcagggtctggctccgtctcagtaactccttggggaaagcgatggagaagggctcgctcacgcagcacttctggcagtccctgaaggaccactacctcaagtctcccaggctggagtgcagtggcacgacttcagcacactgcaacctccgcctcctgggttaaagcgattctcctgcctcagtctcccgagtagctgggataacaagtgcgcgccacggggattaagccctctcgtatgcctctggaatggtactatgtaccatcttcctagcaatgataaaacactcaattacctgtgttctgtggttcaaatggggaacgctaatgagaatataagacagccagttaaagggtggctaatcctgacttatctatgttaacctacatactccagggatttgggagtggttaacaaagatatcaggctgaattaagatggtctctactgttagacgttgatcacttaatactcacaggtatctactgaataacccatacgggtagatgcatgacagttttagaactgatcccttttaatacataacgttcagaatgaccttagtgaggcccagaaaattttgaaggtctttctgaaaagctagggtatttaacatttctccaacttccacgtttactgagtggctcaacaaaagaatgcatttctcagaaaggaggatgaagctaagcaggaagtttcgcttttcttttctgataactcttagttctcgtcctagttcctcctccacagtctcttaactctaggagtatgatagggagcatcccgccggtgccagctgggaacggggagccggcgtgcccggggtatcccggggtacgtggtctgcagggcgcagccaccacgtctcagcatgtgcgtacccacgagagccggcaagaaggccccggcacagcagccttggtgggaacctcgcggcgcttcccagcccagactctcctaccgcaaaggctttaaagactcgcagcgacactcacttcttgctcagtttcggctcgctgccatccactttcacctcggccgcctgcacggccgccatcttcccggagggcccgacccaaaagtaaggaggatagtacgttaatttccaggtcaaggtgcgaagccccacctcttccgggggagagggggcgggcactctcgatgcgccgcggctgctgctgcgcaggcccagtgctgcgcttcgcggcagaggcgtctgcggtgacagctcagtcagttgagctctgtgtgccaggcgctcgcgagggggtagctcttctagtagtgctcggcgtcagacatggcggaggcgatggatttgggcaaagaccccaacgggcccacccattcctcgactctgttcgtgagggacgacggcagctccatgtccttctacgtgcggcccagcccggccaagcgtcggctgtcgacgctcatcctgcacggcggcggcaccgtgtgccgagtgcaggagcccggggccgtgctgctggcccagcccggggaggcgctggccgaggcctcgggtgatttcatctccacgcagtacatcctggactgcgtggagcgcaacgagaggctggagctggaggcctatcggctgggccccgcctcggcggcggacaccggctcggaagcaaagcccggggccctggccgagggcgccgcggagccggagccgcagcggcacgccgggcggatcgccttcacggatgcggacgacgtagccatccttacctacgtgaaggaaaatgcccgctcgcccagctccgtcaccggtaacgccttgtggaaagcgatggagaagagctcgctcacgcagcactcgtggcagtccctgaaggaccgctacctcaagcacctgcggggccaggagcataagtacctgctgggggacgcgccggtgagcccctcctcccagaagctcaagcggaaggcggaggaggacccggaggccgcggatagcgggggtgaggaggctgagcgcggggcctcgcggatatctgcgcgggtggggttgggatctttctcctggctgcctggcgtccatcttggcatcttcggtagcagcgcttggccccgccccctgttgacatccgggtaaatttgcaccattttcttgccttctcgctcccttgttgtttattattgttctttttttgcgatgggtctctgttacctaagctggtctgaactcctgagctcaagcgatcctcctgcctcggccacccaaagtgttgggattacaggagtgagccaccacgtctggcctctcgtcgtttttattttttaatttttgagtgggggctcgctccgtcgcccaggctgtgatgcagccgcgcgatcacgacctactgcatcctggacctcctgggctcaagcgaatctccggcttcagcctcccaagtagctggaactacactcccgcgccaccacgtcccgctaaattaaaaaaaaaattgttgtagagatgggggtctcgttgtgttgccctgacaggtctcgaactcttgggctcaagcgatcctcccgtctcggtgtcccaaagtgttgggattacaggcgtgagccatcacacccagcttcttggtctagttttaatttactttaccattgactagaatattgacatggttctatattcaaaagttacaaaaagtatatagaaaattctctcttggccgggcgcggcggctcaagcttgtaatcccagcactttgggaggccgaggcgggcggatcacctgaggtaaggagatcgagacgagcctgaccaacatggcgaaatgccgcccctactaaaaatacaaaaattagccggccgtggcggagagttcctgtagtcccagctactcaggaggctgaggcaggagaattgcttgaacccggggggcggaggttgcagtgagccgagactgcgccactgctctccagcgtgggtgacagagcaagactccatctcaaaaaaaaaaaaaaattatctcgtccttcctgtccaccagctacccacgggctaactggcttcttgtgtttcttttaagagatattccacagactcctttttaaaaaagattgctgttatgttcaggtagattcagtataaaggc

SEQ ID NO: 1243008 - DNA, 4001 bp, Homo sapiens
ctctgtctcaaaaaaaagaaccccaaaaaacagaacaaaactgaggcttacctagggtcacagatttgaaaagtggtaagagctaatacttaactgaatttaagtctgactctaaattcaatgctcattttaccacatacccgcagttgttcatttgttcagggatcatgagtgctggctctggattaagataacctacattaatgtataattccagggctgggcatcgtggctcacgcctgtaatcccagcactttgggaggccgaggtgggtgaatcacgaggttaagaggtcaaaaccatcctggccaacatggtgaaacttcgtctctactaaaaatacaaaaattagctgggtgtggtggcgcacaactgtagtcccagctactcaggaggttgaggcaggagaatcgcttgaatccgggaggcagagatcgcagtgagccaagatggcgccactgcactccagcctggcaacagagagcgattccatctcaaacaaacaaacaaaaaaaaatacacaaaattccagctccctacttcctagctatgtgtaactgagcaagttattccatctttctgagcctcagtctcttcatctgtgaaaagggataacagctgggcacagtggctcatgccagtaatcccaacactctgagagggtgaggtgggaggatcacttgagcctagaaggtctaggcttcagtgagctgtcatcgtgccacggcaatcccacctgggtgacagagcgagatcctgtctcaaaaaaaaaaaaaaaaaaaaagacaaaagggataatagtaccaaccttagaaggtgaattaatgcctccaaaatttttagcagcgcacctgacaattagcagagcattcaataaatgagtaaggcaaccactacgtgtctggccctatgctgtgttgttgccgggtacagaggacacagtgatgaatcacaagaagtgctgccctccagaagttcccagtatgatggaggaagacagagagagaaaattacaacataatgttacaaaaactatgactgaggtaggaaaaaaatgttgcaggaacatagagaagggaaccactcactttgcctgaaggggaatcaaggatgacatcacaaaggatatgaagctaagaggatgagtaggagctaggcaggcaaacaaggagaaagggaagaaaaagcattccaagcaaagggcacaggtggtaaagggcgtgtggtcttcagagggcacagtgtgttctggcctggcaatgccctttcctagtgttggctagaaactggagaggtcacaaaaatgaatgccaccctaaggagtttggggttaattttgaaaatgagagaaggcagcagaactttaggaaagggaagcctgttgtttctggaaggtcttctctctgcggatggctgccagggacaaatggaaaaagaagacgcagagacaagagagggtgaggaagcagcgttagcaagaaaaaggaatgaagcctaagactgggcaaggaagtggaatgggaacaatcctggtgaaggcctgagcggtgggtttgtaggcgtcgctcggcataattcaaggtcaacagcctcccacaacccggctggtttctcagcgcccggaacgcggcgttctttcctcaagccccgcccctcctcctctccactcccagcccccggatcttggcctcactgacagcctgtcctcaggccccgccccaccccctggccctgagctccgccccgcccccagccctgggccccgccctcacgccaggtgctatccggtcgccggcacaggtacgtttctccgatctccaccgtgacttccggctcgccgcgcgccggggtcggcggagagacgcggcccggggatggggcggtcccctcagcggccgcattctccccgggcccgggctcgccctcccccgcgacccctgaagtccccgccgcaaccgccgcagcagctccctgtgccgccatcgcgggaagggaagtgacgccagaatcggacgccacgcagttcttttggctccgggtcagcagtgcgtggggcgggctcctcaaggtttgagggcggggtctgtgatgtagcaggagccgattggcttctgtggccgtccccgcggccccgcgagttggatgttgagtgtgcggcagtcttggagctcctggttttccgtgcggacctgtggctgcagcctatgggtgaggagaggagacagacttacctcatgcgatgactcaactcaacctttttttaatttatttatttatttatttatttatttattttgagacggaatcatgctctgtcgcccaggctggagtgcagaggcgcgatctcggctcactgcaacctccgcctccgggttcaagcgattcctctgcctcagcctcccgggtagctgggactgcaggcgcgcgccaccacgcccatctaatttttgtatttttagtagagacggggtttcaccatgttgtccaggatagtcttgatctcttgacctcgtgatctgccagcctcaacctcccaaagtgctgggattataggcgtgagccaccgtgcccggccagctgaacctttttaaaggccctggtacctgcggaagccaagatgtgccaattttcagcgggcgctgcccccactttaacagggcagagccagagcggccgccctggtggcctggagccgcacactcgcgctggcctaatgtcgctccccgccccccccccttttttttttttgagatggagtctcgctctgtcgcccaggctggagtgcagtgacgcgatctcggctcactgcagcctccgcctcccgggttcaagcgattctcctgcctcagcctcctgaatagctgggattacaatcgcgcgccaccacgcccggctattttttgtatttttagtagagagagggcttcaccctgttggccaggctggtctcgaactcctgacctcaggtgatccgcccgcctcggcctcccaaagtgctagggttacaggcgtgagccaccgtgcccagccagtgccccatttttgaaggttgaagagactacttcccctatttgggatacagttggtgcggggaaagcagaacgggtgtgtccagggacaggccataattcaccctcacaggataaagtctaaagaaaggacgagttgggcggggcgtggtggctcacgcctgtaatctcagcactttgagaggccgaggcgggcggagatcgagaccatcctggctaacaccgtgaaactccgtctctactaaaaatacaaaatttagccgggcgtggtggcacgcacctgtagtcccagctactcgggaggctgaggcaggagaatcgcttgaacccgggaggcggaggttgcagtgagccgagatcccgccattgcactccagcctggggaccaagagccagactccatctcaaaaaaaataaaaaggccgggtgcggtggttcacgcctgtaatcccagcactttgggaggcctaggcgggtggatcacgaggtcagaagatcgagactattctggctaacacgatgaaactccgtctctactaaaaaaaaatacaaaacaattagccgggcgtggtggcgggcccctgtagtcccagctactcgggaggctgaggcaggagaatggtgtgaacccgggaggtggagcttgcagtgagctgagatcacgccactgcactgagggttctgtgagagtcagtaaaggttaaagccatttatatgtgtatggtccaaccatacacaatcggccctccatatccgcatgtcccacctttggagattgaacgaagagcgggttgaaaatacagtgttgaggtatggtggctcacacctgtaatctcgcacttcaggaatccaagcaggaggatcgcttcaggccaggagttcaagaccagcctgggcagcatagagacctcctttctactaaaaatttgggggaaaaaaaaaattagctgggcctcggggcccgcacctgta

SEQ ID NO: 1243009 - DNA, 4001 bp, Homo sapiens
tgtctgcatccctctgcccgcccctcctcgctcccactccttcccccatcccaggcccaagatgcttttatctgactggggaagtttgacttgtgagatgtctgagaatgctgtgaacatctttcaggatttctcaccccactgtcagcctaactggaaatgctgtgctaagtgctttaggatgggttcatcctgtcacttgaatttcacagcaaccatagaatgcaggcgtcatctcattgtacatataagaaaactgagcctcagagaggttaagtcacctgcccagtgtcacccagctaagaagtgccacagtcatgatttacataatggtctatcttactcccaagtctaggagtctcctcctgtgccaagaacaggaaacaaagctgtgggttcaggcctcccagcaacaagccgctaacagaataaatggggtgataaagaaaaatgaaaaccactcacgcaacttccaggctgtcttggtgaccacaggggtggccatccttcagctggctggcacctgaagccccacccacaaaataaactgtgctttcctcgtggggtgggggtggatccccccccagatccaccaatcaagttggcagagagttcccacacatccaggcagacagaatgcctcgtcttctggccctggggtgcctcgtggttccaaattacccacagcagcaacagcagcagcctgtgcacatctgtcacgatcctggatcatggaatgttaggctcgagccatctcagctcaatacagggctgcaatacaaacaagaggtgacgtcatgttagaaaatgcttggtaagagctgttgctccctggatcaccaagaccacttgataaagactgacacccaccaaagccaccagagtcagaagctgcactgcaaattaggtttgggaatctgcagagggggcacctcaggtagggtgatttggaacgtaaggaaaaagaaactcctcccagaggccaggataatgagctgcagctctgttccgggatgctggctgcctaaagtgcagcagccgcagtggggcggagaagaccacgtgtctgcaattcacatagatttcctgcgagtcgttgtttttgtctgacgtgtgggatgtgggagagcggagtcagaagctaagcttaggggcctaggaaaggcatcccagagacggccactgaagtcctccttggaaagaatctcgaagacgaccctgatggtccaattccccagctcctggcaagggaaccgctcctgctccctgcgattcccaaggacagagctaggaactaggcctccagtctgggcgtaagtggctatgactcttcaactctaaaaggcctcctcatggagcctcccacctccttcccacagccacttcacctctttcccatgagcccgctcccctccgtcccctttctcctgggtccccgggtctgcctctctagtcctccgttcacacccccttttctccctgccccctgagtctcccacttatgcacatcctgtctcccgatatccctcacgtggcccctgcctcgccagactcccgttactgccctttcccatatgctcgcggggtctcccattcattcattctcctacttctcttctccctattcattacctgtccttctgcagacccccagctctgcttccggcctccctggttttgccccctccggcctccaccccgacccctctcgtccgggggcgggggcaggtccctcggccacggctgatcctcccaaccctctgcttgcggagtacgggctctagcctccccacgctcagagctctctgcccgcaagcccagccagccccgcctggctcggcccagcccagggcccaccgtcccctcgccacctcgtccccttgcccactccacctgcagctgcggctccggaggccgaggctccgctccaggcgcgacccccacttgcctccatcccctgccttgattggccgctgcttgacaaccgaccctcacaacaaaacctccggctcagagccccgcccaccttgcctcccgcaccaatcagctgccgcgggtgctccgcctcctgccaggactgaccaatggaagcaggcgcttctgccgcttttcctcagtacccgccctcttttcctaaataggactaatcaagaggaaggaacgttcaagagccgccccttggcctctaataaaccaatgcaagctgccgtttccttagtcccgcctccgtctcaagttttccctttcctctccgtttcctccctcgaacctaatttgtgtctgaaaacttttgagagccgccctccaatggcggctgcgccaatggcttgagcaaccgtcctggattgaccaatcagcgtccgcattattggaaaactcaattcccagatagccaatgggaaaggaacttcgggggcagtgtgaagcctcaggccttccatcttggagtggggcaaaacctaaggaggccttagtcggcattttgccgaagctcctcattcttcactttgcctgcagatggtcccccgtggcaggaggactttgtccctgttctttgacccggacgccggcttgaatcccccatgggaggtctagaaggaaacagcctgattccggagccgaggcaggcgctgaaccctgtagcactgcacacgcagccaccgcctcgactaatggatgcgtgggcaaggggctgctccctgaatggctgcaatcagggaatcggagaaaggccagctttatttgtgacacgttgggcggggtgggctctgggaagcgccgtaacccttctcgactcagggcctctcgcgtggccgcttaggagggacttggccccgcagccgcctctccctgttgcccagaggttgtcccaggcacccagagcccctcgaaccttgcccttcggcctccagcctctcaccgcaggtcagggctccttgggctcacataacgcccagtacaaccataagaggtaggaattcctgttcccatttacagatgaggaaactgaggcccgggttaagatgcttgcagaaaaccacacggtcagaaagtaatagccccagaattcgaacccttgttctgaaagccaaagcgtgggggagtccccactctgccttctgcttcagccttctgcttcagattctcctgcttcagcctcctgggtagctggaaccacaggcgcccgccaccacgacgggctaaggctagtttttatatttttagtagagacggggtttctccattttggccaggctggtcttgaactcctgaccttaggtgatccacccgccccagcctcccgaagtgctgggattacaggcgtgagtcaccgcaagacacctttaaaagattagcagaataacatcggatcaaaactgtctagcctgcagttccccttaattttgtattataaaaagaaaactaaacagagaaaactttaaaagacaatataatgataccacgtagattccagtacttgttaacagtttgccatatttgcttcgtctgtgtgtcttttcggaaccatttgaaaattgtagatatgacatttcaccccaacaccaaatactgagcatgtatctcttaaaaataaggcccttggccaggcgcggtggctcacgcctgcaatcccagcactttgggaggccaaggcgggcggatcacctgaggtcaggagtccgagaccaacctggccaacatggtgaaaccccgtctctacaaaaaaatacaaaaattagccgggcgtggtggcgcacgtgcctataatcctagctactggggaggctgaggcaggagaatcacttgaaactgggaagcagaggttgcggtgagctgggatggggccactgtactccagcctgggcgacagagtgagatccatttcaaaaaataaaaataaagcccttattctacaataaccattgttatcaccactgctaagaaaatttaattctgtaacaaccagtccatattcgtatgtccccagtcatcccaaaaac

SEQ ID NO: 1243010 - DNA, 4001 bp, Homo sapiens
atctcagaaggatgtctccagaatagacgttgcacggatgggggcttgagtaattcagtcctgagctggacaagtcggagcggtgccacttctgggctctgtggtctcaggtatgtggcttaacctctctgatctcagcatcattcattcaaatgacaagactcatactaatcttgcaaggtacaggtagtaaaaatagagcttaagaatgtaggctctcaggttcactggcagggaccgatcccttacagactgccagcacaggtgggttactcagtgtctctgagtcctttgctttatctgtatgactggggcagtctgagtgcccacatcgtagggcatggcaagggttatatgcagtaatatacaagaaagtgtgtattaataatacttctagatgcttctgacatgcctggcttcccctaactcacctcaacaacctcatgaagtagacataagagctccactttatagataaggaggctgacgcacggaaggtttgcgtgtcttgcctactgtttagcaagcacctgacatcaggaaggttcagcgagggtctgttattaaaggttcgagtagcccaggaatgtgactatgcttagcgagcatccaagcatctaggtctcaggaggaactccaccagtctcgcttaatccctcttggtcgcttccccatttggggaggcctttgctaaggggacggaggagcattgcgtacttgcaatcacagtactcctccatgttcgttgcgtgcttgcctcagccatccttgctgtgtgacctccagccagttactccccctctctgggcccgcaggcttttatgtgcagaatgaaggggcctccagccgcagtggttcatgcctgtaatcccagcactttgcgaggcagaggcaggcagatcatctgaggtcaggagttcgagaccagcctggccaatgaaaccctgtatctactaaaaatacaaaaattagctaggcaaggtggcatgtacctgtagtcccagctactcgggaggctgaggcaggagaatcgcttgaacccgggaggcggaggctgcagtaagccgagattgcgccattgcactccagcctggacaacagagcgagactccatctcaaaaagaaaaaaacaaaaaaaaatgacggggcctctaatgctgtctccatttcagacctatatgaggtgcttgacttagtgtgagtgttttagatttagccacttcacatatttaaaaagtccttttcataatatttctcaccttcagatcctgcaaccatttcttatgctattcattctagccaaagccatttccaaagcatctataagcttacattttcagatgcactccactccaatcaagagaaaaactcggcagtggaacggaaatcaaagttcctctcaatttcagagccggttggattccggtggatagtggagagtgaatcgtaacctatttcacactcttgctccctacacaacattctgttgctctgaatgcattactttgctcacagggaatggccagaggaggatgaggagcctgcagagagaagagtattttgaaatctggggagccctttgcaagcttcctcattttcccagtgcaaaaaccaagacccagcgagcggaagtaacttgtccaaggtcacacagcaaatccgaatccaacccagcactctgtcccccagcctggggctccttccagaacctgaaaactgccctttctgcattcactgaataaacccaattttgccatctacggctctccaaacagctggcaaacagctccttctggagcacgggaaaggaattcactcaaaccagcacttttgccaaggatgtctaacagcgtcaacttccccctggcccccgcccaccctacagcaagcagtaactcttcccctccagtttaactcaccttcttgtctcagggagccagtttccagctgtttctctgccaggcaaggggagcccatctcttggtgcccagggaagggacaggtttctggtggagatgaaggggaagaaaaaaatccccaaaacagcagtttctagcagagtcagtttccaatctttcttcccgtgcctcctccagaaaccagaagttcattcattctgcatctctctctccagcagctgcaggagagccctgggggattgaggtgggatttttttttttttttaaaggacccagaagtccctttccttatgagagatgagggtctgggggttcttgctgggagggagccagggcagctgtcctggttgagcagcggactctgcacttcaagtcccacggggacagccagtgtgggggggtgtggaatgggaagggcttagaaataatctctccatcagccagcagcaggaagaagcagcagccgctgccactctgccaaccgcctaggaggcaaggggagctgtcctccctcctctggcatggaggagcacaactcgggaggagcagagggcaacttggggccggaggcatctgcagctacctgtcccaggcaccccagagtctctcggggtatgctgatgatggtgacaggctcaagttgaagctgcaggaggaactttttgctgcttttaagcagcccaggcctgggacaggttcagacagaagcccaggctctgagcgctgggtgggagtcaggggggctgtgttacagaacagcaataggaagagctccgagcttggaattcacacacatgcctggatcctggctcctatgtgaaaggctgggtgaccttggccaggtgagttagtgcttctgagcctcaattgtcttgtctctaaaacatgggaatgagagagggttcagggaaggtcagaaccataagtgcaagctcctgtgctggttggatggttgggtgggtgaaaaggaagaggcatcagtccagggcctgggtgtgaacttggactctgcactgcctggctgtgtgttcttggtcagtcacttcccctctctgggccttgggtttctcagtcaaatgaggacagtgaaaccagcgatggctgcaattgtaaaaccagcatcttgtagttgctcactacacgttgactgttcttcactttcttaagaggttttgcagcccaggctcttggcttctgaatgtgttatcttcactgcatttgatagttgaggccctgagaagaggcttgctcaaggtcatcttgctggttagaaccatcacttaggccgggtgtggtggctcacagctgtcatcccagaactttggaggcggaggcgggcagatcacaaggtcaggagtttgagaccagcctggccaacgtactgaaaccctgtctctactaaaaatacaaaaattagctgggcatggtggcgggtgcctgtaatcccagctactcgggaggctgaggcaggagaattgcttgaatccgggaggcggaggttgcagtgagctgaggtcgcgccactacactccagcctgggtgacaaagtgagactctgtctcaaaaaaaaaaaaaaaaaaaaagaaccatcacttaacagacgcttgagttttgatgggaggatccaggagtgagggagattagagggtgagccttccacagctgcctgcaaggggatgacaggtgctgctgacctaggtgggctctctgtggccttggcaatgggaacgaatccaagcagagaagagaactgactgaatggaggtccatctggtattgcggttttcaaatggtattgcttgaagccttagggctctgcagaaatgattgaggggcctggcctggggcagtgacaacggggaggatgaacccctggacctgctacctcagccatggcagctgcactctgatctgtctccataagactgtaagtgtaaccccaataaaggctgtggcccagcatggtccagtgtccacacagagccactcaaagagatcccagagcacctgccagtaatggagaagtttccttccctccttccactgactcccgtgttcctcagaccccacagctgctccaat

SEQ ID NO: 1243011 - DNA, 4001 bp, Homo sapiens
ctgaatactgatctgtctcaaacctgtgccacagccaagaaatctctttaaaacatctccagcgagttctcccttaagtttttatacatattcaaccagataattaactcatccatatctggtctacagtcagaaggctctcaccatgagaaagttcttgcagaattaccttatcaataaactgttaacccccgaagttaattctcaccatcctatttaattaaaatgtctacctccccccgtccagttcactgccattttaacttttatattcttcatagagcttactatcaaaaaaagaaaaaagaaagaacttactactatctgcaattgcatatgcatatacattttgtttacttgcttattggtcttctgatctcccacttccctaaaaaaagggaatttccataattttgtcaggttcatttacctatctccagcactaactgatattttacaaatacttattggacaaatgaattcttcccttttttttttttttttttgagacagtctctctctgtcgcccaggctggagtgcagtggcgctgtctcggctcactgcaacctccgcctcccaggttcaagcgattctcctgtctcagcctcccgagtagctgggctacaggcgcacaccaccacgcccggctaatttttgtatttttagtagagacggggtttcgccatattggtcaggctggtctcgaactcctgacctcaggtgatccaccgcctcggcctcccaaagtgctgggattaaaggcgtgagccaccgcacctggccgaattcttcacctttgatacttgaaggcagatctccgcctctcaaatttttattctcctgctctcacagtcctcgttaacccctcccttaagactctcccactcccaaactccaaaacttcaaagtctcacttgggcacgaagggtccatacttgaatgcaacactccaagaaggtaaggttcacctgccaaggagacctgtccaccctccactctggtgtccctggcaaacccaaagcagcctccttctgcaatgtgtgtatacaggtggattcctagagtgtacagggacctgtgtcaggggaacacagaggcaaacaagatctcccagctctcctggctggctgtgagcagttctgaagcagagagggaaacaaaaggctgggcagtcggaagaaactgaggaaggctgccaggagtagtactgcaggcagcagggctagttcccaagtcttgagctgaggggtgaagggtgggagaggtggtcatgaggattatgaactgacacgttcaatcacttaccacagcgcctggcagttaggggttccgtaagtgttggttattgctgggggtaaaggattgggggaggagaagagaaattatgaatgagaaaggggaggagatgggatgtgggggctggagggagctgagaatgagttgactggacagtagcgggcagagagaaggggcatgaggagccccggtggtgagagactgcggggaacgggagttgggggtctggggtgggggcacggtaggggcgccgctcgtacctccggcatcggtcagcacctccacgcggccgctgaacatggctttgagcatggtgtcctgtcccgtgagggtgcgcagcgtggtgtagtgcaacgagccgcccacgttcagcttcacgtatttgctgttcggggtcagcggcttgagaccgtaggcggcggggccaggctcgagacccgagggcttgggggcttccagggacggggccgcggcggcagccgggcccgaggcctccgccgacatgccgggtagcagcggcggacggcgatcccaggatctctccgcgccctgcggcctgctcccgaagaccctcggccggcccccagcccttgggccagaccgctcggcgcacacgcccactcaccgcagctactctgcaagaccggccctccgccccatctcgctcgcaccacccggaagccggcgccgggcagctgcgcaggcgcggccccgcccctgaatgggggcggggctgcgagtatggagcatgcgcagtggcctcgctgggggatcccgtagaggtttggcgtgtggcctgcgggttccccgggcgggtcgacgtgcgctcctctctggtctcgagtcaccaggaccagatcgaggatgcggccgaccccctgcccgatgtggaaagcgaagtctccacctcgtgattgggtctctgctgtcagagagcttcacgagcttgaggggaaacagacagagaggtctgggcattgggcagtttcccgcctcccagccccgcgcactgaacagactgtgaccagaactgcgaacaaagcgcggagggaagctcttaaaggaggccaaagcggccgggcgctgtggctcacacctgtaaccccagcctgtaagcctagctactcgggaggccgaggcagaaggagcgcttgaagccaggagttggaagctgcagtaatccgtgatcggaccgttgcactctagcctgggcaacataacgtcctttgaaaaaaaaaaaaaaaacagaggccaaaacgggtagcagtggtgcccgggcaccaaggatggaaggcctctctgaggaggtgatgccgagctgaagctgggaagcggatgtgagggaagagttccaggcagagggaaggcaaatgcagagatcctcaggcaggaacactgaactgttctccgtatttgaggagcagagggcgtgtcagtggtggccgcagcagctgagcaaaggtcttagaatcccagctaatgtcgtgggacctagcacccaatcccaaaagaaagaagaatagataggaacccactgttgacaagaaggtgcactgagaagtgtttttatctgacccgatctgcatccagtttagaagccgatacatcagggatttaacaatctgtcttaatgtctagcaaggggggttgctggagggaaaacacagagtcagagttctatcttcagccctgccagcaggtccctgggagatgctagacgagtgacttttctctgggcgtggttggtgtaagggatgcacacgcaggaggaaggtcggagtgtaaatgtgtgacctgggcctgttactgggtataaatgggcctgtagtgaccgggagctcatgttctaccaaaggggttgccaattttctgatttcgagtgtggcggtgtaaaagagaaaagcaactgctgccagctgggagctggtttgcaccctcactccagaagccttgatgttgctaggagctgacctggcaccaacagcacggccatggtggtgtcctgttgagcaaaataatttcacaaaaaacatcagacaaggtcactctctgactgatctagaaaaagaccattccataataaagcctcaatacagaaacaagaacattgtccaaaccacaaaaattaccaacacaatcctctctcccacagcgtaagttactgctgctttttttttggttgttgtttttgtttgttttgttttgtttttgaaatgaagtcttgctctgttacccaggctggagtgcagtgatgcaatcttggcttaccacaacctccacctccaggttcaagcgattctcctgcctcagcttccagagtatctgggattacaggcacccaccatcatgcccagatcatttctgtatttttagtagagacggggattcaccaagttgcccaggtgagtcttgaactcttgacctccggtgatatgcccaccttggcctcccaaagtgctgggactacaggtgtgagccactgcacctggccactgctgcttctttaccaagtacagttttagcttgattcattcctcccatcttctagataagaattattaagataaccaaaaagaattatccctacttcctgatagcatccaacccagagcaaatgcccccctttttggacccgcctaggaagtcccctaatgaaagttccaatcctgtaataagtcctttcacacatgttcttgctgagatg

SEQ ID NO: 1243012 - DNA, 4001 bp, Homo sapiens
agcaatattcagacataaagaagagcaattatatatgccacatttgagactagaagagttaaagggggtaataagagaaatatgacaaattgtgaaatgattgcataactgacagaagcagagccagaaaagtcaatctaatgagctaacctagaattctaagtcccagcccttctaaaagcctttctacaagttcatgttcaggcaaaggctgaatgtaacaaatggagtgactaagggtctcacatagaccagaaagcataaatatgcaaggaaggacccttgattctgctttctgttctccttaaaggtggctgagagctcaatgggggtgctcagagtgtgcagatgttggatgccaaagaaaacctacttctcgaaggtgagccccagttctggtctcagttcctcttttctttctttcttttttttctttttttctttttttctttttttttttttttgagacggagtctcgctctctagcccaggctggagtgcagtggcacgattttggctcactgcaagctccacctcccgggtttacgccattctcctgcctcagcctccagcctcctcaagtagctgggactacaggcgcccgccaccacgcccggctttattttattttattttattttattttgttttatttttgtatttttagtagagatggggtttcactgtgttagccaggatggtctcgatctcctgacctcgtgatccacatgcttcggcctcccaaagtgctgggattacagacgtgagccaccacgcccagcccaccctcttttcttgttaaggatagggtgtgacaagagggtcctggctccttcttacatacatgtcccatccacaggtgggctcttaagtgcctgctggagtgagggtaggggttagggatgcggctgttctttcccaaagactactcaggggctggttagtgcagagctatcgcagcctggcgacagccctcagtcacaggcaagcttaggggaacctgtggtgcttgaaagacaaaaggcttcttgccggactgacttcaggaaacggggtagccctaaagcagtcatccccaccccattacaaagagcttctctctttcccacgctgatccttctcccccgaagaagctccgtccaagtaaatttcttaccttttttttttttttttttttgagacaaggtctggctctgtcactcaggtcgcccaggctggagtgcagtggtgcaatctcggttcactgcaacctccacctcccgggttcaagcgattctcctgcctcagcctcccgagtagctgggactacaggccgtgccaccacacccggctaatttttgtatttttagtagagatggggtttcaccatgttggccaggctggtcttgaactcttgacctcaggtgatccgcccacctcgggctcccaaagtgctgggattacaggcgtgagacaccgcgcccagcccgtccaagtcaatttctagagctagaacttcctcatgctctaaagacaggaccccaactcctcagagccaggattcccaacctttcagatctggagctccccatcatgccttagagttctgtccccacgctccaatccttcagatttggatctccccttcacacacaccctcgccttgccccaaagtcagcatcccccagcgctgagatatgaagaccaccccgtcaaaggggcacacgcccagccctcagaaccggagtcccccacatcctcagagccagaacacttcatccctcaagacagagcgttattctaactcctcagagccagccccccaaatccttcccggctgggggcccctcgctctctcccatgccccagagccaggtctcgaaccacttagccccaatccttggccacagcggcccccattcgccgctttggtgcttttggcgcccccgccagagcgggctccgtaccatggtcgcggctccagcagcgggcgggcgggcttgtgacccggccaataacggttcccggggtcgcggcggcgcgcgcgcggggggcggggcagtgggcggggcctggcgtgcgccgggtggtctcgcgggcggtggcaggtgagcggcgggcggggatggcggagcaatgggagctggacgaggaaggcattcgccgcctgggggcgctgacgctggagcagccgggtagggtctggccgggagggtgtggactgggaacgtagggtcagaagctgtggaaagaaaactgaagtggaaggcggggaacctgagatagaggcgagggaaccacagagaagcggtacctgaggctggggggcggggggataacttgaggcagaaggttagagggaggtggaggtggaggaactgaagtaacgggagggtgtggggcagagcccgaggaattgagagagaagaggggagtgtgaagtagggaaggagaaacaaggttaacaggggaccctgccgcaggtgacagaactgcggggggcggtggctgaccgctgtaatcccagcactttgggaggcggaggcgggtggatcacctgagcgtggccaacatggtgaaaccccgtctctactaaaatacaaaaattagcccggcgtggtggttcaagtctataatcccagctactcgggaggctgaggcaggagaatcgcttgaacccgggaggcggaggttgcagttagccgagatcgcaccactgcactgcagcctgggcgacagagcgagactccatctcaaaaataataataataaataaaataaataaataataaaatgtctattagacatccaagtgtaaggtacctagtaggcagttggatatatgggtctggacctcagaggagaggtcagggttagagatgaaaattttggagacattagcaataggtggtatttaaagctacgggagtggatgaactcagctaaggagagaatgtcgatggagaagtgaaagaaagcttaagactcaaccttggaatatttcagtgtttagaggttgtatagaggaagaatgtggtatcttggaatttgagaaggggtagtgtatcgagcaagcaatggccaactgtgccaaatgctattgacaggctgagcaacttaaatgcagagtgtctgttagatttagcaacatggaacttactggtgaccttgacagagggagttttgggagggtggggaggagggaaaccagattggagtgggatgaaaaagggaaatgatatttgaggggaagagacagtgaaagtaagaacttttgctgaaaattttagctgtaaaagagactgcagaaatagatggtagctgaagcgtatgatgtgcagtcaagaacagaacaggaaggatatactagagcatgtcggtagtctaatgattaatttggtagaggggggaaatatgtaatatttactcattttgactgttaaaataattcaattaatttattctgtgggtaatataataattgtacagtgagggccaggcgcggtggctcacgactgtaatcccagcactctgggaggccgaggcgggcggatcacgagtcaggagatcgagaccatcctggctaacacagtgaaaccccgtctctactaaaaatacaaaaaaaattagcggagcatggtggcgggcgcctgtagtcccagctactcgggaggctgaggcaggagaatggcgtgaacccaggaggcggagcttgcagtgagccgagatcgcgccactgcactccagcctgggtgacagagtgagactccgtctcgaaaaaataaataaataaaataaaaattgtacagtgagaagaaagtctttactcccccatccccgtctcataggcctagttccccttcctaaaggcaattactgttaccagtatcttggatagttttccagaaatattctctacatatataagcatttatcacttattttataattttatattatggcaattttcaaatatatacaagagtagagataacagaataatgaactctattagcctacct

SEQ ID NO: 1243013 - DNA, 4001 bp, Homo sapiens
cgcgcccacctttttgtatttttagtagagaccgggcatcaccatattggcccggttggttttgaacgagatccacctgcctgggcctcccaaagtgttgggattacaggcatgagccaccgcgcctggcccataatttttaacaaagtcttaaggaacagtaaagcaaagggatcaaccaccttaactgtgctaaagttcatcaactgggaatcaagtgctccagtgctgaatagacaaccattgcctcaaagaacccaatggacaagagcaatttaaactctaatttcatatacaaaacaggaatgcttgagtagaaaggcaagggagtgaccactaagccctgttatttaaaaagaaaaaccaaacagtaaaacatacacccacacttataaaaggaaaatcacagctaacaaacgcctatttctatcctggggatgactgtcatttcctgggaggtcaattctctgagtagagggcttggtcaaatgagcaatggaaacagttggaagttgtggggaggcacaggagggttggcatctcaaaccctcatttccacccacaaggctgccttagcagtaactccagattctcacttcctgatcacggtcatgccatgctgagaatggtctcagtcaggcttctcaaacttgaagagggatccgaacctttctgggaagcctcctgcatggcaaatgttggctgccaaggcacaaagccaagcgcagtcatgtaagctcaactgaaagaccccgcaaagttagtataaggcttgtgaactgccttgaataaatataggtaacaacttcttcaaacaggcttttttgtgagtttcaatcctgcacaactcccaagacacggttcctcggctccacaactcttgataaataaaggtagcaaaaggtttctattaccatctacccaacagcatgagcatttcgcttgatgaaagacaagctgcaaactaacctggaaattcctgtccttttgcgaagacagtgggaaaactaagccaattagaaagcagattgaaagattccttacctgacccttcctggacatccctaaagcaacccttaatatgagcaaaatccccttcgaaaaatcatactatatactacggacgcatcttctaagaggtgctgagtgggtgctgcgtgctgtggatggaaaggatggagcgccaactctctaaatgcaagtcaccagggaaaaaaagggccgcccatatcaacccccacgtcagcgttaattcaaacgtccagaatgtgaaacaacgccaagggttctgtttccagagccagcaagtaccctgggacagagaagagaaggcgttcacacaccctgggcaaaagaacctagtgagaaaaagaaagtagaatcacagcaaagtccggggtctaggaagcctcctccaccaaagagcaaagagggcgaggaagagacacccccaaggtgaatcgactcaggatcctcaaaggcagtggacgccagggcgccatcctcaccctcccctcccagggtaggggatcggggcaagctggggaggagctggcgacaagggagcgcggggctcgaagcccgaggagagtcgcccgctcccgctgaagtctcctccgcacgaagcagggcgtgtgcaggagccgcaggccgggaaggccaggaccctccgggctggcccgtgaggccctcaccttgtctgagtccaggtcgggatcggcctggcataagcggtacaggaaggatttcgggtcccggcacagggtctgccgagtggtgaggaagtaggtgccgccgacgttgagtcggacccacttggacacgctgccagggcgctgggccagggcgccgagcccagcgctgcagcggcggcacaggccgccccccagccccgccccgatgccgccccgggccggcgacaggagctcgcagtgattctccgccatgatcccagcaagccccgcaacagctcccttccaccggaagcgtccggcttttaatagcgtcctctgagttctgtcccgcccacaggtccgccctggtagagcgcccgccccggcgtcacgcggtaggcggaagttccggtcccgaaaagcaggaggctgggcccgcttccggcgggagcggagcacggggtgatctgggcactaacgctgatggggagcagcggacatcagcctcgacctcccacgagcggtgcacgagcgcctgacccagacctcgaccctagccttcacccccaccctgactccagttcatgaactggtcaaaggaagagccatgccagcaaacgtctacactgtacatgctttttattacaagactacggagcataggaggaaaattcatcatctggtaactacacctaaagcacaaatatttggggggaaaaaaagaacagattcattaaattatatgattaaatcattgacccaatagaaaatttatataataagggcggggcctggtggctcacgcctgtaatcccagcactttgggaggccgaggcgggaggatcaggcggtcaggagatcgagaccacgctggccaacatggtgaggcccggtctccactgaaaatacaaaaattagcctggcgcggtggtgggcgccggtaatccaagctactcgggaggctgcggcaggagaatggcgtgaacccgggaggcagaggttgcagtgagctgagatctcgccactgcactccagcctggtgatagggcgagagtctgtctcaaaaaaaaaaaaagaaagtttttgtaataaagccagaaaaaagttgtaaaatatatagtaattattcacattcaaggctgtatatcaatacatataacaacgtggccccgaacatgaattcaatacaaataattcatatattagaatttaggccgggcgcggtggctcatgtctgtaatcccaacactttgggaggccaaggtgggtggatcacgaggtcaggagttcaacatcagcctggccaagatggtgaatctccgtctctaccaaaaatacaaaaaattagccagatgtggttgtgggcgctcgtaatcccagctactcggaggctgaggcagagaattgcttaaacccaggaggcggaggttgcagttagccgagatcaggccactgcactctagcctgggcgacagagtgagactccgtctcaagaaaaaaaaagaatttaaataacaggctgaactagaggccaacaatagccagcaaataaccttctataagattaaaaacacaaaagtgtatatcctaataccattgtattatttgttttcatgagttcttttaatttttgctttgtctgtacatcacagttacagctacagaccaggtagagaatattacgcatgttctgactgccacccacctgaaagacgtactagtcatttatcctatttcatgttgtgaaggaacagctacagcagctctaaatactgtaacaatttaattttgccaacatccaacttaacagtcgtaatagaggcttttaccagcacaatgacccctattcgtagtcattctgccagacggttaggctatgtgggttacacagcttaaaaaaggtctgccttttgtaaaaagttctctgtacatagtttggtgtttcttcatatggaagaaatgagttatggggaaaattcaggtacacacgtaggctcgttcagttgctcaccacagccatctcaacagatgaaagtgctctttgttggaaacagcttcctcctcacaccagttctccacaggcagcctcatctacaaccctgcaattttgggccagaagtggtggcccctcagaggctctgaagtgcctccagccccgattcaggcacttgccacgtgtgctgcgtaagaagggaccccacccagtgagtcaacataggctcatgtcaagtttgaaaataactggggaaaagtgtatgacaacatcttccagaacatagtaccttcaccgtattctcacagcagctgcgatctctgaagtctcagcag

SEQ ID NO: 1243014 - DNA, 4001 bp, Homo sapiens
aacccaaatgtgggccatatcaaaaagcctgagtggcctcgtatcttcactttacaaatcagtctcccagagctcaacaggtattggccttcaaagacctcttgttgatcacagaaggtttttttatttttattttttttgagacagagtctttctgtcactcaggctggagtgcaatggtgcgatcccgcctcactgcaacctctgcctctcaagttcaagcaattctcctgcctctgccttctgagtagctgggattacaggtgcccgccactgtgcctggctagtttttctatttttagtagagacggggtttcactctgttgcccaggctggttttgaactcctgacctcagggtgatctgcttggcttcccaaagtgctcagattacaggtgtgagccgccacgcccggcccagagaaggctttatttatttttgtggggaggggggcggtcaggtatagaaacagcttgagtgggcttatgtcctggctttgtgaactggcctcataacctggaacagctttcagggggagatcaagtgtgggttgcataaaacagcttttgagtggacttgattcagcccctaaatgctccttacataaagtcttgtctgctggtgtatgaaatgatcttgcaaagaaggtcagaatataggctgttatgtgctaacctctgagtggtttttctcctggatttataaataagactaaaatgaatcttataaaagccttcttgttggtcgtactaaacaaaaaggagccaagtataacctgtataaaacagccggaatagactcaggcctggactttataaattcaccatccaggcagaattcactatgcaaactggcaaagtaggtccctggtaggttatgggatatatccctcttggaagccactgccctgtcatcctaggattctctcaaattatttttattattttttttgagacggagtctcgctctgtcacccaggctggagtgcactggcccaatcttggctcactgcaacctccgcttcccaggttcaagcaattctcctgcctcagccgcccaagcagctgtgattacagatgtgcaccaccacactcagctaattttttatttttagtagagacggggttgcgccatgttggtcaggctggtcttgtgaactcctgacctgaagtgatcggcctgtctcggcctcccaaagggctgggattacaggtgtgaggcaccgcgcccagccttaaattatttttaaacatcaactcctctaaagcacctccctgagtattctttaaggtggctgggtggaatggcctctccgagagcctcactgtgatttgcagagggtctcagggtgggcactctgcaagcaccatgctggtcatgagaaagcctcccaaaaggggcttccaggacagatcagcctacacctagctttctgggaacaggcggtccagttctctaatctcctcaatgttattatggcagtattccacaaaaattgtgcaaaaacaagagcttcgtaaaacttcccaggaaagtttggaacattttccagaaagctttaattcatggcacagggatccctttggctctctaaggggcacacagtcttgtgtttgggtcgtccgtgtggccccaacgcctgcgcacctcctgtccccgggcttgctcccgagtcctcctgagcacggcgattcctaccgttgccgggaaacgcaccgatgcccatcgttaagtcctaccgagctacaagcacctttccttagggcagtcacacacccaggccccagagggtcccccgtaccccgcactggccttgagccccgaggcctcagacccccttccctcctcagcgccttccccggggctgcatttctcgcggctcatatttgggacctgacggcggaatcgtttccagcctgccttgcggcccaggggcagcggctggttgcctaaaagcagcggacacacatatagcagagtataaaacccgcgcaggcgcactaggcctacaccaacgcgacgccaagaaccgctaaagcgcacagcagcccgccgtaagggcctgccctcacgcatgcgcaaaaccactgccaagagacgagcatacgcacgcgcggaacctttccctttatcctcccgcagggcaggccggcgacgagctaaattgcattctcagagcgcatgcggcaactcgagccaccctcggggttttccaaggcgcacgcgcgaggccgggcttggctgcttcacatgacgcctgcgcggtctatgcctctgaacccggcctctccacttctgaggaactggagctgactccgctctcgagttgctcagactaacctctcttcagctgggacggtgtcgagtcgcctttgggctggcgaagactcgttgcgtttggtccgaccactcggctgtgtcccctgaggagccagaggctagcataggagtatcgatcgctcaccgctcgtctgatcacgacgcagtgcctggaggagcgccgagtgatcgatgccgtggccccgccccactgctgtttaaaaggccgggggatggagaagacagaaaggcttggctgtatcctctgggtccttccacgctagtgataccgctttttcctctgcacagataacaacttcgtacaaggctgtttgcatccaccatttaatctctgcagctaggattattagttctccctattttacagagagcgaaactgaggctcagtgattaaagtggccacatacttgtacttttggaaagtcagatccacaattacccacgagcaagtgctgcatccacagtctgttcgagtgagaaggcaagtggccaggggacacactcctgccacctttgctttgatgccgagtggtgcgtggtcactgggacttttgtgttttgagcacacactcctgtggactccaagtatgcacgccttttgcagcattgcacagaggcatggaaagttatgttcgtactgagcttggggtctgagtaggaaacaggcttgctcaggatcagttcatagattagtggattctaggtacggtgctaaaatactttaaaaatatgaggatcgtagctattgtaatgatcatgctcatccccattttagggagtgtattagtccgctttcatgctgctgataaagacatacccgagactgggcaatttacaaacaaaaaggtttaatggattcacagttccacatggctggggaggcctcaaaatcatggtggaaggtgaaaggcacgttttacatggtggaagacgagataatgagaaccaagtgaaaagggaaaccgcttataaaaccatcagatctcatgagtcatattcactaccaggagaacagtatgaggggaacctcccctatcattcagttatctcctactgggcccttccgcaacacggaattatgggagctacaattcaagatgagatttgggtggggacacagccaaaccatatcagggagggagcaagtaaagcacagaaagatctcctaacccaccaggctcactgggatgctggtgtttgaactcagcagccacaggtttagaatcctcatggttatgtgctacactaagtttccacccttgagtagtgacaatgttgaattttccctgagtcttgtgtccccggaaaaaagtaaaaaggaattgctctcacccttttgtgttgtggaaaaaagtttactgcaaagaatcaccccccacccccacaagagaatttagataagactccaagacaccacccccattgtttacctgtgagagcaggtaaacaggacacagaccctccaattctcattcattgtcttataagtgattacctgaactgcttgtcccactaatcaatccttataaaacgctggtcaaccactttggttaagattctttccttcctccaggcccctgaactttggctcaccctgggcctgggccagcagacagcccctcctcagaataggctggcctcaggttgatatattctctgatc

SEQ ID NO: 1243015 - DNA, 4001 bp, Homo sapiens
ctggctttgtgaactggcctcataacctggaacagctttcagggggagatcaagtgtgggttgcataaaacagcttttgagtggacttgattcagcccctaaatgctccttacataaagtcttgtctgctggtgtatgaaatgatcttgcaaagaaggtcagaatataggctgttatgtgctaacctctgagtggtttttctcctggatttataaataagactaaaatgaatcttataaaagccttcttgttggtcgtactaaacaaaaaggagccaagtataacctgtataaaacagccggaatagactcaggcctggactttataaattcaccatccaggcagaattcactatgcaaactggcaaagtaggtccctggtaggttatgggatatatccctcttggaagccactgccctgtcatcctaggattctctcaaattatttttattattttttttgagacggagtctcgctctgtcacccaggctggagtgcactggcccaatcttggctcactgcaacctccgcttcccaggttcaagcaattctcctgcctcagccgcccaagcagctgtgattacagatgtgcaccaccacactcagctaattttttatttttagtagagacggggttgcgccatgttggtcaggctggtcttgtgaactcctgacctgaagtgatcggcctgtctcggcctcccaaagggctgggattacaggtgtgaggcaccgcgcccagccttaaattatttttaaacatcaactcctctaaagcacctccctgagtattctttaaggtggctgggtggaatggcctctccgagagcctcactgtgatttgcagagggtctcagggtgggcactctgcaagcaccatgctggtcatgagaaagcctcccaaaaggggcttccaggacagatcagcctacacctagctttctgggaacaggcggtccagttctctaatctcctcaatgttattatggcagtattccacaaaaattgtgcaaaaacaagagcttcgtaaaacttcccaggaaagtttggaacattttccagaaagctttaattcatggcacagggatccctttggctctctaaggggcacacagtcttgtgtttgggtcgtccgtgtggccccaacgcctgcgcacctcctgtccccgggcttgctcccgagtcctcctgagcacggcgattcctaccgttgccgggaaacgcaccgatgcccatcgttaagtcctaccgagctacaagcacctttccttagggcagtcacacacccaggccccagagggtcccccgtaccccgcactggccttgagccccgaggcctcagacccccttccctcctcagcgccttccccggggctgcatttctcgcggctcatatttgggacctgacggcggaatcgtttccagcctgccttgcggcccaggggcagcggctggttgcctaaaagcagcggacacacatatagcagagtataaaacccgcgcaggcgcactaggcctacaccaacgcgacgccaagaaccgctaaagcgcacagcagcccgccgtaagggcctgccctcacgcatgcgcaaaaccactgccaagagacgagcatacgcacgcgcggaacctttccctttatcctcccgcagggcaggccggcgacgagctaaattgcattctcagagcgcatgcggcaactcgagccaccctcggggttttccaaggcgcacgcgcgaggccgggcttggctgcttcacatgacgcctgcgcggtctatgcctctgaacccggcctctccacttctgaggaactggagctgactccgctctcgagttgctcagactaacctctcttcagctgggacggtgtcgagtcgcctttgggctggcgaagactcgttgcgtttggtccgaccactcggctgtgtcccctgaggagccagaggctagcataggagtatcgatcgctcaccgctcgtctgatcacgacgcagtgcctggaggagcgccgagtgatcgatgccgtggccccgccccactgctgtttaaaaggccgggggatggagaagacagaaaggcttggctgtatcctctgggtccttccacgctagtgataccgctttttcctctgcacagataacaacttcgtacaaggctgtttgcatccaccatttaatctctgcagctaggattattagttctccctattttacagagagcgaaactgaggctcagtgattaaagtggccacatacttgtacttttggaaagtcagatccacaattacccacgagcaagtgctgcatccacagtctgttcgagtgagaaggcaagtggccaggggacacactcctgccacctttgctttgatgccgagtggtgcgtggtcactgggacttttgtgttttgagcacacactcctgtggactccaagtatgcacgccttttgcagcattgcacagaggcatggaaagttatgttcgtactgagcttggggtctgagtaggaaacaggcttgctcaggatcagttcatagattagtggattctaggtacggtgctaaaatactttaaaaatatgaggatcgtagctattgtaatgatcatgctcatccccattttagggagtgtattagtccgctttcatgctgctgataaagacatacccgagactgggcaatttacaaacaaaaaggtttaatggattcacagttccacatggctggggaggcctcaaaatcatggtggaaggtgaaaggcacgttttacatggtggaagacgagataatgagaaccaagtgaaaagggaaaccgcttataaaaccatcagatctcatgagtcatattcactaccaggagaacagtatgaggggaacctcccctatcattcagttatctcctactgggcccttccgcaacacggaattatgggagctacaattcaagatgagatttgggtggggacacagccaaaccatatcagggagggagcaagtaaagcacagaaagatctcctaacccaccaggctcactgggatgctggtgtttgaactcagcagccacaggtttagaatcctcatggttatgtgctacactaagtttccacccttgagtagtgacaatgttgaattttccctgagtcttgtgtccccggaaaaaagtaaaaaggaattgctctcacccttttgtgttgtggaaaaaagtttactgcaaagaatcaccccccacccccacaagagaatttagataagactccaagacaccacccccattgtttacctgtgagagcaggtaaacaggacacagaccctccaattctcattcattgtcttataagtgattacctgaactgcttgtcccactaatcaatccttataaaacgctggtcaaccactttggttaagattctttccttcctccaggcccctgaactttggctcaccctgggcctgggccagcagacagcccctcctcagaataggctggcctcaggttgatatattctctgatctactaacccatcatgtcaccctttcaccccacttccaggttctttctagccttgttttcttcttcctatgaaagaaaagctctttttggcctaacccttgtggccacagtgtactctcttttgcaagtctcccttcccctgttataatagtccctcctggccaggcgtggtggctcacacctgtaatcccagcactttgggaggccgaggcgggcggatcacgaggtcaggagattgagaccatcctggctaacacagtgaaaccccgtctctactaaaaatacaaaaaattacccgggtgtggtcacgggcacctgtagtcccagctactcgggaggctgaggcaggagaatggtgtgaacctgggaggcggagcttgcagtgggccgagacaccgcactccagcctggatgacagagcgagactccgtctcaaaaaaaaaagaaaaaaaagtccctcctgcaccttgcaataatcctttcaaataaa

SEQ ID NO: 1243016 - DNA, 4001 bp, Homo sapiens
ttacagagaaaaaaaaaattagataaatgaaccccactgtctattttcaccactgtatctcttgtgccaaccaaaatgctccctactctgtaaatacaaagtaaacattacctactacacactattgggagtggttaatttggagatggatttaactgctaccactgatagtaaattacgattcttgtctttcctattagatacaggttttatgtcccccaaaaaactcctctcaaaatcgtaagaatctgtgatattcacagtgttcataacttaaacattctctcaaacttcttcaaagccaaatcctgaaagtgagctaacattcacagtataatctagtttataaagtattttcacttaacattacttatgtcttcattcagcaaatatttacttagtatctactatgcagcaggcctgtgcttggcacaaggaatataatgatgaaaaaaacccagacggtgggatcctcttatataatttttgcaataatcctgtgaaatagacaggggagaaattagctacatttttgcagagagagaaaaagaaacttaatgaagttttgtagcgagcctgacacaagattaggcttgttcacccctttccactacatcaaggtgccttcaatactgctcaatacaagcgattaaaagtaaaaactttcaggtgcctgcaccctgaaaacttcccaaataccatccacgaagcaacttaggtagccaaaagcaggttctgtttgacttgagcgacagtctcctttctgtcactctcttcaagtcttttgaccaattcaatgaggagagcataggctctgtcgactgtctgcattttggtctccaatttgactgcggtgcagctttggacaactcacaacctctctgaacctcagatcccatctctaaaatgggtgtgataataatagaaaccaccttacaaggccgttgtttggattacatgaggtaatccacggggaacatttagcaaatgttgtttccttagcacccaatctagtctttgaccccacaccaccccatcccattaccgttttctcccccatagctcttctgtccaaaacggcctttttagcttattttattatctttctcccccattaggctataaactccatgacagcagagactatgttttcttatccactattccaactcctgtccttagtacaatgcctggcatattttaataaataactgttgaacgaataaagcttaataaataggaaaacagtttaggtttcaatacaccgatatgcaaaagagaagaatatttaccgctcagagaagtccaaaagacacaaatgcaattggacagctcttggtaataccggaaaggtgcttgagaaactctaaaaggtgtatcacgaggtcgcgttacaactactagtgagagtggctgaagccctagacattgtcaaccctgagactacaccctatgtgttgctaaaaggccgaggagaatgcaaaacggccggggaggggggagtgtgttgcaaaaacacccgcccctttccttctctcttaaccttccagctgtgcacttcactcctggagggccccaccaggggtcagacaggggcgggcggggagccaaatgccctcgaaggggaacagcggcgccaacagtgacagtagtgaatggacccgaaagggagacaagccaactctttcgtggggggcccaactggcgcgtcccagttagctaacctcccctctccaccaccatcccaccagcaataggcggggaaagaggggacactgtcctccgtcccgccccgctggcctcggagcagagcctgccggggtctggtcgcaggactgtctgcaaactcacctctgccgccggctccacctccgctcacattccggccccgccgccttccccccgccccccccaggccctttgttttgattcccgactccgcagctcccgccgccgccgccaagcgcacccttcacttccgcttccgcaccgcaccgcccctgtcgcaaaaccgacgcccttctctcctcttcgccccgccccttcctcgccccgcctccgccgccgcgtcctgtccgcgcggggcatgctgggaaccccggggggggcggggcctcgcggccctgcagcctcgtcaggctcagtcccctcccgataaacccctaaatagggactttcccggggggtgaccctggcttttttggcgaaaacccccagtttaaggaggccttccccctggcttcacgttgtggagtcgaaaggaaccttgaagcggagaatgagctcgtgacgtggacccgaggaaaaaacctgccaaccaggatttaatagaattcagctctttcaggctttggagggaaggcgatttgaacgggatttcaatgaaaaaccctgtcccttcggctttttttttttcctctctcgggtctcgtcacgtgatggtcctactttatttttaaaaattaaatggcgcatattccccagcatcctaaatctagtgcaacctagtggcaagtggagaaaaaaataactgccaacctggcttcctacgaggtcccccggagttctcgcaaagttgcgacccagttggcaaaaatacagtgtgtgcaaagactcaactggacattgccaccaagaatcaagagatttttggggactttagcaagaaaacgttatttttaaaagccctgctccaaagctggttacaaatgaatactgcgtttccagtgacaggttgggcgagcagaaaggaaatcttacggttagtttcaaacactttgtgttttaggtggccagatatgctgtgtggtttgctttaaaaaaaaaaatagcgccccacaatcttcacgtttccctggaataaaaaaaaatttaagactcagcaaaagggtgatttctgaaactaccagctgattactattttctgttgcaaattaggaaaaaagcaaagcacatattgtgtaagttaaatctagacacgatttaggatgtgctagctgctagctaaatgctaccttaggagtttatttttaaagtttgcccagaaacaagttgactttgcaaaagaatcagtaagtcgaaattgccaaacgagaatattttgcccaaaaaaatccttactgggaggttatttcaataggcaatccccattacgtggggattaacacatccctgtaaacatccctgtagacgggtattgtggagggcaggatcagacatgtagctgaagaatcctttgtgcctgtatttaattttccagaaggcagatgacaagcacacatcctctccctgcgtaggtatttattactgctgactaaatcttgactgtgggctgggcgcagtggctcaggcctgtattcccaatactttgagaggctacggagggaggatctcttgagcctacaaatttgagactagactgggaaacggtgaaaccctatcactatttagaaaagaaagaaaaagaaaaaaatcttcattatgtctgtgtataggtagtattttccaagtggagattagaatagatgaaaaacccgtttctagcgttttggcttttttcaaagtaccaaacaaatacgctactcttcagaggtgttttttccccattttatttcagttgagtatgtttcaacacaagccatattaactaaaaatcttaagaaacaaggtaattgtaggtttctaattgctttttttaaaaaatagtttttagccagaaaacatcaaagaatgcagacacatttcctttttactttttttttttttttttttgagacaaagtcttgcttcattgcccaggctggagtgcagtggcaggatcttggctcactgcagcctccacctcccgggttcaaccgattctcatgcctcagcctcctgagtagctaggattacaggcgcccaccaccatgcctggctaatttttgtgtttttagtagagacgggatattgccatgttggccaggctggtctcgaactcctagcctcaagtgatcctcccg

SEQ ID NO: 1243017 - DNA, 4001 bp, Homo sapiens
acaagcgcattctcactcaccaaagaacagaaaaccacacacacagtaacatgcccggcattaaaaatgaaaaaccacacactagtaaaatgtttacagtaaatatagtaggaacattaagctagtgctgtctgtactacaaattcacacaactctaaaaagtctatattctaacagctacacaaaccactcaaataggcaaggcacgcaagaggaaatacaattataggccgggcgcggtggctcacgcctgttatcccagcactttgggaggctgacgcgggtggatcacctgaggtctggagttcaagaccagcctgggcaacatggtgaaaccccatctctactacaaatacaaaaattagccaggcatggtggggcttgcctgtaatccagctactcaggaggctgaggcaggagaattacttgaacccaggaggcggaggttgcagtgacccgagatggtgccattgcactccagcctgggtgacagcacaactccgtctcaaaaaaagaaaaaagaaatacaattattaaaggcgtagacaattcttcaacccatactaataaccacgatataaatatgcaaattaaagccacaaggtaccatcccatacttctaaattagcaaaaatttaaaaactatctaaatactggtaaagttatggtaaaattaacattctcaaacactgctggaatagggagagataatacttcaaaaggcaatttctatcattcttatttttctctcttctgattcaggaattcaaatgcttggaatttatcctaagaaaataattcaaaacacacaaaaacttacatagagaaaaatgctcattgcaacagtatttataatcctgactaactggggagatgggtagaaaaaatacctaaatatagtaaaacgggccaggcacggtggctcactcccgtaatcccaacactttgggaggctgaggcgggtggatcacctgaggtcaggagttcgacaccagcctggccaacacggtgaaaccctgtctctactcaaaatacaaaaattagccaggcatggtggcgcacgcctgtaatcctaaacactcgggaggctgaggcaggagaatcggttgaacctgggaggcagaggttgcagtgagctgaggtcaggccactgcactccagcctgggcgacagagcaagtctccacctcaaaaaaaaaaaaaaaaaagtaaataaataaatatagtaaaatggtaaatacatgtgaaaaagttgcagtagtgatcagtgtatgatacaattcagaaaacgttcactttctagtgaagtaaacagaatattcttcggtcagccaaggtttactgagtgctcctgcttgccaccccctgttcagaggcctgcgaatactgaagtgagagaaatttaattttactctaattacaatcatgtatacatatgcaaaagcgatgggaaagaatgtagaaatggctggcggtgctggcatcagggtgatttcctctttcattttgttcattatcctaacactgcatggcaaacactcacagttcagagggaaaaaggaaacaagtcactgtctccggaagccgttcaagcagtagcagggccatgtctctctgcccacacacaggaggttcaagatcaagctggggctgggggcagtggctcacgcctgtaatcccaacactttgggaggccgaggcgggtggctcacctgaggtcaggagttcaagaccagcctggccaacatggcgaaaccctgtctctactaaaaacacaaaaatcagccgggcgtggtggcaggtgcctgtaatcccagctactcggaaggctgaggcaggagaatcacttgaaccggggaggtggaggctgcagtgaacggagatcgtgcctctgcactccagcctgggaaatacagcgagactccatcacaactaaatcaatcaatcaatcaatcaaactggacgatcgtggctatttctgatccagcctcaggcactcttgggccgttcagatgctctcgtgagtcaccctctcccagaagccctgagtgctgggtgccgccttcctccgtgggctcagcacggaggcgatatcacaggagaggcacagagtgagaggaagcagatgggtggcaggagggctggtcctgcacgccgatagctgtggcgtgcaccacccctgtccccggacccctcagctcagggatctcagctgtctggggctcgctcacagatctaagatgtcacagcagtgactgtgtgtagtcatggcaagggaagcaaccccaccctcttcctctaagaaggaaaggtcattgtgggcctctaggcaggacaaggtcatggccactctcacattgcagggtcacagtcttggccatctggcgaaaacagaggaggtggtccagcaaggagccacactgtccctgctcagagccagcccggtgctaccatttgggaatgtagacccaggagtatcagagcttctacaggtttctaaggaatgctgaaatcccgttacatgaaatcttctgatttttcaacactggcaactaatttaaatttatttcaaaacacgctgggagtcaaaaaacccatctgtggattgcatcccagcccatctgcttcgttctacattcaaggaggtactgaggcccactgcaggtccccagactctgagaaaccgtgtttttggccacaggggaatctgtgtcaccgcagataggaacatgctggcctgcgggcctgaagcactgcaacccccctgcggttacactttgcaattcgcatcgtaggccccatgatggaggcttccaccaaccaaattaggctaaaattctaagtcaacctgtaccttccaaagcccttatgagattctgcaaacatccagtcattcttcacacatgtactgagcatctactatgcatcggttactgtgcaaggagctagaaatgaagccatgagtgagaccttatggggtgtgtgtgtgtgtgtgtgtgtgtttacgtacgtaccaggggcagggagaggggaagatagagttaatagaataaaaaaccaaacaagagcttctgcagcactaagtgctacagagacgatctgaaggtgatggtcctgagagggctgagaagtggcttctttggacggggaggttggggaggcagacctctgagctgagatggaaagagggagaaccagcattgaaaaggcttgaaggtgacccaggcagagggaacatgaagcatgcaggccctaaggtaaccactttagaaagttcaagaaccgggaaggccaatgaggccggggagccaccgctcatgggaaaagaggccacagcggtctgtattctggagggggtttcctaacctcctgctgcaaccccttccgccccacttcccccactgcttcttcccacccagcagcctccagctgtagaaggaactcacgagattgccccggtgtggctgctctgccacttccccatggagctgtgctcacactgatttccccagcatcccggaacaaccagagctgtggcttctccagcaggttggccttgggcaatcagacaagagctccctgcagggagaatctggaactttctgtgagcctgccccttcccatcaacctcaagactctcctctcttttcgtgtccccaagaactcccaaatgtgctgctcctctcacccagagtgtgcaaaacctcaggcaacacacaacacacacacatcacacgcatgtgcacctggattgtctcccctgttgaagctgcagtaaggcaaggcggggagaggccaggaagagaccgggcaaggaacccgcacacaggtcagctggagaaccaggggccctgatccccacgtcatcctcacctcttacagcgacatctcagatgcttgaggaggcatttctagatgtggaattgctggccaaagggtgtgcgcattattaaggcttgtgataggaatcaccaagttactttgccaaaagtctgtctgcag

SEQ ID NO: 1243018 - DNA, 4001 bp, Homo sapiens
ctttcctgctgctggttgacttctcaggactttttttaaaaaactgccccaggctgctgttcgtgtttcttttaacctgattacttttgctttatgagagaaaggagggaggaggtgggaggagagagaagcagacagcatgactcatcccaccccttcctggggactgtcctaaaagatgctcctcagagccgctggggctactataaagcaattcacctttgaagaagcagttattgtcgtgaaaagagagccacattcaatatctatggaaatcgaccactttctgggatttggcagcagattatttaaggcttgtgatttactcagtcacctagtggcttctcattgcctttggctgttacatctcaaataatgcaaaccaaccttcacactaactgacacatcccatacaaaaggcaaacagggccagaaacgtcagaatgtaacacagagaggttagtgatgatctgatcgcaaacgctgcctacatgtgagtcccacgccatcttcatctctttaatggaaaaaaaatctcatgagtcaactttttcattgcgagccaatttcaatagcctttcgtcctgtgtttcaaaggcgtaagcagtcctatttctgaacaaagtggaaataaaaacaagtgacagccaaagagagacactgaacaatggagaacatacgcttcccaggagaaatggggggaagacaggaaggaacgctcacatgcaatattacccaaacctttttcctttgaacgattcggtgttaagcatctctctgccctgcttttaggctgagggaggaggatgcctctaaggaaatgaatccgaaacatcaacatcgagtcgcaggctggctaaagcagcctcggtcctgacagctgtcagcctgcctctaacactgactcaccacagccactacttccacgtcaggggcgcctcacctgtgccagctcagaggctgttcctgctcaatctggaggctgggactcatgcctggcccctacctagagaggaataggacctggctagtgcccctgtaaagtctttttttcctcttccccttttcatcttcccaagtctaatcaacctgcaacccaggaaagcacaaacccaggacaagggcgggggtggggggcacgcacccagctccagaacactcaattctgtcctttgcaagatcctctaaacgggttcaattctatctgatccagcggtcctaaactgagctgctaaaaccgcatttccattgctatcctccctgcaatcctcccctttgctcactggcccatcaagagcagagggaagacgcagaatggacaggggtggccacccaggccaggaagcccctttctctcacccccaccctgctaagccccgggagcggtgaggcagcaacttcacaccccgcacacacgcatgactcgccaatgtctttcccccggggtccttgcaccctctccccagaatgcccttgcaggagtccggggtttcttcttcccccaagactgggacaccagctccatcccaaagccacctgctgccaccatctgccccggggttgggggcgcctcctccaggcagcggcccgggttgcactcattcacgggcgtccgcactgcccctccgcccgtgggctcccggcgaccttcccctattccctttgcctcccagcaggcgaggagcccgcggagaaccccggcctgagccctcggcccgcgaggccccgcccccgctcgccccgcggacccctcctccctccccgcgcccctcgccccacggcgctcccagctgtcacccctcgcagacccccatcccgggtccccgccgtccctcccgggtcatccttcccctcatgagcctgtcaggccggcctgaggccaccccaccgcacctctcaccgcgggcggaccgggcagcgaaccggcgccgtcagactcggctgctgcggcgactgcgccgcccgcgagcagccgggtcctttcccggcgccgcggcgcgagctgtcagtcaaccggacgcgcccgcctccagccccttctgcgcaggcgcgagacggccctcccctcgcggggggcgggaggcggccagcgcttggtgtcacgtgacagggcggagcctgaggggcccgaggcctgcccacgctcggtgggagcgctctcgggtacgcccggcgcccccttgctggctctgcttagaggctgggtgttctcggactctgggaggagtgggtggggcaggcccggtgcaaacaggtgagtgggttatttcatgatttagttgggggcatgggaagcgccatcagggagctaggaaataccgtcggattctagttgtttcctggccctcggtttccctacctttaaaacagccgtgtcagttaccctccctatcccctagttacggcgaaggcatgttattaaccaacataccattaaaattagtccagcgaggctttgagcaggagctaaaaaaaataataataaataaatggtataaaaatttttcaaaagagatttaaaaaagaaaaatgtccggcttggatacttggtatggaagagcaatcagaggccaatttactttttaaaacggggcatctttgagactggtagattccatctcagctgctccataaattctaggccagtcggcatcttttcagcaaatacagtaaacacaacgttcaggccattcagtttcttctgtgtctcctcaattaaaagaaaaaaagtttttaaaatagaagtgctgcctttggacgcctttttagttgtagaggaagtatagaaacataaactgacagcccctccctagtaatgtgggggttatgtcaaactcgactccagcacctagcaaagtggagaatctggttctggagtattgactgacacctcaaattttctgaagatatttgtacaactacattccagtgctataatgctccttctggtagctccttaaatgatcaagctctgtctctaaagaaatgcagtgatatctgaaatagggctgaatgtcaattttagaaaacggtgggttttctgaaattacgggagttatgcaggagaaacaagttctatcacttaagagaaaagatgacatatggatcgatgatcaagtacctgtcccacaccccaagcagaagtggcagtccttggaaagatgtagacttgaactgtagactccttgggaaagtttaagggaacacatgaagaaaaaagctgggagctgcagtgccgtgagggttatggagccttcagcaccatagctccttctagtacactccagatttgtttgaccaactgggtgtggccaccatgcatgtgaagctggaactcagggtgtctccagcttggtgtgaattcagtttgtgtccaatacccctcattcctttacgtggttgctacaggcgagtgggtacgcttttggtctctgcaggttctgccgtgagtccagcaggatgcaagtgccatcttgtagaattcatgggaatggaggaggatggatgctgtggctgaataaactccttccctgggtcagcaagtgaacctagcacaaggcaccgacttgtgccatcctgacctgcccttgcattaccagctgtttgggagaattgtaaaaaggtgactcatttagagtcagattctgttttaggggaatatcatgcagaccctctcctgacttcgtagaaggttttctgaccttgtcaaaaggttagagagaggcagattacatgaccattttttaaaagaggaagaaagtgagttctgcaaaccacagatcagtgaacctgacattgggcctggaaaatcttcagggcagatgacttaacaaaaaaatatttgtgacctctccaaagatgaaacaacagtgacaaagaccaagtcacactaggttaaccttatttcttgatgtgaaatgtataaatgtgtaaatcaaggaaatatggtggaaatatatatctgggcctggaaggtatatttcccagtattctttcagtta

SEQ ID NO: 1243019 - DNA, 4001 bp, Homo sapiens
aaaataatgctactcttcctattaattttttggaggcaaatgtaattgttttccattaaaaatattatttatgttcagaagtaatgggtttattgttgttggagtttttttgagacagggtctagctatgttgcccaggctggtcttgaactcctgagctcaagcaatccacccacttcagcctcccaaactgctgggatcacaggtgtgaggcactgcacatggccaattattattatgattattatgagccactgcacctggccaattattattattattattgggtttttttgagacagagtctcgccctgttgcccaggctggagtgcagtggcaagatctcggcttcaaatgattctcctgcctcagccttccaagtagctgggattacagacatgtgtcaccacgtccggctaagttttagtagagacaaggtttcaccatgttggccaggctggtctcgaactcctgacctcaagtgatccacctgccttggccttccagagtgctaggattacaggcacgagtccatgcccggcccaatttttattatttttaaaggaactaattaatggacatcttaagattttcccagtttaaatcttcgatatggtaaatatcataaatataaataaacaaagctctttgaggtaagagcatacaggggtcccaaggcttaaaaggtttgaggactgatgttctatagcaacattacattgacctttccagaaggcaaaatggtaaagcacattttatagtacctctaaagtacaaagggaaaagatatattttaagcatatgacagaatgttcaattaaaaacattttctccacactacattcagtgaatataaaaagaatgtggattccccaggaacaaattcccgagaagtgagggacagtgctgtaattagaaaaatgatctggactctagcccagaccctaccagtctctctagactttagtcttcccatctgcaaagtgagatatcagaatagcctattttccatttgcttccaattgtcaataccatgactctaatcagggatccctaaatgggggcccacaagctgtctctggccttcagagtgactggccaaccctgtttttgagaagtaccccaagaggacaatcagctggtgcttggtgagcagctttcctttcaggtgaggaattgattttcagttacagcctcaatccggctcactagactctcctctgcagacatctgcatttacaacctctggaataaagggaccctcaaaaccggtccaaatctcaagctccataattcagctccagagacagggtgtctgggtttctcactcactctgctacatgctggttgtttgactttgggcaagttccttaacacctctgagcctcagtttcatcatctgtaaaatggaacaacgctgaactcaaaaggctggtatgaagcttagcgaggtgttgcccaagagtacttacagagttcttggtactggaaagcactttgttaaagggagctattattattaacgccaaggcacagaaagggagtatttcctaaactcccttcaccccccacaccaattccctttcccagcacctgacgattgcactcccacgatcaagcttgttttcatatcaactcccaaatccgacagttccacatcccaacattcacaagaccctcctcagacctctacttctccttccccaccctacatcccttcactgagctcccggccagtaccggtttccttcacgaccacagccgagcagaatggtcacagcactgaccactcccccaggctctcctccgcgttccagaccactaagcctccctatccctcatttcggagacccccttgggtcaggaagtggtggtccaggggttcatggcctaggattctgcccaaagcgcggtcgggagggatgggagaataacagcccgacctcccggaggggcccacagacactcaccgtccatccctagaggcggcggttccgggagctcgaaccggaagcggcctctacactgtttgcagttcccctggttactgcggggccccggaccaatgacggtggagctccacttactgagcccgcccccggggagtgacgtcatgccggcgcgctggaactcctcctccgaaccctgggtctgacccacctccccgggccccggatcgttgtgcgcaggcgcgatggaccaaggcccttggcggtgcgttgcgcatgcgccccgggcgccgccgactgaagtagcaatggacgcgctggagtcgttgttggacgaagtcgctctggaggggctcgatggcctgtgtctgccagcgctgtggagccggctggagacgcgagtgccgcccttcccgctgcctttggaaccctgcacgcaggagtttctctggcgggccctcgccacgcacccgggcatcagcttctatgaggagcctcgggagcgacccgacctacagctccaggaccggtcagcgggcggcctggcctggcgggcgggcgggcgggcgcagggcccgggggctgatggagctgggggcagggcgggggaatggagtggggctgtgcaagtaccggaggcctgttgattgagttggggcacggcggtaaggctaatctggggtccctcaggcctggcagggccctggagtccgatggagttggcggggggagggggagaatctagtgatgtcccgttttgtccctgtgtgtgttttggggtaatggcgaacaggattggggatattcttcaggcttaaaagaatgtttcctttacattggaggataggattagagcaggaaagacactttagagccagactggagactcctgagatcaacagaccctcatggtatattcattcggtgcagatagcctagggcaactcgagatctgcgtatcaggacaattagcgataatgctaaaagctgacatttatcagggacttcatgggtgaggtgctgttcttttttttcttttttgagatagagtctctctctgtggcccaggctggagtgcagtggcgcgatcttggctcactgcaacctccgtccgcctcccaggttcaagcgattctcgtgcctcagcctcctgagtaactgggattacaggcatgttccaccacgcccggctaatttttgcatttttagtaggtatggggtgtcatcatgttggccaggctggtcgcgaactcctgacctcagacaatccgcacctctcggcctcccaaagtgctgtgattacaggcgtgagccacggcgcccggccacattgctgttctaagaatctattctagaagctttaggagcttaaactcacttgatcctcacttgattaaactccgttaaacaggagattaaattcacttgatcctcacctatgaggtaggtgctgttatcgtcctcattttacagaggaagacactgagtcacagagagggattatgtaacctaaggttctgggggcaataagtgactaagaattgatttgaacccaggctattttcagcgtctgtgctcttaagccatattgtgagggtcaggggaggttccaagaggtaataatgtccaagacaggccgggtgcagcagctcatgcctgcaatcccagtactttgggaggctgaggtggatgggtcacaaggtcggcagttcaagacccgcctgaccaacgtggtgaaaccctatctctactaaaaatacaaaaattagcctggcgtggtggcgcatgcctgtatcccagctactcaggaggctgaggcaggagaatcacttgaacctgggagacagaggtttcagtgagctgagattcagccattgcactccagcctgggtgacagagtgagactctgtctcaaaaataaaataaaataatgttcgagacaaaacttaaaggttggatttaggcagccagttggcaaagaggactgttggacagagaacagcaaatgtgaagtaagtggctgaagtgtggaattggaggtagggaatgagg

SEQ ID NO: 1243020 - DNA, 4001 bp, Homo sapiens
tggctcacgcctgtaatcccagcactttgggaggccgaggcgggcggatcacctgaggtcgggagttcgagaccagcctgaccaacatggagaaaccccgtctctactaaaatacaaaattagctgggcgtggtggcacatgcctgtaaccccagctactcgggaggctgaggtaggagaatcgcttgaacccgggaggcggagtttgcggtgagccaagattgtgccatggcactccagcctgggcaacaacagcgaaactccatctcaaaaaaaaaaaaaaaaaaaaaagtcactgcctcctggaaacatgctgtccacttggttttccaaacacagtcgaacttagttctcctcctaccttgctggtcatccctgtctccctgacctcttaatactgtaatgctccaggacttgcctatggaaacttctccatttacgttcactccctagatgttctcatccactcttgtggttttacatacattagctcagacttcttccataaactttagaccagtgttgccaatttcagtgcaatttgagatactgtctatttgcccaggctggtcttgaattcctggcctcaagcaatcttcccacctcagccttccaactagctggaaccacaggcacatgccatcatgtccatcttcactgcagtgtcatcacttgaatgtttaataggcatatcaaacagaatatgtcctctgtctgggatgttcctccccctgtataatggcatgggtcactctctcactttcctcaaatctctgcatcaataccatgttattagaaaagcctaacacaccctcaataaaatagtaaacctcctctcccctctccactatctccccttccccaaattattgttctttgtagcagtcatcaccatctggagtgtacttcagtacagtttatatttgtatgataggtatatttgatagttatctgttttatcttttccaacattcacagctgtgtccccagaacccagaacagtgcctggcccgcagcaattgctcaataaataaatgaatccaagagctcttctttcagaactagaattattccttccctgcactttgcttccctatctagacttcatcttccccctctccactcctctctaccctgcctaatgaccagctgcttgaaaagacttcaggtcccaggcttcactccctttaactaactgtacagttttttggactcctcacccctttacaggtttctgcttggcccagtcccctccatctccccttctttcattcgacatacctcctcgaaattaccagaatacgcctgtttttttcacgtctcgggtccttccgccaagaatgcctttgcaatatattcctggagcaaactcttaaccattcttcaaggctcagtttaggcctcacttcctccaggaagccttccccgcgtctagtgtcccactgcttcggcgacttctttactcagagctgtcactgttggagtctaggtccgtgtcctcccacaatcccctgaactccccgaaggcaggaatggggtctgattcacccccgtgtaccaagcacccagcactgggtgcataatgaatgaaggatggatgggggaggagccccccactattaaggcggggtctagtgacaaatgagagggtgtggcctgtgcggagagaagccccggagaggacaaggtgaagagccaatggggaaccagaaatagaggaggggcgtgacctgcagccaataagtggtgggggataaggtgaagggcgtgcccaatggagggtggggccaggagacaatggagtggaggcttctccgggagatcaggaaaggtcgcgtcgcgcgcctcctcccggcctttgggggggtccgtccgcgtgccgtgcccccacctgttagctcctctgctcgccgcccgccgctcccgctctgctacaccggccaccggacgcccagccggcgggagccgtcgccgatgacgtacgtcctcgggcgcgcgcacgctcttacgaaagcgtggggcttcgcgtcagtctccgcggcggcgcgcccccgaggccactgggagcgaagccaggcagggttgagggggcggtgttcgtggtcctgggcccgcccccttcccaaggccacagcgagttgctgggcttcaggggctccaggcggccagggcggcggagactcttgctcacggcctgggcgcggagacgtgggggcgtagcccgcggcctcgggaacgcagtctgcacagagggcagatgcctgcataggcggggcgcagcccgtgtaccaggacgggagccaggatactttaagcgtgtcactctgcaagaattccctcaaccctcgtgggcacttttattccatcccaccttccccaacacacacagactcaggcgtccggcagccgtggtttattctgcgagcagcagggctcgggcgcaggaccccgagggcaggcaggaggccggcgcgagcgcgggcgcgggcactaggctgaagaggacgcggcggctcgcgcggggcgacggcggcagcgcagcctgcagggagctgagcgcggccaggtgctgctcccgggacaagtccccgcgcaggcccaagagggcggagacgtggtcctcgctgcaggggcaccaaggaggcgcgtcagccccgtcctccccgccctccggcttctcttcccttctggcccccagtccgcacctcacgtcgggaaattgttgccgcaggccagccacctccaggcccagcagcgcggggtcgcggaggtttagcagctccctcagggcgagcagcaccggcgcgcagtgcgcgttctcctccaggccctgagcacgtcggggtagggtctcgcgccagccctctctcccacccagccactgagactctcgcccgtctgcccgcccaagaagctctcaccaaactgaggaaaagctgctgaagctgggcagcatcgtgccgcaggcgctcggccgcctgggtcctctcgtcggctccgcggcacaccaggcggccttgcatcagcgcgctcaggtactggagcaccacggcacgctcggcctcagccagcagcagctgcggggaggcaatcaggcgggtgcaggtcgcctctcacccgcgccgccccttccccaatcttttcccccaacccacctgaaccgtggggttccgcacgcgccagaagtcccggcagaagcgccccgtccgttcacacacactttgcaggagctcagggctcgacagccattggcgcgagggcagatccgcgaacaggggctggggaaatgatccagatctggcattgccgcggagacccccatacgtagctgtaccgccacctctccacctgctcccatcctgacctgaaggaggcctcacctggagctccgcctgcagcgcctccaacaccaagcggtagatcctcctctgcaactcgtccagcgcagcttccactggagccaaggcccctgaaggcgccccgtccagctgcaggacagacactgaggagctggaccaagcaaaactacggcttcaggaccaaggccaaggcccgcatggccctcggtggtccagaccctccggcgccaccttgtggggcaagtgtttgacgggagggagcgagaacagcggctctctgcacttctggtcccaggcatggaccagggctgggagacgggcgcttggcgagctgcaaaggacacagcccagcgagacctgcctcaaattcgcggtgcgtccttgaggaaaacattctttcggtttctgtttcctcattcgtaaaggaagggaagtatcccagtgaggagggagtaaaaaatcatcacttgttttccttgcccccaccaaaaagaacataccacccaagaggaagggagtgtgtgtgtgtgtgcgtgtatacacacagctgtaaccccagacattactggcacagagtagggccttgaaatatttgctggacgaatgaacaattgacaccatgtgccaggcactatggtggcc

SEQ ID NO: 1243021 - DNA, 4001 bp, Homo sapiens
agtgactaaggtaaacacattttaactcctcttaaaaaacaaaaccaaaaaccctttcctggtagacactaaggctttatcaggtgcaaccacagctcatgttagcccctccataagcatttgtcacaccccactattgcgtgtttgtcactttctccacctgactgccaactgtgagaacaagttttatcctgctcacctttctaaccccaacacctggcgcagagtaggccctcaagaagtatttgctgaaaaaaattaagatttagtgaataaactactaatcactggcttgttcatttccatcatgaaaatggctcacggccattcctgccccagggctcacagtccagggtaggagggaagaggggagggccacatgtaaacaattatttactgcacaagagtctagccctttcatgataaaagcaaccttgagcttggaccaggctagcaattattaattttcccttctttcacaattcctaaatttcattcactcttctcccttttattgatgaggaaattgagctaagagagcatcttacatcataaataagaaaacacttgctgttcttgtcttcttagtcaaggcctggcaaactcctatccaacctttgaaacccatctcaagtatcattcactcccttaatgaagtcctcccagaatactcaagggcttacttcagattccacaccctcagtttatacacatctctcattgtgtttcgtattacatctacgtatgtgacactctattgaaacagactgtaaattcctcgaggaagggacattattcattcaggcattttcatatctaccatgcaccggacacagtgcatcttcgaagggtaaggggagactgtgctcagccagcagggataacatgtacttgggcataatggttaagagcagaggttctacactcagactccttgagagcgaattcaagccccaatatttactagttgtgttaactctgaacaaactaacctcagtttcctgtgtaaaacaaagacagtaatagtaacaacctgatagcattgtgtggacaataaatggttcaccaccataaaatgcctacaactgtgcctggcacatagcaagagctctacatgtgttaggcattctcctaaatgtctgtttccccacgaggctaacgagggctccagtgaattactatggcgctcaccatcatcactaacgaggattaagtctccgggttagagaggcacatgtaaacaaatactcacatacaagattttgggtgtcctaacagcctttccaaccctaaaatagcattcacttccatgctagagtgaaaggaaattttagtcttttatttcgttttcctgtaatcgcagagcatcttacgctgccaactcaaacccagcagcagccgggtctgttcctcagcccgtcctcttgcatctctcagggatgtctctgcacccaaacaccatgtcccacacagaacccttcccaatacacgcctccggctcccttcttctcgtcctcgtggctagagcgtccgccactcttctcttgcttattcaggtgatctccagggatgaggccatgacccccgtttcacagacgaagaaaccgaagctcacaaagaaaaagtgcgcggggttcaagccaagagcctggaccggagacccgagtctactgacccaaggggagagcaggaaacagggagaaggcaggagccaggcggggcgaccggctcgcgaccccacactctcaccgtccccctctccccgcccctgcgccatggccgcctctccgcgacaacccgcagagcctggaccacactccgacacataactcccactaaactccagacgtcggtacccgccttgcccaggccgggctcaagtacctgagatcgccgccgctgaagctgccgccatctcgcgtcgcctctgctgcgtcgagccgcccgcggccattccactccctccttgggcccgcctctcccattcgaattccccggtgccccgccccctctcccaggttccaccaatcaagactacgcgccgccggaagctgctgcgtgtgggtcgccactatcccgccttccagcgctcgcctccgggtccccaagaaaaggttcccctggtcaggacgcatgcgcgcgcgtgggccgcgcagccgttgatgtctggaagcgcgctgcgatacaaacccctacgcagggatgttggcgacggtggccgctgggggagctgctcagcgccgcccggcactgggctccctttccctttactttctgcagtttcttgcctccgtgggtggttggcgcgtctgcggagccagggtcgttgtgtggatcgtgggactgcagccccagccaaagggctatcacgtctggtcggttctgtagatctgggccccaggggctggactctgggcagtcacgttgcagtcgctgcctgctgggcccaaggccactgtaggtcccctcgcgtccgtgtcagcccaggagagcagcttggatgttcctgtctttataacttggcactcagcacgtcggcgaagcgtggaaaacgcttagtctgtgattcagtcccactcacccacggttccggttcccagtccttaagagtacagcagtccgttgagtagctctctgtcctttctgaagggttggctagggacggtcattccacttttgagcaccaggtaggtagggcccaggtttagacattatgttccaccctgttgaacaacaaaacaaaacacgggccgggcgcggtggctcagtcctgtaatcccagcactttgggaggctgaggcgggaggctcacctgaggtgaggagctcgagaccagcctggccaacatggcgaaaccccgtctctactaaaaacacaaaaattagccggggatggtggcacgcctgtagtcctagctactcgggaggctgaggcaggagaatcgcttgaacccgggaggtgtaggttgcaatgagccgagatggtgccaccgcactccagccacggcgccagagtgagactccgtctcaaaacaaaaaacacaaatcttagatcagtgtttctgaaacgttttgccttgggatcccactacagtttttaaaaatgaggcctccaaagatgttttgtgtatatgagggtttttgtttttttgtttttgagacggggtttcacttccatctcccaggctagagtgcagtggctcaatctcggttcactccaacctctgcctcttgggttcaagtgattctcctgcctcagcctcccgagtagctgggattacaggtgtgcaccaccacgctcagctaatttttgtatttttatggagacagggtttcaccatgttggccaggctggtctcaaactcctgacctcaagtgatccacccgccttggcctcccaaagtgctgggattacaggtgtgaaccaccaggcctggccgtatatactgtgtgtgaagtgaaactaaattaaagttgacattaatgaatttaaaaattacagtaaaaaacccatagacataaaaaggacatctaagtagtggttgccaggggatggtgaggggctgaggagctggcactacagcaatagatataacgagtttcttttgggggtgatggaaatattaaatattttggaatgaagtagtgatgatggctgcgtaacgtaataaacatactaaaaaccagagaggtgtgcactttttttttttgagacatagtctctctctgttgctcaggctggagtgcagtggcgcaatctcagctcaccgtaacctccgcctcctgggttcaagcaattctcctgcctcagcctcccgagtagctgggattacaggcatgcaccaccgtgcatggctgattttgtgtttttagtagagacggggtttctccatgttggtcaggctggtcttgaactcatgacctcaggtgatccatccgcctcggcctcccaaagtgctgggattacagacgtgagctaccaagccctgcctagacctccat

SEQ ID NO: 1243022 - DNA, 4001 bp, Homo sapiens
gtccacttctctccactcccactgcactacctctgcccaaggtcatggtctttacagccttccttgctggtggtagcaaggtgtctccctgccctctagtcattccctctgtttccttccttgcagtgtaagttaccagtcatgatgaatttccttcacttcctacaaaactccaagttctcttgcacctttggatttttgtccacgttaatctctctccctagaatatctgcattgctccccaccccaccctggagtgactaaggtaaacacattttaactcctcttaaaaaacaaaaccaaaaaccctttcctggtagacactaaggctttatcaggtgcaaccacagctcatgttagcccctccataagcatttgtcacaccccactattgcgtgtttgtcactttctccacctgactgccaactgtgagaacaagttttatcctgctcacctttctaaccccaacacctggcgcagagtaggccctcaagaagtatttgctgaaaaaaattaagatttagtgaataaactactaatcactggcttgttcatttccatcatgaaaatggctcacggccattcctgccccagggctcacagtccagggtaggagggaagaggggagggccacatgtaaacaattatttactgcacaagagtctagccctttcatgataaaagcaaccttgagcttggaccaggctagcaattattaattttcccttctttcacaattcctaaatttcattcactcttctcccttttattgatgaggaaattgagctaagagagcatcttacatcataaataagaaaacacttgctgttcttgtcttcttagtcaaggcctggcaaactcctatccaacctttgaaacccatctcaagtatcattcactcccttaatgaagtcctcccagaatactcaagggcttacttcagattccacaccctcagtttatacacatctctcattgtgtttcgtattacatctacgtatgtgacactctattgaaacagactgtaaattcctcgaggaagggacattattcattcaggcattttcatatctaccatgcaccggacacagtgcatcttcgaagggtaaggggagactgtgctcagccagcagggataacatgtacttgggcataatggttaagagcagaggttctacactcagactccttgagagcgaattcaagccccaatatttactagttgtgttaactctgaacaaactaacctcagtttcctgtgtaaaacaaagacagtaatagtaacaacctgatagcattgtgtggacaataaatggttcaccaccataaaatgcctacaactgtgcctggcacatagcaagagctctacatgtgttaggcattctcctaaatgtctgtttccccacgaggctaacgagggctccagtgaattactatggcgctcaccatcatcactaacgaggattaagtctccgggttagagaggcacatgtaaacaaatactcacatacaagattttgggtgtcctaacagcctttccaaccctaaaatagcattcacttccatgctagagtgaaaggaaattttagtcttttatttcgttttcctgtaatcgcagagcatcttacgctgccaactcaaacccagcagcagccgggtctgttcctcagcccgtcctcttgcatctctcagggatgtctctgcacccaaacaccatgtcccacacagaacccttcccaatacacgcctccggctcccttcttctcgtcctcgtggctagagcgtccgccactcttctcttgcttattcaggtgatctccagggatgaggccatgacccccgtttcacagacgaagaaaccgaagctcacaaagaaaaagtgcgcggggttcaagccaagagcctggaccggagacccgagtctactgacccaaggggagagcaggaaacagggagaaggcaggagccaggcggggcgaccggctcgcgaccccacactctcaccgtccccctctccccgcccctgcgccatggccgcctctccgcgacaacccgcagagcctggaccacactccgacacataactcccactaaactccagacgtcggtacccgccttgcccaggccgggctcaagtacctgagatcgccgccgctgaagctgccgccatctcgcgtcgcctctgctgcgtcgagccgcccgcggccattccactccctccttgggcccgcctctcccattcgaattccccggtgccccgccccctctcccaggttccaccaatcaagactacgcgccgccggaagctgctgcgtgtgggtcgccactatcccgccttccagcgctcgcctccgggtccccaagaaaaggttcccctggtcaggacgcatgcgcgcgcgtgggccgcgcagccgttgatgtctggaagcgcgctgcgatacaaacccctacgcagggatgttggcgacggtggccgctgggggagctgctcagcgccgcccggcactgggctccctttccctttactttctgcagtttcttgcctccgtgggtggttggcgcgtctgcggagccagggtcgttgtgtggatcgtgggactgcagccccagccaaagggctatcacgtctggtcggttctgtagatctgggccccaggggctggactctgggcagtcacgttgcagtcgctgcctgctgggcccaaggccactgtaggtcccctcgcgtccgtgtcagcccaggagagcagcttggatgttcctgtctttataacttggcactcagcacgtcggcgaagcgtggaaaacgcttagtctgtgattcagtcccactcacccacggttccggttcccagtccttaagagtacagcagtccgttgagtagctctctgtcctttctgaagggttggctagggacggtcattccacttttgagcaccaggtaggtagggcccaggtttagacattatgttccaccctgttgaacaacaaaacaaaacacgggccgggcgcggtggctcagtcctgtaatcccagcactttgggaggctgaggcgggaggctcacctgaggtgaggagctcgagaccagcctggccaacatggcgaaaccccgtctctactaaaaacacaaaaattagccggggatggtggcacgcctgtagtcctagctactcgggaggctgaggcaggagaatcgcttgaacccgggaggtgtaggttgcaatgagccgagatggtgccaccgcactccagccacggcgccagagtgagactccgtctcaaaacaaaaaacacaaatcttagatcagtgtttctgaaacgttttgccttgggatcccactacagtttttaaaaatgaggcctccaaagatgttttgtgtatatgagggtttttgtttttttgtttttgagacggggtttcacttccatctcccaggctagagtgcagtggctcaatctcggttcactccaacctctgcctcttgggttcaagtgattctcctgcctcagcctcccgagtagctgggattacaggtgtgcaccaccacgctcagctaatttttgtatttttatggagacagggtttcaccatgttggccaggctggtctcaaactcctgacctcaagtgatccacccgccttggcctcccaaagtgctgggattacaggtgtgaaccaccaggcctggccgtatatactgtgtgtgaagtgaaactaaattaaagttgacattaatgaatttaaaaattacagtaaaaaacccatagacataaaaaggacatctaagtagtggttgccaggggatggtgaggggctgaggagctggcactacagcaatagatataacgagtttcttttgggggtgatggaaatattaaatattttggaatgaagtagtgatgatggctgcgtaacgtaataaacatactaaaaaccagagaggtgtgcactttttttttttgagacatagtctctctctgttgctcaggctggagtgc

SEQ ID NO: 1243023 - DNA, 4001 bp, Homo sapiens
cgagtagctgggattacaggtgcgcaccaccagcccaactaatttttgtatttttagcagacacagagtttcaccatgttggccaggctggtcttgaactcctaacctcaagtgatctgcccgccttggcctcccaaagtgctaggattacaggcgtgagccacagcacccagcctttacacaccttcttggtcctcagtttgcttgtcaataaaatggggacaacttcacagccctgtgataaggatcaaatgggatgaaatacacgtggtgcccatgtagtgccaggcacacagaaagggcccacagtacaggccaataggactacagtagccatcagctcctcaaaactccccagggaggtggggggcattctccccacctgacaggcaaagaaccggaagcctggaagggttaacaatgtgcccagggtcacagggagccaggattcaaatcccatgtgctaatcaaccctctgccagccaattctcagggtggcaatatgggggttggtcgggggactcagaggggcctggggcagctgagctggctgaggcccagtggcaggcacggcgcttgcatttcacacacaggatttcatctgacctttgtcttaaattttttaagtggataaaagtctgtatggtcatataatcttcataatacccaattttttccttcaggttagaaagctgagataacacaatatttcaaagacctatatgcatgcacacacacacacagacacacacgactagaaggcactacataaaatgttcagtgactaacttgtgatttttatttcctttttgatatttttctatgtgttttaagttttctaagggaaaatgcttttgttttaccggaaaagcaatactcattcatattacatttgtaatacttaggacaaccttatggggtagaggccatcctctgcccctttcagacaactgggctacctggcccaaaagcccaggcttttccccaggcccctgggtcatccccagcctggctgtgctgcttgggagcagccagccccagacaaccatagaagcagagagacctcggaaggcatcagtccagctgccactgacagcacaaatgtggtgggagagaggggtgaacaggagtttgctgtgtgccctctctgggcctcagtttccccttctgtgcaccaaggggcttggacctgatggcccagagggactctgctagctctcacaggctggcagtctagaccctgttcctgtaggtcacgagggacagggagcagacccctgaaggcaccttgcctggagagccctctctcccccacactaccagggcgacctgcccacgcctcgggagagggtcatggacagctccgcggccccgccaatccagtcccggccctgaatcagagaagccgctcacttcttgactttcgcagcaccgggggacatgacccagaaaggcgagctggcactgacagctccccggggggtacagtgggggccaagactctgggacctctgcccacctgctgtcagggtctctacagaagcacctgaaatgagcacatggaccccaagccccgccaggccacgttcccgagcagcctcggtccactcccaacgccgtccaggggccagcccaggcaggatcaagtgtcagcggcgcttggtgcccaggcagccacttcacctaccttgtttaccagcctgggcagagaccggagctagcccacacgctcttggccaaggacggcagcccgcagagctctgaccagcttggccagagggaatgcagctgattccccctgctctgtgcccgacccgtgttaaagtttaacccggcttccaggtctcctcttttccagacaggggcgcagggaaggagcgcccggcgagactgacgctccggctccacgcccgcctggctctgggctgtcggttaccctgtaattacctgacagctctgactgggcttaggaaccggtgagaaacctcagtctcatctctggtatctggaggaaggaagggaaataaagaggcattttaaaaatgcggactcaccagttctcaacctccccgggccggtgtgtgggaaagggcgggcggccgggctggctggggctggggcggggcgagccatccccggctcgggctccggggcccggcccactctccacaggccccgcagcgagggcgtggctcccaggttccacgtcctgcgagaggggaccatggcctggggctcagcagcctcctcggggcaccaggcagcctgcggagagaacaaggggagataagcttgaagaccgtggaccagcacaactgcacctcgggcagagccagccatctggaagggtctacgccccaccggtcgctggttacccagcgcagcagctccaactgcactgtcccccaaagaccctagggctcgcaggatgaaatggggcctgctgccttttgggggtatttgtttccgaatacggaggctccgaagtgcgaaagttgcatatcagctgtgcctgagaccccacacctgagcccttcccagctgagcctggagcctgaggacaagccaggtcctagccccacacagaggaggcaccgcgagtcagcagcatctccgtaagtctaatccttttcctccaagacatctaattttctaattgcacttaaccacatgcttaacccttaggcttcaggctgctctgcctaaggcctgtcagcagagcagtgaatgctctgaatattaacatttcactgaggagggactcaaaagggccctgactgtggccaatgacaagtgaagtctatatacagtaagttctcattcatgtattcgactagcctgcgctctgtgcctagcatgtggcaggcaccgtatgggtgttgagatacaaagattcattcagtcttcatttaataatgcctactgggtgccaggcatctgccaggggtccttttggatcagaagagatgaggcctgaaaactcccagtcagaagggagataaacacttcaaaaaaaccctcacagtctgagcaggctactggaggcggcaggtgcgagccaggcaccaggtggtgtggggaatggaggggggcagagagcattggtcagggatagaaagcttcagtcagggataggtccctcatgaactgaacaaatgaacagagctcaggtattccctgcagaagtctttattgagcacctactgtgtgcaaagcaaccttgaggacatttaaggtgatcatgctacagtcccagactcagacagtaatgtcatttacagaagaagcgaagtcagcttggagaggcaacatggggttttaagattgaggtgggggtaactgaaggacttcctagtggagcttcctgggctgtcgactactctccccatccgtcactgcagtggccacttcctgccaggaagtgaagatagctatttgaagggtgtccacctcccctgacccactatgggcccacacacattcatgtttgcagccccactgcacccagtctgcagctgcacccacactaagaactctgggatggcttgtggggtgaacgttctgaaatgaacacacacaaaagcttgaactgaagcctggaagagaggtcagggctggacacagactcagagctaaacagggccaccaacgccacaggtgaggaggcaatcatcaaagcttgagcaagaggagacagccatgtgataacagggctcactgcggggtggaaagctgcagaaggaagctgagagagggacaggagctccaggcaagtatagagttttcagaagtgactgaagtgtaagtgggaaggagaggttggtcagtgcccagtgcatcatgccaaagagacgtggaggactgaaagcccagacaggcagaaagcctgagcctgtggagggagaagggcagatggcaaacttcggagggctcaaagagtggggcgggagctgggggaggaagcagccacttccttctccttgggggtgtttggctaggat

SEQ ID NO: 1243024 - DNA, 4001 bp, Homo sapiens
tgggaaggtgagacagtgcagggcattggaggctgactccacagtggacagagaagactttcagggagatcagctcagctcagtctgaggggcagggacaggaggagatagcgtttctgcggttatcaggaagggaagtggaggaggcagccaggaagatatcgggaagaaagaggaagggcgtgtgctagatcccgaagaggaaaaagcagctgaatttagcagcctcaggggtgtgaaggtcaaaagtatcaaggaatcttaagcccagggttctgggccaagaaagcaggactctctctcatttacatgggcatctgagatgaaacctggtgtccggggacttctaccaacctaggattcgtgggggagggcagtgggactggttcagaacctggctcccctgtttactagatgtctgaccttgggagaattactttgcctctccgtacttcattatctccatctataaaatggggagaacaccaccttatagggttgctctaaagattagacaaggccaagtgttcagaacaatactggcatatacaaagagctccaaaattttatttttcagttactttgctccagtggtgggtgaatgcagagggcctggctggggaagagggtctctgcctctctgggtttagaccaggacagcagagctgcaatactccccctgccctagatcagggacattgcaaagactggggggacaggctggacagctgctcagagactgcagcaagcagggcttggtcgccctgggagagcaggcagaaggtcaaggaagttgtacagggaatgccacctccctgcacaccatcatctatcctgggctttccagggcaacctagatttcaaaccctctgctccctggtgcccctgtgaacagcagaactcaccaccctgtgcccctaaagtccactcactgcaaatgcagggccccattctgagactgcattcctagcaaatgactctccctggtcaaggagacggctactctaacaagggcatggggaatacacgtctgggaaagaatgggtgctcaccctgttcaggcagaggaaaagccggggaaggtgaaagaccaggggtggccacaacccgcaatcttgagacagtgttggggtatggaggtgggggctgggtggcagtaaatggtactccagaatttaattaaacacagcttcctctttaatatctcccaggaccaggcccttcactgcaccagccagagttctgctctaactagcaatgctgggcttaaaggggtggtcctgggatcgccctccctgctgagaccctcacaactgctgcggctgtcaatggcccgattcctcactgcccggagggcaccggccaaggcccttcttcctaacctctgggcgggcgcaccccgccccaggccctgccagggaaaaagcgaactccccaagggacgtggtgggagggacccaaaggcagccttccagggagccctgggggtggggaagacgccaggaaggggagagggcggcgccgattgacaagcccatcccgggtagggtctgcgctcttctcgttcaataaaatccaaacggggtcccgaggctgctcggatcccgtgggacacgccgcccctgtgcccagctcccagcaaggtcctcgactcgggctgaacggcgctggaggggacctcgcagggctgggtctcccgggcctttccctccccgcgcccatagcgggtccgggcagaggggtcccgagggcagggccggcccggacgcggcgccccaaacggcgggccgggcagagcccagcgccccgctcgcacccagcccgcccgggccccccactcaccggcctggcggaggcaggatccaggcgtcgccgcagcgcccggggctcggcccggcccggcccgccggcaggaggcagctccacgccgccgcctcctcctcggccagcccgctcgcgcccctcccgcacactttccacaggaaatgattaactcgggccgcggcgcgttcccatggcaaccggctccgaccccggcggggggcggcggcgcgcgcccgcactcacgcgcactggcgcgcacgcgtcagcccgggcgcgcccccgcaggtctcccgccggcactcccactcccactcccactccttcgcggggcctcccactcggtctctcccgcctccccgcgtcccgcactcgcactggcacacgtgctcatgcgttccctgaaggctctcacaaaacaggcctgcacacgggctggcacacacgaggcagcccacacagccccacacctggtgagccatgcgtacttttgcacagcctcaaacccgagtgcaaaacttccacgcgagtactcacacatacacttctcacgcgggctctcataccagtacgtgtcttcccatcccaacacacacacaagctcttactcacgagacaatacatgtacatcccttaccgtgtccttgcacgcgctggcgcacatgcactcacactgtttacagcgcacacgctctcactcgctccaccacctactcgctggccaggccgccttctagccacagcacttcctacctctgcacccccagccccaccccagcaaatgaatatcttcccagcaaggaagctgcctggagtcccttaaggtaaaacacaccaatggtgcagcagttcccggccttgctgcagaaggccctgctactggggcacctagagcctcagaagaggcctgggggaggccaggggcctgccagccgggagagacagctgacctggaggagccactctgttctttgtctcccaaacagaggcagcattttattccagagccagcagcaatattctccctcactctccacacccccgggtgcggaagaggagaaagcaagtcactctgaagccagcccatgcaggctgacggttctgcagataatcccaggagggcgggtactctgtcccttcctgcttgtcaggggatggcccaagaagatcaaggagaggactggagggggtcgggcaactccaggtgggttctatctcctgctgccgcccaggcgctgggctgccagtcaagaatctcgaccagcgacggagccaagggcctgggcctcagattgttctggacgccagagcaggacagtcacagtcccccagctggaagcagcctagtgcatgctttatttgacaactgagattcctcagtgaaggcctgatagagggtgaatgtaacgctcctggaatcattccctagagagttagatttccagctgaacaccacactggagaacccttccaatgggagagaaagccttatttggggagttatgatctctgaattcctctgcctgccctccaaacagcagtgatccaggggaccgcaagggtggatgaaggcaaaatgtctctagaattctgatttagtatctatctcccttgattatagtccctatgagttgatggggcgggggatggggaggacagaatgtctttaaagtcctggttcaaaactggagactttttcttactcagggattgagtacattgacattaactgtaggtccttcccaccaaagccaaagccagatttttaaattaataataacatttattgttcttttgctttgattacaaaagtaatagatgttcattgtaaccatatcccacacactggagataaatgctgccaacactttagaagtctttttttttcctgtgtacataatagatgccattattgaagctaacactgtgtcaggcacagcactaagctctttataaacaaaatcccatttaaccctgaacaccctatgaacaccagtactgtttcaggacacccgtgtttcaggaaaggaaactgagcctcagaaagtttgttcacaaatgcagtgtgtgatagagctatgactccaataggtactcacacagtactatcagatgcatatgggtataacaacttattaagatcaaagcaccagcgaaggaaaaaggaaattgaagtgtaa

SEQ ID NO: 1243025 - DNA, 4001 bp, Homo sapiens
aaagacaggcagaggccaggactaagtgaaggtgcgaaccaggtgacctgatacatgagttctgtgggagcagaattccaaactgtccccaatccttcccccaataattgccaggactgtgaaagaatgggataccactcttgtgattaggttgtattacagacacagctgaatttaagaaagagatgatcctctgtgggtctagcctaatcagacgcccacttattttaaaagtttgttttgagggttcattcagataacatacaaaccccaggcctgacaggctctctctcttaagggaagctactgttacaatcaccttagtattgggtactggagggagacatggagatgagtaaaaatgacaggtaactggcggggcaaggtggcttacggcttgtaatcccagcactttgggaggccgaggcgagcgcatcacctgaggtcaggagtcccagaccagcctgaccaaaacggtgaaacccggtctctattaaaaatacaaaattagctgggtgtggtggtgcatgcctgtaatctcagctacttgggaggctgaggcaggagaaccacttgaacctgggaggcggaggtgcagtgagctgagatcgcaccattgcactccaccctgggcaacaagagtgaaactccttcaaaaaaaaaaaaaaaaaaaaaaaaaaaaagcagaaagcagctaacagctggttactgagtgcttactttctgccaagcaccattctgaagataccacacagatgaactgacttcctgtgccacaaccctagccagcaggtcatgccactgcagcccagcctaggtgacagagcaagactctgtcaaaaaaaaaaaaaaaaaaaagaaagagcctaagaggagtgtgagggaaaagtccaactccattatttaagagatgaggacatggagagatcaatgacttaggaagaaaagggacaaaggactgtggtcaagagctcctgattcaggacatctggtcacatcccagttccataccacttcatggttcacctgttggtcttcctgtcaaatgggaataccagtgctacggaactgacctgctcgtgaggagtaaagcccagggagctgtgcctggcgcacggcaggccataaaactggccccggttagggaatccatgagcagcagccgcagaacactcaaccccaaggtcaggacggatcctcctgcagaccccgggctgaggaccagagggaaggagacaaccgtgatggccgccatcagctgctacgggataccccgtggctccagtgccttcttcacttaaccatctgctgctcactgctcagggctgctgtgatgattatttgccctcttttgaaagaaaagtaaggttcagaaaagttaagagtcttactcccagaccacacatcatgcagaggcagcccccggctcaacctcaggtcttcctgtgccaaacccctccctcttctcaccacccagcctcccttcagagggagggtggagggagaagggaggagggggaggaaacgcagaaaaacgcccgtgacaccacactaagaaaagcaagcacgttaaagggggcagctccgagaagcggacagacacacgtggagactcaggagggggcgggccccgtctgggctgcccggacgcggcgccggggcagttcctacggcctccagctctcccgcagggccggcgcggctcccacggccgacccgtaaccccggggggcgcagggagtcggccgaggctgcacggccgcgacgtcgggccgctaagcccggtctgacccgctcacctcctccttccgcgagcgcttagacaccttcttctccatcttggcggccgtcttctccgcgccgcggcccttcttctccttcttgcccttcttgcccatcttgccgggtcccaagccgcgacgggacaccaggaaagaaaacggcccgcgctctccgctcggaaacaggtgctcgtggggcggagctcggcgcacagaaatggagtcacttccggccccgagttcgagccgcttccgggtagaggtgcggctgggccctttacgaggttcggtcttggagctccgtcttcggcagcgggctcgggggcctcggactctgcataaggccccggaaaagatgaccggccccgggctgggcgcggtggctcatgcctgtaaccctggagctttgggaggccttggcgggcggatcgcttgagtccaggagttcgagatcagcctgggcaacaaagcgagacaccaccccccacccccagtcgctacagaagaaaaaaaaaaaaattaaccgggcgtggtgtctcgcgcccagtggtcctagctcctcgggaaggtgaggcgggaagatcgcttgagtcaaggagttccaggcagcaatgcgcccctgcaccccaacctgggcgacagagcgagatcctgtttcaaaaaacaaaaaagatggcagccccggcctgacataccccggccatgctcgccaattctcacgccctgtgcccccacctagcctgtccccgtgtcctaggagacgtgccctctgagttttattttttatttctatttttttgaggcagggtcttgctctgtcgcccaggctggagtgcggtagcgcgatctcggctcgctgtaacctccgcctctggagtagctgggaccacaggagcccaccacgcccggctcattttctcttgagttttccggggtgcacgtgccccccgttaaggcacattgcttcgccctgggtagaactaagtgggcgactcttgggctagccccattttttcccctcagaccaaacaaatgagtgcttttttcccagaaaaaaaatttcacacagttataagattttgcagatcctgagtaagacagtccctgccgggcgcggtggctcacgcctgtaatcccagcactttgggaggccgaggtgagtggatcacgaggtcaggagttcgagaccagcctagccaacatggtgaaacccccgtctctactaaaactacaaaaattagccaggcgtggtggtgggcacctgtaatcccagctacttgggaggctgaggcaggagaattgcttgaacccagggggcagaggttgcaatgagctgagatcaagccacttcactccagcttgggcaaaagagcaaaattccatcttaaaaaaaaaaaaaaatgggggggcccttccaccttcccatttaaaatgtgccagacactgttaggtactaagggcatgtcctcaaatgtcctaacatggaggacttttgtttcttcataggtaggctagagctaatgatagcaccctgaaagggtactcaatttgtggagcctgagaaataaagataggtaatatccaaatgcctgctaggaaattgtactctaggatttgcctcaaattacgtaagaaatggcaaaatcatctgcagtgcatggaatgttatgatttgaaagagcagagtaaaaatgcttatcactacttagaagatgtcatctttggatgggtaatcaaggaataaggcaaattaaggacaaggacaagccaaaatttggcaaagggaaagcataaatcaggaaataatctagtttattactttgtgtgtgagtcagcctttaaaagttctcttaggccaggcgtggtggttcattcctgtaatcccagcactttgggaggctgaagcgggctgatcacgaggtcaggagttcaagaccagcctggccaatatggtgaaaccctgtctccactaaaaatacaaaaaaaaaaaaaaaaattagccaggtgtggtggcacccacctgtagtcccaactattcaggaggctgaggcaaaagaatcatttgaacctaggcggcagaggttgcagtgagcggagattgcaccactgcactccagcctgggcgacaaagcaagactccatctcaaaaaaaaaaaaaaaaaaagatgttatcttagatccagccaggtgtgatggctcacgcctgtaatcctagcactt

SEQ ID NO: 1243026 - DNA, 4001 bp, Homo sapiens
ctcgaaccaagctaagtgacttaagtgtgccatctcatttaacccccacaaagattatacttggccaggctgatatcacttatttcatttcacagatgaggatattgatctcatggtcacaaagctagtaaacggccgagaatcacgcctcggtctgtccagcttcaaaacctggatccatcaccatgacacgctgctgaatgaggcccgggttcgagagtatcacactttaaaaatatcatgatgcagatgaggatgtggtacagtgatgactaccatgtacacagtacattctagacacacactgtccccaagtgcttctctgcatcttcacttagtccccactgcaaccccatgaggccagcactgtgactggaggatgctgagagcagtgaggtgaaataagctgcccggcgtcacacagctgggaactggcagaattgggattccagctcagggaagcgcccatgctcttaactcttaggctacactgcctggctcttgggtgggggatcactgcagacagagttaagctttggtgtgtggggggcgggggaggcagggggaggggcaggtgcttcaaagatggaagggaacacagagaagggactttgccaactaatattagcacaagtcacatactgagacgaaggttttaaagaggatttttttcccccgctatttgagttcatgagaagagtttgttacctattgaacaaatagtcttcactaataaagaacaatgtgacaagaagtcagcactgttcttagataactggggacacagggagggcactccagtgttcccatggaaggaatgaattcgggcacagtccgtcccgtgcaactcccctagggagagaaggggcaactggattcctctcgacaaactagaaactttgtgacaatgacaagctgttcccaccccggccctcccctaggatgctggagagcccagagagggaagagaagaaacccagcgttggtgcggtgcccaccgcggactcgacttcattccaccttcacgctgagaggtgacaccgtcgttcccacagtgagacctggcgctcgggtgccccagggggggttgcccaaggtcacagaacagcaagcagcaggtgccctctctctccaccgccccaggcagcctgcccagaatcaaccaggccttctaacgctcaacgctttattttctaggccaagatacctagagagagttcgcggggccggaggctccctgctgtctcctgcaagtgcgtgggggtggggtctgatttccacccgtgttggacgtcagcggcctccgacgctttttggaagcaggtgaagggtcaaggccacccccaagcacagtgacaatcccaggtcactggaaaaggtcttccagtaaacatgggaccgcaggccccgtccggccgggggtttcccagagcgcctcctccccaagctccctcccgacctcagcgttggagaaagcgacgctgctgacaccggctcgccggcggggtctccggggacgccgctgtcgttcgctcggaccccgcagcccaggcggaactcagcgcaacggccgcccagcaggctccagccggcggcgaggaggcggagtcgggacggcccggggcgggggccactcacctgccacgcgcggggcggtccgcacaggccgcacctgtgtcacctgcgggggcggcggcccctcccccggccgcggcgcccccactcgcccacccgcccgccccggcaccaaggggcgcaggggggtcgcggctcgcggtggccggggaccctcccgatctccgccagctccccgccccggccgggcgcggcttcctggcggtcccgggctggagggtgggcgcgcgcggaggcccacctggcaggacgcgctacggacgcggcggggacagccccggcggcggggccgggcggtcggggcggcggggcccgggttcaggagacccccggccagcccgctgcgcagccatggctccgccaggaagtgcgaggccgagggcggaggcggcgcgcgcggccaatggcggcggccgcggggaggcggggccgggcggcgcggggcggggcctgcggctgagggcgggacgcgggggccgtggggtgagctcgcagggtggacgcccccctcgtccgcgccccggggatccccggtgtccaccccaccacgacgcccgactccgtcccttcaaaggcaggccccagccccgccgcgcgaaatgctccctggtgccacccaccgtcacggacgcagggccacggcggggaccagacacgcagggtcccgggcctcgaggcaccgacgcgtgcgctgggagctctttgctggcccagagtcgccgggacgggcaccgcgcctctcgcctccttccgggctgagcgggagcgtccctgcggccaccctgcggcgaggcctttgctgaccgctctgctcgaagtcacagcccctctctctgcacccaacttccaaccccatgcttcacttgagctcttatcagcgtctaatattccaaataatgtactagtttattcggtttattgtctctcctccctaccagaagccctccagggcagggtttactgttagttctattcctgactgggtcgtcgccaagactggcacacagtaggtgctcagtaaatgtgtatggaatgaatgaatgtaaccttcatcgatccatctatcaattgtcacacttcgctcatgctacagcgggatgaaccttggagatgtaatacttagtgaaagaagccagacacaaaagaccacacactgtatgattccgtgtatgtgaaatgtccggaacaagccaatccatagagacagaaagtagatgagtggttgccaggggcggggagttgctggagtgggaaatggctgctgaaggatcagcgatttcttttgtgtagtgctcactacagcctccacctcccaggctcaagtgatcctcctgcctcagtctttcatgcagctgagaccacaggtgccggctgccacacctggctatttttttttctttgatttttatagagacagggtttcagtttgttgtccaagctggtcttgaacccctgggctcaagcgatcctcgtgcctcggtatcccaaagtgctgggatgacatgtgtgagccagcacacccagcccacttacaggatctttattttttaattatttatttatttattttatttatttatttatttattttttttctttttttttttgagacggagtctcgctctgtcgcccaggctggagtgcagtggcgggatctcggctcactgcaagctccgcctcccgggttcacgccattctcctgcctcagcctcccaagtagctgggactacaggcgtccaccacctcgcccggctaattttttgtatttttagtagagacggggtttcaccgtgttagccgggatggttatttatttttttgagacagagtctttctgtcaccccggctagagtgcaacggctcaatctcaactcactgaaatctccacttcctggattcaagcgattctcctgcctcagcctcctgagtagctgggattacaggcgcccaccaccacgcctggctaatttttgtatttttagtagagatggggttcaccatattggccaggatggtctcaaactgctgacctcgggtgatctgcctgcctcaggctcccaaagtgctgggattacaggtgtgagccaaggatctttaaatgatgttctcactgactggattgctgtcccccatctctctctctctctctccccttttctttggggactgtacacattcaccctgccaagccttacttgcctgtctttgacccttcctggacctgtccctaccccagacaaagctaatcctcctgttattctgtctccataccgacatgtggatggatctctgttctgacatgaattcatgcactgcctctcattcatccaacagacttttcaggaacacctgctgtgtggccggca

SEQ ID NO: 1243027 - DNA, 4001 bp, Homo sapiens
tgccctgtttcctggtttatttccagtgtcctgctcagtgcctggcacatagcaggtgctcaatacatactcactgaatgaatgcacacatgctagggatacagagatgaacaagataaaacaccacccatcaagaagcaagtaggtgtgggagggaataaggtgtaatacaatgatacaggtgataaaagcaaggacagtgctaaggtcagggtggtggaggttgtggaacctgtcctaccagttgtcaggaaaatttctgaagaacaactgcaggatggtggtattaatccctgagacaaaggtactgaaggcaagtggctgaagaacaggcttgattggacagatgacttggagatgttcactggacaggtgaatatatatggatgaggagtttgggtggccgtgctgacacgggcgacataaagttaggaatgtatgggtggtgataagccttgaacagaacaagcctgagacaagacttcaagaaatacagtagctcgccacctaatcccaggtttccgttacccctggtcaaccctggtcccaaaataggtgagcacagtacaggaagttatcttgagagggagaccacatgcatgcaacttttattacagtatactgttgtaattgttctattttattactagctagattgttggtaatcgtttactgcacctaattttttgtgagacaaggtctggctctgttgcccaggctggagtgcagtggcatcatctcggctcactgcaacctccacctcccgggttcaagcaattttcacgcctcagcctcccgagtagccgggattacaggcacataccaccacgcccggctaatttttgtatttttagtagggacggggttttactatgttggccaggctggtctccaactactggcctcaggtgatccgcccgcctcatcctcccaaagtgctgggattacaggcatgagccaccacgcccggccctactgtgcctaatttataaactttctcatagatagtatacacaagaaaaaacagttatatttagggttcggtactgtctgtggtttcaggcatccactgggggtttaggaacgtactgcccgcggataatgggggagggggactattgtattggcatttaaataagtgggcagagataaaggagcttgcaaagaagaaggtgcaaaccttgaaatagtgtagtcaggagagccaagacgacttcagaataggggagcagtcaagagagccaagacgacttcagaataggggagcagtcaagagagccaagacgacttcagaataggggagtggccaagagatctggtaagaacaaagaatccaccgggaggttgcgggtcaactcttaatccccttctctccccatctcttgccatttagaaaagtatagcatcctcctctttagccctgcgaccaaatgcattcactctttcaaggagaaaggaaaagaacgttacagtgcatctcctgcaaacgcaaacgctttctccaaaaccgcttttaaattccagggacagccttgtgaagatctttgtgaatacccgacctcgcaagctccagagactacaataattcacttgccctaggttccaaagccagcaagtggaaaacggagactggaattccgcccacaggactccaaagcctgtgcagcaacaccccactcccccggcaggatcaccagcaggacgcgcgggagccaggaagtaagatccgtacctccaaggctcccatgggcccaagcctccgcatcaacagactgggagggattacgtggggtcccagggccggctctgaggcgggaaaactttctggaggcggcggcctcaggccggagcgggcgcacaccgactggaggggtcggattcagggatgtgggtggaccgcatttccccatcttccccgccgcgcacttcctctggtgcaatctccacaccccgcgccggcccgcctgcaacgcgccctggcactcaccggtgggcgaaatttccccgcctccacgtgagagccagctccgccgtgacccggaagtccacttcgagtcgccggcccaccctctcgggttccggcttcttccgggtcgcggccttccggcgaacgcggttaccgtggaaaccgcggccatggcggcaccgcggcaaatccccagccacatagtgcgcctcaagcccagctgctctacagactcgtcgttcacccggacgccggtgcccaccgtgtctctcgcgtcccgcgagctgcctgtctcgtcgtggcaggtcaccgagccgtcaagcaagaatctgtgggagcagatctgcaagggtaggaaacctgggctggccgagaggggcgggacccgggcggccggacgggggccgcgtttggggagcgcccactgtgcgcctgtcggctgacgggcggggccgccgggcagcggctccgcgggcccgggctccgcattttacgcatggggaaactgaggctcggagaggctggcccgaggttacgcagcgcggactccaatcgcgatccgtagtgaggttaaaggcaagggaacggcgagggaaagctgaataaagagaaccatgcggtgtggaccattggttcttaaacctcggttagtgaaccgaaaggaattgctggggcgggggccggggtggggatcttgttataaacggaggttcccaggccccgcccacagagcttcaaattgggatgcagggaatctgcactttttaaaagagcaccccaggtaatcctaacgtaggtagtcggtggcccacacgttcagtaaccatggtgtggacaaacgggttttagtcccttcttgcttcaaaccttccttaacctccccaggcggagttgagcacatcttcctttgtggctctactcagtatttgttacttaggttgggcaaattatttaacttatgaccctgtctgcaaagtgggcataataatggcacctatttcgatggtgttaagaagatggaaccagatagtcacaaaaagtgcttagcaaactgcctgattttaggagggcaaaaggattattggggaaaaaaaaacacaaactgctcgatttacagaaggagctacgtaagcgctagttcttaatgaataatgttgggtgggatgttttctttttcctccactagaccataagctcctcaaggtcaaggactcagatttttcattcgtgtggccaccatcactacctaagctgcctgaaacagcgcggtgaaaccccgtctctactgaaaatacaaaaaaaaaattatctgggcgtggtggtgtgcgcctataatctcagctacttgggaggctgaggaaagggaattgcttgaaccagggaggtggcgttgcagtgagccgagtttgcgccactgcactccagcctgggtgacagagcgagactccatccccaaaaaaaaaaaagtgtggttagttagcatttgaaatgtgattagtgcaattgagtaactgaatttcttgttggactcaaattttttttttttttttttttttgagacggcatgttgctctgtcgcccaggctggaatgcagtggcactggctgggctcactgcaacctccgcctcccgggttcaagcattctcacacctcaatctcctgagtagctgggattacaggcacccgtcatcattcctggctaatttttttatttttgtagagaaggggtttcaccattttggccaggctgctcttgaactcctgacctcaggtgatctacctgcctcggcctcccaaagtgctacaattacaggcctgagccaccaggcccagcccagacttaattttaataaatttaaatagccacatttggatagtggctgctgtattggatagtgcaggtcagtaaatgtttattgaatggaaaaaaagaatgaatgtaccagtatatgcgatgactcgaaagaagtggagaatacagagaaggaagagaatagtagactcagttgatagatgccctccaaagctgtctgt

SEQ ID NO: 1243028 - DNA, 4001 bp, Homo sapiens
tgtcgcagtagcgccagtagatgccctcctctgtctcagccacgtagcaccacggctgcacgtcaccgtctgggttactgcgggtgggagggaggtggtggggctcccaccaccccaagaatagcaaacccaggcccggccccgcagcctatgctcaaagtggccttcaaggctctgtgcctgtgagcggctgtgctgcctgctgtacacccacaaattccagttttgtctacgcagaactctgcctgatgaaggaactggacgtcgacttccgagtggacagcgggaagtcattaaaggggacttgagagctgtttttaggcttcagctgttgctagacttgactccatatatgaggactttgaggccatctgtattcttcacccccacccggcatgggcctcagccacttccgtccctcaaaccccactttttttttttttttttgagacgagtctcgctctgtcacccaggctagagtgcattggcgcgatctctgctcactgcaagctccgcctcccgggttcaagcgattctcctgcctcagcctcctgagtagctgggattacaggcgcccgccaccatgccccgctaattttttgtatttttagtagaaatggggtttcaccatggtagccaggctggtctcgaactcctgacctcagatgatccgcctgccttggcctcccaaagtgctgggattacaggctgagccaccgcgcctggcctccaaccccacttaaaagcagaagtgagctcctgagctttgcggctctcctcccgctgggtccatcctgcctcagaccgtagctgtggctctgaaccccaaaataagttgtatgacaagagccccactctgacaaggccccgcccattcggcccccgctctgaccaggccccgcccatacgggtcctttgagtgcccaggtccgtttctctcctggccctgaactggagctctgcagaaattgttcacctgaggaggatcccttttgcgccagggttccgcgcgccccgccccgccccgccccgcccctcattctggccccgcccccaggttctccaggaggctgggctgccagtccacggcagacctccaccccgcccgcacggaggccccgcttcgggccatccctgcaatggtgagcccagcctcgcccccagcgcaggccccgcccctcaccggcagaagttgtgcgcgcccagcccccagcggccgtgggggtcgctggcgctgctgtagctgtgttgctgcgtctggtcccagaagaggcacgggcggcccgccccgcgcgggccagtgcggttctggtggccgcggtagtcagccccattcacctggaagcattcggacaggcctgcacggcaaaggcagggcctggggaggtccggacccacgccgggcatcctcgcgcccctacgccacctcccgcctgggtccccagccagcgaccccgcacccgcccctgcaggagccctcgggctgctcagctgctccggccacctgctctgtccccctccctagccttgggggcctggccctgggggcggaggccgaggaaggggtggtgaacacggcccgacagccgtgcggggacttacctggactgtgcaggctcccagccgaggccccacgcggctgcagcagcgggaggaagaggagaaagaggaagccctgcagggcttgtgtccccatcgctctcaaccaaggataggtcaccctcgcccggacacggcccgggctgcccccggggtcgcttcggggtctcccaggagacctagggggcgttgtcctctgacagtctcccctcgtccgactctgagccgcgctttccgtctggggtgggtaaatctctcctgggggtctttgcctcccagggcctctgcccctagaggcgtctctctgtccctgtccctacccgggtctctccggggggaatctggccgggggcgttctcagtctctgtctcagcgagctctgggcggtgcctcagcctctacgcccgccccctcccactgagcctagctctcggcgtctccctcgcccaggtctccaacgggctgactcctgcccgcctcgcatccctccgtgggtccctccccctgggtctctccctccccccatgggaggccgggaagccccgcccagcactggagcggaggcagcaggtccagacgcctcccacgcccgttcccccgaccccgggcgtccagcgcttcccggccccctctccctcaggtcggtgccggttcaagtgggaaggtgtggagggggacaggcggggcaagcggacggaaggcccttaaaatgggagatacagaaccccctcacgtggtcgcacgcgccccaggacacccggaatgtccgagttacaagcgccctcctcccagtgcacgcacgcgctcgcactctctcccattcattgccaggcgctcacgcgcacactttcttcggatccgcacgcccctcccgcccctggtccagatgccgctggcctgacggaggaagctccactccctgcccccgcgcccacgagacaggcgggagtcgtggacgctcagtccgggacaggcaggggcagctggtgtctggggagaaaggcagctgcgccccaggtcccagtctgtcccctcctcctccccctgccccgcccttccctgggacccccagcccagactctcccgagccttcacactgcagtggaattcccccagccgtgccccccacctggcgggggagggggaggggagcaggcccaggcaggcgtggggggaaattccccgccccctccccctgggcccgactcctccgagtcctctgatctcccagcgccacccgcccgctgcccccagggcttggggggaggccagcgcaggtgcgtgggagggcggaggcgggggccgggggaaggaactggtgggggccgggcgcccagagcggccccgccccgcccagacctctttgcccctcagtccagcctgcccagcccgcaccaggccctcgccaagctgtcgagcccaggccgaccagtccccgccctgcagcccccacaccgtctctgccccggtgtcgatggagaagaaagatggggttcagggaggttctgtcaggcccaggcacccactgcggtgctgggacccgcgaggatcttccagctggcgcctcacgcgagtgtgctctggaggaggggcgtggagccgaggtgggggcatttgaaggagatggacttgctgagactctaggccagggtcctggtcgcctcctccgggagccctctcagaggccaggctggcccggctcactgagccctgagctggggcctccagcacccacgggctccctggaacccaactgcgcttcccgacgagggagcatccgggaccacctgtctgcccggtttctcttggcgggggctcagtgaagtcctcccgggctccagtccacagaggatgtcctaggggcaggcctgcacaatggcggtgcgtggggagcttcacccccacagccacagccatctgaggatggggcaaggtggcgacagggacaattaaggactctgtgcggaaagggggccggcttgggacgctggtggaggaatcagccccttcccttgagagagtagggtctgaaagaaccgtccctctgtccctggcactgtgacacccggttcggttggcccaggcctgtctcctccagagggggcagggggtgagaggaagtgggtgctcagtgctgaggctggggcactgagatggagtggggtggagtatccctgcggcaaacttcagtctcaggtcactcacggaaacttccagaactaagaagcccaccccccaccacttccccagcatttggcactcagggctctgcaagcagcggcatgtctgccctcctgacgccctgcgagaggggacaggctcatctccccattctgcagatggggcgcagaggtggtaactgggtgactcgtgggcgtcaccagctattaagcgttggaact

SEQ ID NO: 1243029 - DNA, 4001 bp, Homo sapiens
gtgtggtggcatgcgcctgtggtctcagctacttgggaggctgaggccgagtagcctacttgggaggatcactggagcccaggagttcaaggctgcagcgagctacaatggcaccactgcactccagcctatccctaaaaaaatttaaaaataaaaacaaatgcctgactcactggagaaggcactgtctcggatgccaggggtgctgagtgcaggagctgatggggcagcagtgctagtggccggggtgctgtcaggaagcaccaccctgaaaggaagtgaaaagggccggtgagcaaggggggacgcacagcctcagccctcacctcccacctcccacctggccactcacaggtagcctgggttgtgatagtcgtcctcatcctcatccgcatcctcacaggctggttctgggggtaacgacacaggggtcagcctagtccaggacggaccccagactccccacccagcctgggcacctcggatcccagacgcaccctcgttctcgtagctcgccacactgttggcttcaaagagagggtgagagggagactaagtcagctcaggccaggcctatcttcttcccagcccccgccgcctgaacccttccccacacttaccaccatcagaatcccgccgggaagatggcgtccggtgggagcccccaaggggctgcggggatcttctgggagtcaaaggtcaggggtcatgcctgaggtggggctcagggggcaacagcagttgcaaaagggaaaggggcccccaatccaaaaaagtgaaggggtagagagtggagtttggagggggaggggctgagctttggaggggcaggggctgagcagctactcacgggatggggagcaggtctggctggctcaggggtgggtaggaggtgacaggtgggtaggcaggtggccagggggcaaccgtgtctgaggacacagaaccaagttgaaagaaggactccggacatcgtcaaggcctcaaagaacagactaagcccctgaaagccccacaccctggacaggcctgggggagccatctcccctctcccagctcaggtcaaggccatgtgggcagccccaaggtggcaggggaagtctgaaggttcacgctcactcccacaccaggggaccctctccctggcacccaaggtaggggaccctccttgtactcacgaggccgtttgaactggatgccccttggatacaaactggtaaaggagacacagcttggggatggggctggaagatggaggatggaagccccagccctgccccgccatggggtgtggagggagacccagggcggctggggcggactcacctatctgaggatgtgctgtcgtaggagcctgggaaagagagggctggtgaggcaggaacagggggtgcttagggcagaaggtgctgggatccagggactctcagaggcgctgggatcaggacggaggcagggacagagccaggacagacacaggggctgggagtggatgaggatcccgtcggtgtccctgggccctgggtacccccaccagtttcccactcacctggcagtctgtggcagtgcacacacagtgccatcaacatggccaggatgggcagcagcaggagccccagcacgcaggggaccaggatggcctcctccatctgcaggggagctcggagcaggctggctgcacccctaggcccctcaagggcagagtcaaggccagatgaagatggggtgaggaccggacccggcagggagcagggggcaggtaggcaccaggtggcaggggagcccgggaggaggcagctgtgccctccccggggctcccgggatgggtcccctcttttactgggctgagtgtgcgtccagctgactgtggaaagtccctgctcccagggtggtcagaccagggcctgggctgaagtcgggggatccagttacccctgcgtcccagccctacctgcccctcctcggcgcccgcctctccgtgcccgccctcccgcccgcctgcggcaggaagctgtggtgagcgccgggcgagggcaggaaatcatcaagctctcagccggctgcacccgcccccttcccaccccacccgccagtggggagggggcaggaggaggcccgggagccaccccaggcactcaccaagggtctgctggccccccccaagacggggacagccacctgccagctggcagccgtggcctccatatccaggacccggggaggcagcgagcagggaggccctgacagtgggaattctggggtacaaagggcagtgcccacccccacctcagccaggcctgtgaggcaagggacaggctccagggaagcaggggcgtgactcacggtcacactcagccagctcactcggagaagagcagtcccccatctcagtcgcccagcccagaagggcagagactcacccagagccctgaggaatgacccacagtcttcaggagccctggggtgaagacggggtgcaagatcagaggccacccagagaaagacgagagcaggcacctggggtctggctacaaattttattccgttacaaatagcaccgagcccttggggctgcccctgtggagagggatccccctcctggacccccacctcctcccctgagctacccaggtagtgtctgggagctggcacacggcccagggtccctctggaagctgggccaggccaaggggttaggcccaggcccttcgtggggtgggcccagggccagctgtggcagatgtgcaggtaggtgagcggcagcctctcagatgagcacactggccacgggcacgcgggtggagcggccccgctggggcaccacaatccggtcgtctgtggaccctgcttcgtgcagcaggcctgaggggggagggtcagagccagggtgagctggatggacagacagacaaagccagagaagggcaaacaggcagcgggaaatggatggggcagccacagagccaccccaggggtggatgcagacagactggaggccaaacaaggggagggctgtggactgagctgccaggtgcacaggagtgggcagacagatggacagacagacaggcagatcaagaagctgggccgggcacagctcctaactgaccctgcacgtgcagctgtgcccgccggcggtcggcctcaatgaagatggcggtgcccaggaaggctgcgccgcccagtgccccaacaaacgcgcagagcatgagcgagaactgcagagcccggaactcggacaagaaggaggggggccagttccggcgcaggcggtcagagatctgcagggagaggagacaggaaagccaggggagtcagcctcatggatgaaccagggagggcacgcccctgagctccagggagaaagacaagtggagcccaggaaagggaaggaggtttgagctagatgcagtggctcatgcctatcatcccagctactcaggaggctgaggtgggaggatcgcttgagcccaggaggtcgaggctgcagtgagccatgatcgtgccactacactgcagcctgggcaacagagtgaggtcttgtctcaggaagaaaagaaaagagaaaagaaaggaggagtttggaccaccagggtgaggtccctggccttactggtagaaatattcaaagacaaaatctttctcctccagttgacaatggaaggtgagaagtgcccagcacgcaggacacagacacttcactagggccaggccttctgatccagcccaggctcaggacaccagccaccccatgccagccaagaaataatgctcaccaggccaatgaggtaggggctcccagcatcacccagcaggtgggacagcacgatctggaaggcctcggcggtggagcgtcgggtagggatcaccacgtactgtggaggagttggtggagctcagtggatgctctgggctccagggggcaggaggcagggggccaggagaccaccaaggatccgcctaggccggggtcagaggtgtgcctggggttgaggtcgcag

SEQ ID NO: 1243030 - DNA, 4001 bp, Homo sapiens
ggccggggtgctgtcaggaagcaccaccctgaaaggaagtgaaaagggccggtgagcaaggggggacgcacagcctcagccctcacctcccacctcccacctggccactcacaggtagcctgggttgtgatagtcgtcctcatcctcatccgcatcctcacaggctggttctgggggtaacgacacaggggtcagcctagtccaggacggaccccagactccccacccagcctgggcacctcggatcccagacgcaccctcgttctcgtagctcgccacactgttggcttcaaagagagggtgagagggagactaagtcagctcaggccaggcctatcttcttcccagcccccgccgcctgaacccttccccacacttaccaccatcagaatcccgccgggaagatggcgtccggtgggagcccccaaggggctgcggggatcttctgggagtcaaaggtcaggggtcatgcctgaggtggggctcagggggcaacagcagttgcaaaagggaaaggggcccccaatccaaaaaagtgaaggggtagagagtggagtttggagggggaggggctgagctttggaggggcaggggctgagcagctactcacgggatggggagcaggtctggctggctcaggggtgggtaggaggtgacaggtgggtaggcaggtggccagggggcaaccgtgtctgaggacacagaaccaagttgaaagaaggactccggacatcgtcaaggcctcaaagaacagactaagcccctgaaagccccacaccctggacaggcctgggggagccatctcccctctcccagctcaggtcaaggccatgtgggcagccccaaggtggcaggggaagtctgaaggttcacgctcactcccacaccaggggaccctctccctggcacccaaggtaggggaccctccttgtactcacgaggccgtttgaactggatgccccttggatacaaactggtaaaggagacacagcttggggatggggctggaagatggaggatggaagccccagccctgccccgccatggggtgtggagggagacccagggcggctggggcggactcacctatctgaggatgtgctgtcgtaggagcctgggaaagagagggctggtgaggcaggaacagggggtgcttagggcagaaggtgctgggatccagggactctcagaggcgctgggatcaggacggaggcagggacagagccaggacagacacaggggctgggagtggatgaggatcccgtcggtgtccctgggccctgggtacccccaccagtttcccactcacctggcagtctgtggcagtgcacacacagtgccatcaacatggccaggatgggcagcagcaggagccccagcacgcaggggaccaggatggcctcctccatctgcaggggagctcggagcaggctggctgcacccctaggcccctcaagggcagagtcaaggccagatgaagatggggtgaggaccggacccggcagggagcagggggcaggtaggcaccaggtggcaggggagcccgggaggaggcagctgtgccctccccggggctcccgggatgggtcccctcttttactgggctgagtgtgcgtccagctgactgtggaaagtccctgctcccagggtggtcagaccagggcctgggctgaagtcgggggatccagttacccctgcgtcccagccctacctgcccctcctcggcgcccgcctctccgtgcccgccctcccgcccgcctgcggcaggaagctgtggtgagcgccgggcgagggcaggaaatcatcaagctctcagccggctgcacccgcccccttcccaccccacccgccagtggggagggggcaggaggaggcccgggagccaccccaggcactcaccaagggtctgctggccccccccaagacggggacagccacctgccagctggcagccgtggcctccatatccaggacccggggaggcagcgagcagggaggccctgacagtgggaattctggggtacaaagggcagtgcccacccccacctcagccaggcctgtgaggcaagggacaggctccagggaagcaggggcgtgactcacggtcacactcagccagctcactcggagaagagcagtcccccatctcagtcgcccagcccagaagggcagagactcacccagagccctgaggaatgacccacagtcttcaggagccctggggtgaagacggggtgcaagatcagaggccacccagagaaagacgagagcaggcacctggggtctggctacaaattttattccgttacaaatagcaccgagcccttggggctgcccctgtggagagggatccccctcctggacccccacctcctcccctgagctacccaggtagtgtctgggagctggcacacggcccagggtccctctggaagctgggccaggccaaggggttaggcccaggcccttcgtggggtgggcccagggccagctgtggcagatgtgcaggtaggtgagcggcagcctctcagatgagcacactggccacgggcacgcgggtggagcggccccgctggggcaccacaatccggtcgtctgtggaccctgcttcgtgcagcaggcctgaggggggagggtcagagccagggtgagctggatggacagacagacaaagccagagaagggcaaacaggcagcgggaaatggatggggcagccacagagccaccccaggggtggatgcagacagactggaggccaaacaaggggagggctgtggactgagctgccaggtgcacaggagtgggcagacagatggacagacagacaggcagatcaagaagctgggccgggcacagctcctaactgaccctgcacgtgcagctgtgcccgccggcggtcggcctcaatgaagatggcggtgcccaggaaggctgcgccgcccagtgccccaacaaacgcgcagagcatgagcgagaactgcagagcccggaactcggacaagaaggaggggggccagttccggcgcaggcggtcagagatctgcagggagaggagacaggaaagccaggggagtcagcctcatggatgaaccagggagggcacgcccctgagctccagggagaaagacaagtggagcccaggaaagggaaggaggtttgagctagatgcagtggctcatgcctatcatcccagctactcaggaggctgaggtgggaggatcgcttgagcccaggaggtcgaggctgcagtgagccatgatcgtgccactacactgcagcctgggcaacagagtgaggtcttgtctcaggaagaaaagaaaagagaaaagaaaggaggagtttggaccaccagggtgaggtccctggccttactggtagaaatattcaaagacaaaatctttctcctccagttgacaatggaaggtgagaagtgcccagcacgcaggacacagacacttcactagggccaggccttctgatccagcccaggctcaggacaccagccaccccatgccagccaagaaataatgctcaccaggccaatgaggtaggggctcccagcatcacccagcaggtgggacagcacgatctggaaggcctcggcggtggagcgtcgggtagggatcaccacgtactgtggaggagttggtggagctcagtggatgctctgggctccagggggcaggaggcagggggccaggagaccaccaaggatccgcctaggccggggtcagaggtgtgcctggggttgaggtcgcagggcaggccgggggtctgctacagatgttatttattgcagaaggtaggttgaggctgggctttgaggggtagaggcaacactcctgaccccaactctgctctcatcagcctctgcgctgaccctggagctgcccagcaactcaccagcagaatgtcggccacgatggcccagttcatggacaggagggtctctccaatgaagatgaaaatctgggggaagagagggtcgggggttcatgac

SEQ ID NO: 1243031 - DNA, 4001 bp, Homo sapiens
gcagatagctgggattcactttctgtgttcactgcccctttgccatcactgacacagactctggaaggagccaccctaattgctcaggccagggtcactgctctgggggccagtgacagcaagcatgccagcccaggagtggtagatagcacccctagaggccactgtgagcaggagccgcaatgaaggcaggcccaggatcagcttggtctcacccatcgctggacctaagtgttcgaggccttctcacctgaggccaagaccagcatgggcttgatggagccaccccagggagccccaagagagatgaagccatcaataaagcggtccttccaggcctggggctggcgcagcaggaaatagagcaagtgtagacagccgaggctgtggccaatgaggaagacaggcttcccataggcagcgtgcatctcctccaccagccctgcgagcttgcggtagtactcctcctgctggcctgcagcgggtggaaggggtcagggcagctggggtctggggcacctgccccaccccaagccggtcatccgcagagacactcaccgggctccagccgccagtcatagggggcggcgcgcacagtctcgtcccgcacgtagccattgttgaccaggttctgcaccagtgtgtgcaggtaccctgtggggggaccagcagcaccgggggcttgggccatgcctgctgtgggccagcacccaggcctggagccccagccctgccctctgacacaaacctgccagcttgctgctgtccaggtactccacagagtaggtcttgccaaagccagggacgcggatctggacaccaggggcgttggacacgagcccagagctccggttgtagacaaccctgcggggcgggggtgccactcagcagccagtagccaaggggcagcgtgttggggctagggtggagcacatggctgtacctggtgttatcgatccagcagtctaccccaaggggtaggaacatgttgagatccagccagatggtgaagaagtcctctgtcttgcggtagcacatccagttcaccacatctggtttgtccagcttggcttctagctgattccccaggcagccgggcactgtgagcagcagccctcactctggactctggattccccccgtgacccttacccccgtcaccccagatgctgcagtgaccagacccaccccccacctcccataccctcaacccccaggtacaaagcacacttaccctcccctgcttacaccccctctccctgctgtccccccagtagccaaagcccaggcttccctgaggaagggaaggcgctgaggtgctgaggccaaggccgctgacccctgcctctgcagagcaaacacccagtctggcgctcctttattgccaaagtccaaggtgggaacagataggtctgggggcatgggggctgggcctaataggggccgggcatggatgggcctctcctgctcaccgatcctgggctgggcatcttgtccttggtgggtgggggccaaggaaggagtggtggggcttggcccagagtctggtgtggctgtgactgaccacagcttgtgatgccccagccaagacctcaggcacaccccgtcccccactccgccccccctgggttagacaactgagagtcacagtgtggtgggagaagggacgtcattcctctaagggacaagcttttggcccctccccacaccagggcaggtacttatgtcggggcttatgcagggcagaagggctttggccaggtcagctgccaggggctggggcccaggctccccagggtctggcgtggtgcatcaggggcctggtgggggcttaccgaggatgacgggccgtgtgtggttactgagctcagccttgggcgtggtgtgcggggggaagagcacattgaggagccagaagggggcggcaggagggagcagcagccccagcagcagcgtcacccactgccatggggagccgggcggccccattccagccctggtgcctactgccagagaaagcggcactgggctgtccttatctggtgtgggagtgggaggggccctagggccagtgggagggacggcctggccagtgggggttgtggccagagattgccggaaaggggcacagcctcagggagccggctctgggcctgggttcagttccgccttcttctcttggcgccaggggaaacagagccggggcagcaggaggcccagaactacacaatgttttattgaaaaagtcaggcctcagctcagctgtctccattcggctcagcttggtggggggccctgcccatagtagactgagccagatcttcctgcaggcagctgggctggactccctccctggctacccttcccttcgtctctgatggtgacatccaaacaataaatatgcaataaatagcgctcctgggctgggccgggccggctgccttcaaaccccactcggcccctaccagtcttctctggccaggacaggcctactggggtgctagatagtaaagtccccaaacatcccagggtcccacaagacctgggatccatctccattttgaggcccaggcctggtttccaaggagacctagcaaagctgggtccaggacagggccaggcaagcagggctggcaggtgggtgctgggaagaggctgttaccccagaccacagcttgttatgtcctggccaagacctcgactccaggccacaagatgacactgggctcaggagtagatggtgatgacttcacggccaccaccgcgcaccaacagcacccgctcaaggccctcggtcagcacctcgaggaactccatgtctgcagggcctcaagtcaaggaggcaacaacagaatcaacgggcaacccgggccacctgggccatgcccacccaggggtgcccaggagagaagccgctggcttgacctcccatgctatccacctcccaactgcctgcctctccacaaagggatacagttctcgtcgccctcactgttcctgggtgggccaggcatgtttaggagaaccaggcgggcgtcgtgggagcgcgtgacaatgacttcattgagcttcacagcagtgtgcatgcgccgcacattggattggtccctacacgtagtgtagccagtcacaggtcgccatgagccatcctgcaaggagggtccccacccctggcccatctaacactacttgtctgccccaccccacctccacccctagattccagtgccgctggggctgtttttgctgcactcacggcttaatgtgcaccagctcccggaaattgtcaggggcatggctggggtcccaggtctcagtcatgtacttgtccctggtccacgtcatctggatcttgtcagcccccactgcagactcatcttcctcgtccgagtacaggctctccagccgcagggccgagtgccgatccttgaccagctgggcctgaggacaattgcaggagatagccttggtcccataggaaaagggggatggggcctgtctggcccaatgtgaccaccttgcctccgggaaatgagcactagcttgggtagggctgcggtgagtcattctgattcctccgcacccaccgatgcggtctccaaaggcctgaccctgccacccgccctggcgtgaaccacaaagggcactgacttctcgctcccgctcagtcttggtcagtctcatctgccgcagcatctgcgaccgctgctccatcatcagcgtccgctcgtaggtgtatgcagagatgtcactgttatgctggggacagggttggccgtgaggacccagctgcacgggacatggtatccacggggccagggcagggcagagggctcaccatctccaccacctccacctcggcctcaaggcgcagatggtacagaaagacagccaggtccttcttcatctggatgctgttgtcatccatctgggccactgtgaagatgcgcatccggcacttcctccagacctgaggcaagggaccaggtgggcggtttggt

SEQ ID NO: 1243032 - DNA, 4001 bp, Homo sapiens
caggtggaagttaccaggagccaagacagctgtggccaatagcaactgaaagccacagaagaaaaagctgagtataatccactcaaattcacaaatttcataagggactctctctaagactttaatacttgtgtatttattaatttaatcaatcaccacttacatggactacatgccagacactgctccaagtgctctactaatattaaatatcatttttgtccacacccacctatgatgcgttattatactccccattttacagatcaggaaactgagccacagaaaagtttagtaatttccccgactttatactgccagtaagtggcaacgctcagtttgacagagtctagctccagaatccatgctctgaaagtttagtccccaagaacctataaaaagtgcaaggtttaatccaacacactggttttccccactctacaatcactacgtggcctcagcctccttctcccacctttaaagcattttttgagttcctctaacagttcacactcctctgaacactctcctacaactttcctatttttcaagccttttcttctcacttttttttttttttttttttgagacatagtctcgcactctcatccaggttggagtgcaatagcgtgatcttggctcactgcaacctctgcctcccgggttcaaatgattctccggcctcagcctcccgagtagctgggattacaggcgcccgccaccacacccagctaatatttgtatttttagtagagatggggtttcaccatgttggccaggatggtctcgaactcctgacctcgtgatctgcccacctcggcctcccaaagtgctgggattacaggcgtgaaccaccgcgcccaaactcttctcaccttaaacatcactgacaaaattacaaactctaatggcactgccgtatttgtcagcactcaacacaaaaaaatcataattatatatttcataggtaattatttgcttcctgtctctcttttccaacaaagctgtgagttccagtatgtctgacaccatgtctgtcttgttcttggtgtatttccaccatcgaattcctactaaccactgcaaagtaaaggcctggcacaaagtaaggtctcaaaaaattttgttgaatgaaagaataaatggtggacattcaagcctcaagctttctctttctctgacacgtacctctgctggctacgcccccatccccaccaccacacccttaacagtggagacttagtgcggtactggctctgcaaagagatattacttggctctgggtgggttatttcccctcgtcatcctgagtttcaggtgcacaacagggatcacaccaaccccctaaagaatgcaacctacaaaagagagagaacctacacctctcatcctcgtaacccatcgaggctggagctactatttgcttcatgtctgtctttccagcagcgtttagctccaagaagcccaaggcctcgtctgtctggctcaggggcctgctcccatcgacgatacccaggctggccccctgcctggctcacagcaaaagctcagaaacgattcgttaaataaatgaagccctgctccgtgcacttcacaggtgggaagcgagggtcgtgcgaggcgggggctgcatccctgccagccttgagcgtattcttcagatgcaggcccacctcccacctaggcccgcgccccagatgccggccccgaaccccgcgcccgacaggcacctcttgcacagggaagcatcttcgcaggtgccgcgcacgccctcgtcgtctgcgtcgcagctcgaggtggaacagcaggaggtgatagaggattccctctgcctagtggccatgggcgtggaggttcctgggagctgtgtccgccagggacatggaagcggggtcgacgggcggcgggggacggcgcgagccacagggagaaagcaacagaagagggtagggccctacctggctcagctggcgcggctcagtgacgccgcccacgccggctaccccagcaacctctccgcttattggctcctcttccgagtcgctcattgagcaattctcctgcccgctcagcctacgaagttgctcattggataattattttggcaccgcccacataacccggaaatttgacgataggaaaaagaaactaaacagtaggagagtatcgcaatcctttctgggaagcgtagtcttaggtgtctggagaagtcgcccggtttctgcttgctggtcgcgaaattttatagctataattaactcagggcggaacagctagcagaatcctcagcgttcgggcaaagggcagagaatccagccagaagcaacatgtgtaagttgttacattcagtccgggctcagtgtcattcaattttacaaaattttgttgtgtgctgactctgccagcgactgtgctgagggctttgcccccaaaattgccttcgaaatgtagtgaggggggcgggcgtagtggctcactcctgtaatcccaccactgtgggaagccgaggcgggccgatcacctgaggtcaggagttcgagaccagcctggccaacatggtgaaacaccgttgttactaaaagtacaaaaattagccgggcgtggtggcggccgccttagtcctggctactcaggaggctgaggcaggagaatcgcttgaacccgggaggcggaggttgcagtaagcccatgtggcgccactgcattccgtcctgagcgacagagcgagactccgtctcaaaaaaataaataaacaaataaataaaagaaagaaagaaaagaaatgtagtgagggaagtagtgtgtggaaaagtaatacaataggaagccatgtagcagcgatcataaatgaactagagctaccaggtagcagcatcaatggctgaatctcagaaacacgatgttcagtgaaagaaggaagtctaacaacacttttgtaaagttcaaaccaagtaaaactaatgttgtttagagaaacgtacatatatggtaaaatactgtacagagaaggcaagacatgagaaaaaaaaataaaaaagaatcaggatattggtgatctttagggagccgggagggtagcacacaagagggggagggagaggcagggaaggagcacatagacacatcctcagtttctcacgtgggagtgggttcacgtgtgtctgtttcattatgaggcatattcaagatgttttggatttattttgtactaaatctagtacaaaatatatgtataaattcaagatgtactggggaagtcgcctggtttcttgctggtgatgaaattttatagctataattaactcagggcagaacaactagcagaatcctcagtgttcgggcgattggcagagaatccagccagaagcaacccttgtaagttgtatatgtataataatgtttaatatacattataaattaaaaatgtctttgtatattccattttgttatctgtcagttgttggaagcaggaaacagatatactttaagaactttgaattgcactcatttttttaaaaagaaaatcaacaacagaaacccagaatacacaccttggagtgaggtcaaatatcaaatgctagctcagtattctaatggaggcacaagatctcattgatagccacagtagaaatgacaagaggggaatgactaagggtggagagctttgccagggggaatgctgatgggatgaaatacaccattttcttggagtggtcctttgccaaaagggtaatacaaactattgcacaagcatcatctcccagcttagcagtgtccacattccacgggtgttagtggatagtaagtgttaacagcaagtactatacggtgttaatcccacaggtctggacagtgagactgggggtgactggaagaaggcggaggcagatgggtttatacacttttgttgttggatgagcctttgattcaaaatagctggtgattcagaggaatttggccatcttccagctgacctccagggccagctcattccatgtaag

SEQ ID NO: 1243033 - DNA, 4001 bp, Homo sapiens
cagccctgctcccacggtgccctcagggtcccaggaaaggttcgcgagtcctacccacgggaaaccagaggccgctgtcccgcaggtgggcgttgagggctttgcgggtgacacctggctccaccaccacagagaagtcctcctggttcagctccaggattcggtccatatgcgtcaggttaacgcagacgccgccctggttggggcaggtgctaagaccactgcagacctgggtctctgacctggccacgtccccggaccacaccccgcgggtgtccccccagcagccagaccagacccccagaggcaggcagcccacgggcgggagcagacccaaggtgccgtgtgtggcgggggaggcagccacaggtgtgccaaggtgtgctgggaccatcctcgggccgggcgagggagccccactgtacctgcacagcacagacgccaccctcaagcccggtgccggtgccgaatgggatgatgggcacaccttggcgatagcacagggctgccagccggctgacctgctccacgttctggggccacaccacagcatcaggaggttcgcacctagaaccagaccctcagcgatttagcggggcgtgacaccctctggtcccgaggtgttgcagggcctgaggctacagcaagcgaggggcagagaacatgccagagcaccccaaaacagatgagtgaggaggaaggcaacccagcaccctctctctcagctggggttgaatccagaagacaggggaggggcccgcgaaccctcccatacctgtgcaccgactcatcgcgcccgtgctgctctcggaccaccgcggcagtggacacgtgggagccgcccaccacggccttcagagcctctacgaagtccctgcagagctctccctgcagggaagaaacacactgccagggtcccccgaaagacacatggggccacagccctgccccagtgtcggggggagggctgggggctggaggctggagtgagcctcccctgcgcccgccccgctgacaacatccttgccaggtgggcccactttaaacaaacccactatccagaaatgcctcttttccaaacagagccattgggggtcaaagtttcccctcagaaaaaaacgccaccagaatttttttaatgttttcttttttaataaaaacagggtcttactatgttgcccaggatggtttcaaactcctgggctcaagcgatccacctgcctcggcctcccaaagtgctggggttacaggcgtgagccacagcgcccagccatccaaataaaaaaccagaattcactctccaaaaaggctatcagcagggttccttcaatagccagcccagcctgagcaaccgaaaagatccctcacttcctcctttctccagggccaaccaagcaccaccccagccacagggaactcagagcttgataagggaattagggggaggaaaagcttccactgccccctccccactctacgttgcctggggcttctgggcccttcgtggggggcggggcgcggcggggcgggggatgtgtttcttcccattttacagatgagaaatggaggccaagttaaggacagagcctggcctggaacccaggccctttccttcagggccttcttccacaggtgtgttttattccaggggcatccatttgactcccccagccccactcatggtagcagtggggactcagctgatctcactctacacccacccacagttgccacagggtaagcccagtgcccttttgcccaaggtcaggtcacttggtgctggggcgtcacagagcccaggaaacttgggatcagaaccccctgctccccgctccccacctcatccctccagaggacttctcttctctcccggtacctttgccttctgggagcagtagcccctccaggggaacagctcccaggttgcagacctgagcagtcgggccatagccaggcactggccagagggtgtgagcactgggtggcagggtgaccagtcagctactgtggcagcagctactgctgctgtcagcccattggctaggccaggggtggggcctgcttaaggtggcacgggctttaaggtggcccttgcagatcttgcagacattttcgtgggctccagggacgacacttctaaaggagaggcgaggttcactggacgttttgggaaactgtaaggcaaaaataaaattctaagcctcccaaccgactgaatggacctccctctcagcccagggcattccaaaataaacctgaaaaattaattcaggctgtgatgggaagaggtttaggacaagcctcattatccccctccttcctttagaattcagacacaactgaccagcattaacattaaaacagagaccttaaggcattctgatcttaagacacaaaacagactctttgtagcaataagataccaaattccaacctgactctagcatcacctgacagatagcaggccctgaaagaaatcaatgtattttacccccaaaatatattcctctgattttttttttaaatagctccaaaaagctgtcttttgtggggaaaatctagaatctgtagagaatcccctcccctttccaggttttttgttttgttttgttttgttttgagacagagtcactctgtggcccaggctggagtgcagtagcgtgctgcaacctccacccactgggttcaagcgattctcctgcctcagcctcccaagtagctgggattacaggtgcctgccactgtgcccagataatttttctatttttagtagagacagggtttcaccatcttggccaggctggtcttgaactcctgacctcgtgatccacctgccttggcctcccaaagtgctgggattacaggcatgagccaccgcgtccagcctctttccaggttttatcctgatctaagggagatttaactaagagtctggcaccttttaacgccttagacatttaccatctatgttacataataagaaccttgggccgggtgcagcggctcacatctgtaatgccagcactttgggaggccaaagtgggaggatcacgaggtcaagagatagagaccctcttggccaacatggtgaaaccccgtttctactaaaaatacaaaaattagctgggcatggtggtacacgcctgtagtctcagctacttgggaggctgaggcaggagaatcgcttgaacccaggaggtggaggttgcagtgagctgagatcgcaccacggcactccagcctggcgacagagcgagactctgtctcaaaaaaaaagaaccttggtctccacaactccttatcttaacccagatgcttatttctattgattccaggttgtcttttttaaaattttttatttaaaaaaaattttgttgttgtataccaagattccaagtctttggataataacttctttcaaccaattgaaaatcagaaatttttttttttttttgagatggagtctcactctgttgctcaggcagtggcgtgatctcagctcactacaacctccatctcctgggttcaagctgttctcatgcctcagcctcccaagtagctgggattacaggagtgccaccatgcccagctaatttttgtatttttaatagagacagggtttcaccatgttggtccaggctggtctcgaactcctgacctcaagtgatccacccgccttggctccccaaaatgctgggattacaagtgtgagccaccgtgcccagcgccaatcagaaaagtctttgaattcacctatgacctgtaagctcctccctcaatcagaaggaaccaatgcataccctgcttatattgattactgtctgatgcctccctaaactgtataaaaccagttgtaactcaactgccttgggtacatgttctcaggacctccagggaatgtgtcacaggtcatggtcttcatgtgagtggtgggaaatccatacaggtctacataaaactcaatgcttgcctcatcagaagaaagaattctactgaagagg

SEQ ID NO: 1243034 - DNA, 4001 bp, Homo sapiens
taatcccagcattttgggaggccaaggcaggtggatcactagaggtcagaagttcgaaaacagcctggccaacatggcaaaactctgtctctactaaaaatgcaaaaattacctaagcatggtggcacccaactgtaatccccgctacttgggaggttgagacactagaattgcttgaactcaggcagggggttgaggtggggtggggagggttagaggttgcagtgagccgagatcgcaccactgcactccagcctaggcgacagtgagactctgtctcaaaaaaaaaaaaaaaaaagaaagaaattgatcctacgtcttagatcaatcacccagtcacttaatctgtgaaaacattacaagatactttctcaaatgtgaataaatgcatcaattattcatgccttaaagtaacaggaaagagggagatgggcctccctcatggtagattacaattaaatgtttcttagagagtttggtgcacatttagttcccagagcaagggctggtggagaagaaagccaagtgcaatatgggtgttactctatgccaggtaaagcaagtcacacgccatctagatcctgctccaactgataaaaccaaaacactggtggaattccagataccagcctgcacttctctctgtaggcatctgggttagtcctaaataggaagtcctaaaaagagtcactctgagaaggcagggggtgagagggcagatgaagcagccaagcacacattaaggcaaatcatggctttcctaaagaggaccccaagctgggcttcagacagtctttgaaccagcaccagtgcaccaggccaaggggagggaggcatcctctttgggaagactggtaggagcttggaagaccccgtggcttccacaaactgtagatttcccagtgaccactgctcagtccaacagccagtgacatcagctccactgtcgggaagtagaaaaccagtgaaggtccaactagcctggtccctgaagcatgactggcccttccagaacatacacctttcccctatcacctcctctccctgaccccgaagagcttcgggcacaccaccaactgaccacctatccacagtgacctgcaaaccagagcggggagggtatttgcctagcttggcagggaggggcgagatccacttctgccaccagtcaccagctggtcccaccagcacctacccagcaccggcggtggacggtgagcggcgtctgggcccagagctgggtgccatcagcagtaagaggacccctgcgctcgcggggtgcccgccttaccccgcggggaggggtcaggcctaggggccacggcccgcttcgctctctgattttcacctccccagggtctcccaggggcctcgggtgtccttcccggatcttgcgcgaagtcgcgggggcagggagagaaacgcgggtacccgcgcccctagaagtcaaatgtttggcaaatagcatttgggaattcgttggggtttttttgtttgttttggttttgtttctgaacccccgggggatatttctggaaatctcaacctgagtcactagagagaatcgcgcctttttctaaaaagcccaggggccgtcctctccggggagggggacgcggcgggccgcgaagggcgctcgttcgggtgggggccggacgaccccgccacgcgcgatcgggccactctgggacgcaggagctgaacccaaccggagacgcggccgggaccagcgctgggaggccggaccccgccccggccgggcccccacgccctccgccgcgcctcgatgcccgcgacccgacccgcgccccctggcatcccaggaggccccagccaagggctcagtgcccggggcccccagcaggtgctggcgccaccggccccccgctgtctcccgctggtccccgcgccccggcgtccccgcgccgcactcaccgccgcccgcgccgcctgtcgagccgggaggtctgagctggcctctcgggcgccccgagaaaagggccgggcggcggggacgggggcgggggctggacccgccggggcggagcgcggccggcttgggcttccggcttctcccgcccccgcggcccgcacctgggccccaggcgagaccaccgccggttccccgcctcactctgatcgcccccaggctccatcccacacccggctcgctcgccaccccagagcttcccaggcttacccccgagacgcctggcgcggacctggtgtctcccccactctcctatcctgcccctgcctctcggtgccagccccacccgtccgcccccgacagcctggccctccctcctgatttgccgctcgcggctctccccactttcccccctccccgcgccgctccaccacttccaggcggcgggaccaccaacctcgaccccggacccgcgctggggcgctcccggccctctggagggcggcccttctcttcctgtaactctacagacgcgtccggacagaccaagacactctctgtgccttcgggcatgttacccatcctctctgagctcggcttcctgtctgcaaaatgggcacaatagcggtcctgtctcctaagaccgactgggagtgaactgggaagatggtaaagtttttagcacaggataggtattaggtaaggcttatcagctgcctgtccgctttgtgcccccagggtggtccgtgccgccaggtaggcctttctcagccatcactgaaagcaagctctggaaatcagtagccccatttcacatccgcccctaaatgggtgccatctgcccgtctgcttggagccccatcggccggctgcagtgataacagcagcagcctggatccagcaggctctctgggaaatcattagagggaattaagaagcatgcctggctttcagagtacacagagtcaggagatgggcagaaccatgatgtggccatccacaaacaaacgccatttggacagggagcttccgagccccatgctggcaaagacctggatcttagaaccctccggtgcccaaatcccatgcctttacccgaggtcctaaagatagtgaggcccagatagggagtgtggcttgtcccgggtccctcagcaaagtgtccccagccccaagttcttgccaccttgcgccatgtccactgacgggccaccctcagccgtggacgagttaccaagttggaagggatttcaaagttctcccaagcataggaggttcccatgtagatgttattagtgtgggcaacattttactgcttttaaaatatgaagggggcgggtgcagtggctcttgcctatagtctcaggactttgggaggccatggccagaggatctcttgagcccaggagttcaaggccaggctggacaacatagtgagactccatctctataaaaatttttttaattaaaagaataataataaagcggtggagtggtggcatgtgccagctactcaggaggctgaggtgggaggattccttgacctccggaggttgaggctgtagtgagctataatcgagccactgcactgtagcaagcaagcaacaaagaaagaaagagggaaagagggaaaagagaaagaaaaaaaaaagaaagaaaaagaagaaagaaagagaaagaaagaaagggaaaagaaagagaaggaaagaaggaagggagggagggagggagaagagaagaacaggaaattggattacacccaacctctgccattcctccattctcaggatgcaaccaaggcttgcaaaggtaccaattattatactgacattaagacagaatatcacagaccattgctagggagacataacacctagggaaaatctctcagagataacgttcaagaaacatccctgtatgaatgcttttcttccttccttcctttctgtctctccctccctcccaaccttttctccttccttccttccttccttcctcccttcctcctttcctcccttcctcgcttcctcccttccttcctgtaaaaagcagtagtaagcctgaattttct

SEQ ID NO: 1243035 - DNA, 4001 bp, Homo sapiens
ccattctcaaagtgctattatacacctctgagcagtgaggatgggtaatgtcagcaaaatatgcactgtttattttcttgaaaattaacttgggctggaaacgccttccagctccttcctctcagtggattttccatttactgtcttcaaccacctgggcttgtctgtacctcttccacagctctactgagaccctcctgtttgtctgaactatgtcctcatgttccttctgccacatgtgctcaggcctcagtttttccatgaaactttctctaacttagctgcctcctttccactgttctcaagccctttctggagttacaagggcattagcaagcaccagctttttcgccggtgtgtgtttctactttctacccattgcgtaaacccctcaggaccaggagccattcttctgcatcctttacacggcaagggtagcgctttatttctcaacagcccgcccataaaaggaacggaagtaacaaagggaaatgtattccccaaagacagtgaattacacttcaatctactattttagagacttaagaaatgggccgggtgaggtagttcacacctgtaatcccagcattttgggaggccaaggcaggtggatcactagaggtcagaagttcgaaaacagcctggccaacatggcaaaactctgtctctactaaaaatgcaaaaattacctaagcatggtggcacccaactgtaatccccgctacttgggaggttgagacactagaattgcttgaactcaggcagggggttgaggtggggtggggagggttagaggttgcagtgagccgagatcgcaccactgcactccagcctaggcgacagtgagactctgtctcaaaaaaaaaaaaaaaaaagaaagaaattgatcctacgtcttagatcaatcacccagtcacttaatctgtgaaaacattacaagatactttctcaaatgtgaataaatgcatcaattattcatgccttaaagtaacaggaaagagggagatgggcctccctcatggtagattacaattaaatgtttcttagagagtttggtgcacatttagttcccagagcaagggctggtggagaagaaagccaagtgcaatatgggtgttactctatgccaggtaaagcaagtcacacgccatctagatcctgctccaactgataaaaccaaaacactggtggaattccagataccagcctgcacttctctctgtaggcatctgggttagtcctaaataggaagtcctaaaaagagtcactctgagaaggcagggggtgagagggcagatgaagcagccaagcacacattaaggcaaatcatggctttcctaaagaggaccccaagctgggcttcagacagtctttgaaccagcaccagtgcaccaggccaaggggagggaggcatcctctttgggaagactggtaggagcttggaagaccccgtggcttccacaaactgtagatttcccagtgaccactgctcagtccaacagccagtgacatcagctccactgtcgggaagtagaaaaccagtgaaggtccaactagcctggtccctgaagcatgactggcccttccagaacatacacctttcccctatcacctcctctccctgaccccgaagagcttcgggcacaccaccaactgaccacctatccacagtgacctgcaaaccagagcggggagggtatttgcctagcttggcagggaggggcgagatccacttctgccaccagtcaccagctggtcccaccagcacctacccagcaccggcggtggacggtgagcggcgtctgggcccagagctgggtgccatcagcagtaagaggacccctgcgctcgcggggtgcccgccttaccccgcggggaggggtcaggcctaggggccacggcccgcttcgctctctgattttcacctccccagggtctcccaggggcctcgggtgtccttcccggatcttgcgcgaagtcgcgggggcagggagagaaacgcgggtacccgcgcccctagaagtcaaatgtttggcaaatagcatttgggaattcgttggggtttttttgtttgttttggttttgtttctgaacccccgggggatatttctggaaatctcaacctgagtcactagagagaatcgcgcctttttctaaaaagcccaggggccgtcctctccggggagggggacgcggcgggccgcgaagggcgctcgttcgggtgggggccggacgaccccgccacgcgcgatcgggccactctgggacgcaggagctgaacccaaccggagacgcggccgggaccagcgctgggaggccggaccccgccccggccgggcccccacgccctccgccgcgcctcgatgcccgcgacccgacccgcgccccctggcatcccaggaggccccagccaagggctcagtgcccggggcccccagcaggtgctggcgccaccggccccccgctgtctcccgctggtccccgcgccccggcgtccccgcgccgcactcaccgccgcccgcgccgcctgtcgagccgggaggtctgagctggcctctcgggcgccccgagaaaagggccgggcggcggggacgggggcgggggctggacccgccggggcggagcgcggccggcttgggcttccggcttctcccgcccccgcggcccgcacctgggccccaggcgagaccaccgccggttccccgcctcactctgatcgcccccaggctccatcccacacccggctcgctcgccaccccagagcttcccaggcttacccccgagacgcctggcgcggacctggtgtctcccccactctcctatcctgcccctgcctctcggtgccagccccacccgtccgcccccgacagcctggccctccctcctgatttgccgctcgcggctctccccactttcccccctccccgcgccgctccaccacttccaggcggcgggaccaccaacctcgaccccggacccgcgctggggcgctcccggccctctggagggcggcccttctcttcctgtaactctacagacgcgtccggacagaccaagacactctctgtgccttcgggcatgttacccatcctctctgagctcggcttcctgtctgcaaaatgggcacaatagcggtcctgtctcctaagaccgactgggagtgaactgggaagatggtaaagtttttagcacaggataggtattaggtaaggcttatcagctgcctgtccgctttgtgcccccagggtggtccgtgccgccaggtaggcctttctcagccatcactgaaagcaagctctggaaatcagtagccccatttcacatccgcccctaaatgggtgccatctgcccgtctgcttggagccccatcggccggctgcagtgataacagcagcagcctggatccagcaggctctctgggaaatcattagagggaattaagaagcatgcctggctttcagagtacacagagtcaggagatgggcagaaccatgatgtggccatccacaaacaaacgccatttggacagggagcttccgagccccatgctggcaaagacctggatcttagaaccctccggtgcccaaatcccatgcctttacccgaggtcctaaagatagtgaggcccagatagggagtgtggcttgtcccgggtccctcagcaaagtgtccccagccccaagttcttgccaccttgcgccatgtccactgacgggccaccctcagccgtggacgagttaccaagttggaagggatttcaaagttctcccaagcataggaggttcccatgtagatgttattagtgtgggcaacattttactgcttttaaaatatgaagggggcgggtgcagtggctcttgcctatagtctcaggactttgggaggccatggccagaggatctcttgagcccaggagttcaaggccaggctggacaacatagtgagactccatctctataaaaatttttttaattaaaagaataataataaagcggtggagt

SEQ ID NO: 1243036 - DNA, 4001 bp, Homo sapiens
ctgtttaatactgtggagggaaaagcaacctgggaagaactactttttaaaataattgcaggccgggcatagtggctcacgcttgtaatcccagcactttgggaggccctgaggtcagaagttcgagaccagcctggccaacatggtgaaaccctgtctctactaaaaatatttttaaaaattagtcaggcatggtggtgcgtgcctataatcccagctactcggaaggctgaggcaggagaatcgcttgaacccaggagacggaggttgcagtgggccgacatggtgccgttgcgctccagcctgggcaacagagtgagactccgtctcgaaaaaaataaataaataaaataaaatagttgctttaaagaaagagagagagagacacagacccagttgaagccgatactgcaatcccacaggaaaccttgtagtgatgagcgcgtctcatcactttgcaccaggaggtggaaagtatcacacaaatgtcacacaaaacgtcgaactgagcatcactccagcacaaccaggctaccaaacttcccgcgacgtgtgtggcacaaaggctgtgcaaagaagaacttctgcaacctgaccctttccttccacacgtgagggaagcagacgatggaaggaaagggagacgtccaatgcccacggcctacaaccaacgcgtgggcaacgcccggggccagcagctccggagccctctgggacggtgactgcccacgcgccccgctggctgcatctcggcctggcaggctcccctcacttccatactcatttgagagcctcacttgaggttcgtagctcctgacacgttgggcttatgaaacatgtatccgtgtgatcacatgtcaccgtgatcacagaaccgttctcttccaaaccagttctgggttgtagggactggggagagagggagttggaatcgccagctgcccctggccaggggatccagaggttttgagcgtgaactgacttttctcagagctctgctctgtaggctgcgcacgcgggccccgcacagctgtggggtgaagggtctccgccagtggacccggccaaccacatcccacagtgaggcgcaggcttcacttgcagatgaggttccggagctgcccccagacctccgctgggaatcttcccgaacgcagactgagctagtcgagaacactaaaggagaaactccagtctggccaccagccagtcaccttccctcagcccctgggagacgcgaaggaggctcccgggccggctcctcggattttggcaggggccgcacgcggcagggatgtggcgtgcgggcgtccagttacagtgggaaccttcaccgtcagcacagcgctgtgtcggggacagcaggagcgcctcgcctctccaggccgccccccgccccgcagccaggacgcagacccccgacctgcgcacggacgggtgaccctccacctgcccagctctcctgggaactcctgggccagggcccgggccggccccgcctcgcatagccccgagccggtcctggcaggcgcggccgtgcaacttcggggctgcgggtggaaccgggagcccaggagcccaggccggaggctcgaggcggcgacaggggtagggccgggtgcgctgtcgccagcaagccttgtcctgccctgcccgccccgccttgcccgggccccagcaggaaggagggctgcgtgggggcgccgcggccgcgagaccgcgcggaggagtctcgagggagggcgggggtcgtggtgcgcggaggtgacactggcggatgtcccgggcccgcccggcactcacagtacacgaaggctagggccttcaggagcacgatccgggtcagccagaaggtgcccgtgtggagatgggccggagagcctgcggggccacgccccggcgcgggcggcgactcaggctccggatccgagtacccagtcttccgcctcctcagcgactccgcgggcgccgccattgttgggctgtcagggcgcatgtgcggggagggcgcactcccggaggccccgcccattctcggaggccccgcccattctcggaggccccgcctctccctggccggccctgcccacggccgaaggccccacccacaccccgggaggccccgctcacagtcccggaggcaccgccccctccagccggccccgcccacgcgcgggagcgggtgcccggagcctgcctccttcgcagttctcgctgggcgctgctgcgggtagggcgcggggccgggtacctgggaggtggtgcgcgtcgcccgacccgagctcactggggcaggcacgcgtgccttccgtcagtccgagttgcagaggccaggtgccctcccccagccaggcgccttcccagctgtggtcctggggaaggtgggctgcacaggccctggcggtgctaccactgcgtgcccctgcctcacagctgacactcactctctgcggaggagggtgctagggcgatcgtcgcagccagcaagggacagagtaggcagggctgtgcctggaatgctcgggggaccctcccctttctcccagcctgagcacccttccgcctttgcacaacccagctcctgcctgcccttgggactggacttcaagctgtgggggaagagggggactcaggactcaggagggaagggctaactgcccaatgccccaaacagaacatgaaggaggacgccagcactctacactctgatgactggagcggggttctggaggctgatgtgaagcgggtgctaggaagggctggggtcacaggcattccttagaggaaagaaagggcgtgaggctagagtaggcattggagacctaggggttagtgaataaactgtggggcacttaggtggaagtgcagatttctccttattcatttgtcagcactctttacgtatgaaaaatcctgttcttttgtgtatattggaaatatttgtcctggttttttgtttttgttttcatgtattcttctcttttgcctctctagctttcctagtgttttggcgtatcaattatcgccactgggttggtcaaatgacccgtctttattgcttgtttaattacctgtttaattatatcttcaccacctgcagtgtgagccttgtgtgggcagggactgactgtggacatcgggcccccaaatccaggcctgaccagcagtggcccgagcttcctctcagcctccaccttccctgtgttgctggggccgtagcatacgtgtacatcttatggtttaattcatttttagtttccatttcttttctatgaaaccccccttaggagcccagctgtgaaatgggaccctgttaaagatgttgcaacgggtacgaacacacaaacatcctccgcatgctggcccagcctccgggagcgtggtgtgtgcctgagggctcggagccttggggatcgcaggaggcatcggccctggctggcgcccggcacccaagtccctccacagagcccacgacccgtacctctcctcgtgacctgggggccagcttaggaagggccggcacagcccacactgttcccctcatctgtggggaacagggagccccacaccctgggaccacgcctgcagagcgggccctgtctgggtgccaggcctgctaggggacggacggcgagagggactgccctgcgtcaggtgtggccctgcgctgtcctcaggtggggctgccctcacaaggaggctttgtgcacagcttcccctcgctgggccgagctgctctccccgcgaagggcacaatggggcattgtgcagagcagaaaagggcctcttgttccagcttccagcgctccgggctccggctctgcatttgcccagggtgggagcagtcagcggaagggtctgctgggagctcctgttctctctgagctcaagtttccctcagggtctgctctcttgagacgctgaccgcaggggtcccatccactgcccagaatggctccagagcaggtcaccgggggcagggcttgggccggggagaggtg

SEQ ID NO: 1243037 - DNA, 4001 bp, Homo sapiens
gcttcgcatcggacccgcccgggaggctgagcggggggagcgcgacccctgccggccacgcacggaggtggccccgggccgggccaggcgccgcgctgggggcgagcgcggggcagggggcgggggcggcggccgaaggagcgacctcccccccaactccccacctccccaccccccccacaccccccaactcccgttcagcctcccgcgcggccgccagaagccgcggttctaaagctgcgaggcccgcggccgccgactgctgcgaggtgggtgtgcgcggcctgcggagggggagagggtgggcgcaggcgggggccgccccccagagccgcgccccctccacggcgcccgcacccctcaacctcttcgctcgcccccgcctgcgcctccccgcgccgccccccgcaggaggcggcgcgcccgtcgccccctccccgcgcccctctcccctctccctgctcccggcgctccgcacagccccggcccccacggccagttcttagggcgccgccccggtggcggaggcgttgggggcggctctcggcggcggggagcccctctccaggccggcgccccggggcggagctgagcgccatgggcgccgggcgggaggcaggtggcgcagcggcggcggcggggggcaggaggcggaggcggagcgcgcggggcgggggccgcggggccccgtgagactctcgggcgagcgcgcggcgttggagccacaggcgcggcggctggacccggcgcgggccgcggaggccggagaccgccccgggcggggtgcgcgctttgttcccgcgcggggtggccggagccgagtccccggcatggcccaggcggccgccccgcgcgccccagccccgccgcgcgcctgagcccggtgcggcgccagaagacagcgcgcagccgcccctgagtcgtggaggcggggaccaagctggaaggagcagcgactcccggaccgagtcgcgagtgtgcgccgtccgccgcccgccggatcccccggaccccccgaccgtaagtgccgtgtccgccccgcgcgccgccgccgctctaccccgactccgcccgcggctgccgttcccggatctgcgccgcagccgcgccgagcgcacgggccgttttcaaagttggtgcccacggcagggtggagccaacccgcccagcgcccacccatccgggctgagcgcagccccccgtgagcagagcctgacctgcgggggctgcggcgaaacttcgaggggaacgacgcgcccgggcgctgggagtctcgcgggctcccctggggccgcccggttttcctaacaaaggccccgcggcccgcgtgacggagacccgggagtggggaggccgagggcggccctgggagaggcagaggtggcggcggccggtctggggaggggggtccagagctccctcctgctcctctccctcctgcccgggtccccggcgctgccccgcaggctaaaggtggtccgcgctgggggtcctggaccctgcctggcatgcggtccctggggtcctgacggccgcgggcctcggcacagccgggtggcagcgatggcgcgcacagcctttgggaagcgtccatctgtgttgggcaggccccgagccaggctgtgggaacagcggggagggaggtgtgagcctctgtggagggacagatggctggaaacgcagccctagacggctgacttcacttacgtggagcagaaggcggccaggctggtggcggcgactcagagccgctgggctccgaacacactgcggggctggcgctcccccgcccctgcgtccgcccgtgtgtgctggggccgcggccgggctgtgcccacccctcattcaccctgtgggctgaggccggctgacttcaggcccattccagggcccaggaagaaaaacctttcccttgaaaagagagcacgtcgcgtgctcctgtgggtgggggcttgtcggtagctgtcaggcttgtggccccagccagggtgcggcttctgtgcgtccggcccgggtgtgcgtttcctctcctggacgaggaacaggaggttcccagggcagccacctcggcggacgggtcggccggggataaggggcgggggccggtttttcggtacctggcattgcccttcaagtttctgagaggttggggaaacttcttgaggctgggactccactgtgtcccccagacctgaaggggcgagggctgggcctgagcgcgtccgaccctcacctgcccctggcatcgctttcgcggcaggggaggaggcaggaaggcccagcccacagttcctgggcacgttcttccgtggagggctggctctgtgtgcctctggggtcgggctgtgtcctttgcccccgctccagtctgggcgttgggagtcagatacttccacaggggccagacaggcggatgctgtgcaagccggagctgccgggagggtcctgttctgtgcggccgacagcaccgtgcctggaaaagccatgctatttgggaccgtcctgctgggcaagcggccactcttccacactgaaagggaaacagaaaggaagaagcgcccagagcaggaggaacagatgtggcctccacccgagattggggctcagggagggaagagagtgtcgcatcaggatcagtcttccggcaggctccatctctcctgggatgtgctgggatcctctagtgacaggggagaagggaagttcacatgagtggttcgtggtgctggggccgtgctgtcaccacctgtgaagccagggctggtgagtgggagggctttccccagacatcgccttccagaaccctctggggctacgaagccacacaccagccgcccgagcccccctgagctcttcccctgccgcccgctatctgcgtaattcagttaccacctccaggaaatctctctggtttggctccacgtattttcatttctgcatgactggaagaaattaatttttctccctacgcgaggatctggagatgctgccagcaggctgggtcactaatccccaagatcccagccctcagggctgcagtggggagggccgggcctcgccgctgccgcctctggggtggcagggagggtgtgaggtgggtgaggcatttccctgccagcttctggaaccatcttggggctctccgctggcctccccccttccctgctgcaccgttagcaggttgactttggggttttctgattcatcctcagcctcccacagtgccagggtggaaggatggtgcttgaattaagtggctctgaatttccttccctggcagggaggaaccagaagcaacttcagcgtgccccagtgccgtgtgtgccacgcgggtgttcagacccagcatggagggactagcagggccttgttattggtgccacaggtgaaggcgctggcgtctccatggggctgctctcccggcccgcacttgctgcactgcctgcctgtggcctgtgtctcctgctcacagggtcgtggagccttcctgggtgggtcttagagcctacaacagcgctggggcttacacgcactgtcgcgtccctgtaacacccacgagggccgtggagcgttccccgtctccgacgccgggagaggtacagtcactccacaggtcatgcagggagccagtctgacggcgggccgcagcgagtgtctccaggcccctgtccagccccgcccagtccctgtccagccctgcccgggcgttcctttgcctgtgctgtcggtccccatccccagcctgccgggccacattcttagagcacctgagcacccccaagggactgggggatctggtggctgagggctcggtcatgactcggggttagcactgtaggtgcaaaagccctcacctggatacaggccctggggcccatctggggtcagggcacgggtgggagaacttgacctctgccctgcctgggtcatggagccccaaggccagcctcatcccggctgctctaggtctgcacctctggccagccccacctctgcttcct

SEQ ID NO: 1243038 - DNA, 4001 bp, Homo sapiens
agcaacctctcattttaaaccacagtttctgaggctccttggccatgggtagttagcatggaagggggcttctggatgaggaaggcataggcagaatgactcaggctctatctgcagtggtgggcaggggaggtcaccgcagaagaggcattagctgtcttagacagctaaacatttgtcctttctcccaaatggctcagccagcaagcttctgtggggtcagtctcctgccacgatgctccaagcgccgaattttggggctagagcaacccaggtctttatctgactctatcgtagcttgacgtctcttgggagcacgcctgggggctggcttctctgcttcagcctttgttggggtggccaaaggagcatccccatggacccggtagccaccaaccaggcagtacgtctccccatgccagcctacctgagtttctccacaccctcggtagagaacatggtagtgcccaggtgtgggaggagaagtggcaggcactgcagctggaaagaaaaccagaattagtcacttttaccttatacattgtgctgttacagcctaccctctctcgcgactcttcctaagaagtcctttcatcttcttcgcatcccagacacagccttggcctatcacctctatgtgtccctgagacaggatgctggctgtgaaagcagttatgtggagcctgtgtcagcagcaggagaccaggagatcctcctcatcccttccatgaccaaaaatacatttcttaaggtctgtcacatctcaggctttaatggaaattattttcaagttttgtaaaaaatgatctactatcagccaggtggggtggttcacgcttataatctcagcactttgggaaactgaggagggaggatcacttgagcccaggagtaccagcctggccaacatggtgaaaccccatctctactaaaaatacaaaaaattagtcaggcatggtggcacgcacctgtagtcccagctgcttgggaggctgaggcaggagaatcgcttgaacctgggaggcggaggttgcagtgagccaagatcgcaccactgcattccagcctgggtgacagagcgagacactgtctcaaaaaagaaaaagaaaaagaaaaaaaggatctaatattgtgccactgcactccagcctgggtgacagagcgagactaaaataaaaagatctaatacaaattggtgggccaggcacagtgcctcacgcccgtaatcctagcactttgggaggctgaggtgggccgatcgcttgagctcaggagttcaagaccagcctaggcaacatggcgaaaccctgtcactactaaaaagagaaaaaattagctgggtgtggtggcgcgtgcctgtagtcccagctactagggagacgagttgggagaatcccctgagcccaggaagttgaggtttcagtgagctgtgattatgccagtgtgctccaacctggacgacagagaacctgtctcaaaaaaaaaaaaaaaaaaaaaaaaaattcagaccagccccagcaacatagcaagaccccatctcaattaaaaaaaaaaaaaaaaaaaaaagatgagaacctttctgagcacctgctcagatgacatttcacttgcccttagcaggtgaacttgccctgagcaggaacactgtgggtccctgagtggccacgccctcgatattacttatggctgggaaagctcgaggtgtggtgggccagcccagaaggaatgtgtcagccaggtgaagctgtgggtacagcaacgcctcctgtatagatgccccctgtatgcctacctgctgcgctgccctcccaggggacagaggacatgttagagacaatatagaggatccggtcagtcattctctctcagccaaccaaacagattggtatcttacagagaaatggtagggaggcttctctaggacgcaggtgtgtagtcacgctgccatggaaactttggaagcttgtgaggtcatcactaccctgtgaagtcacctaaggaatctgtgacttaaggggcaggcttcaggccttcagggttttgtggaggagagcagggcagagatagagaggaatcctgcctgggccctcccatccagccctccctacaaatgcctagtagccactctgtggggcacatctgtcggctggtacaagccccagtgaccacaggagggcaagagaaacctaaattctgatatgagctggagaggcaagattaatctaagagatagataggtagccacgcactggtgctaagcaatcaacagcaggagaggcagagattgggatggacaaagggatcatggaaggctccttcgagctggacttgaaggactggtgagatctggacacacgcaaagagtaactgcccaacgtgttccccttgccactgcctagacaaagctgatttatcaagacagggaaattgcaataaagagtaattcacgcagagctagctgtgcgggagactggagttttattactcaaatcagtctccctaagcattcagggatcagagtttttaaagataatttggtgggtggtgggcagtgagtccggaaagctgattggttgggtcagagatgaaatcatagggagtcagcttgggcgtggcagctcgtgcttgtaatcccagcactctgggaggctgaccagcctggccaacatggtgaaacccctaaaaaaacaaaaattaggctggacgcggtggctcatgcctgtaatcccagcactttcggaggccaaggtgggcggatcacgaggtcaagagatcgagaccatcctggccaatatggtgaaaccctgtctctactaaaaatacaatttagctgggtgtggtggcatgtgcctgtagtcccagctacttgggaggctgaggcagaagaatcctgaatctgggaggtgtgggttgcagtgagctgagatccagccattgcattccagcctagtgacagagcgagactctgtctcaaaaacaacaacaaaaacaaaaagttagccgggcgtggtggcgctgtctgtaaccccagctagctacctgggaggctgaagcactgaaacccaggaggcagagattgcagtgagccaagatcatgccactgcactccagcctaggcgacagagtgagactccatctcaaaggaaaaaaaaaagaaatcttaggtagtcgaaagtatcctcttgccgagtcagttcctgggtgggggagccacaagattaatctgggtggtgtcagctgatccatcaagtgcaaggtcttttttattttatttatgttttttgagacagagtctcactctgttgcccaggctggagtacagtggtgcaatgatcttgactcaccgcaacctccccttcaagggattctcgtgtctcagcctcctgagaagctgggactacaggcacctgccaccacgcccagctaatttttgtatttttagtagagacagggttttgccatgttggccagtctgctctcaaactcccccgtcctcaagggatccgcctgccttggccttccaaagtgttgggattacaggcgtgagccactgcgcccagccaatcaagtgtagggtgtgcaaaatatctcaagcactgatactatgtcatatatataatatataacatatatatgacacgtatgtatgtatatatgtacacacacacacacacacacacacacacacatatatatatattttgagacagatgcctcggcctcccaaagttctgagattacaggcatgagccaccatacccggcctaggtatataatttaaaaaaaattaaaaaattaacaaatatggaacgcttcatggatttgcatgtcatccttgcacaaggggctgtgctcatcttctctgtatagttccaattttagtatatgtgttgctgaagcgagcatgatcttaggttttatatagtgatgttatccccaagagcaatttggggactggtcagaatcttgtagcctcggccgggcacagtggctcacgcctg

SEQ ID NO: 1243039 - DNA, 4001 bp, Homo sapiens
tttccacggagcgcacaacagccggcagggctcagctggaaaaggcaggggttgccgtaaagcatccttcagacaccagcctcggaagcatggcgaaacccgactccacagaaagtacagaaattagccgggcatggtgccacgggcctgtactcccagctacttgggaggctcaagtgagcggatagcttgagcccaggaggcggaggctacagtgagctgtgatcacaccgctgcactccagcctgggcaacacagctgtctcaaacaaacaaacaaacaaacaaaagaactcttcagataaagctaaggtatctggagcatggccgtgtgctgcaggcaggccacacctcatcaccatgcggggctgtgcccagggccgacgtgggagcaagcccctggtgccacacaggactgctgcttccagctcctcctcactcccccttccccaccctccccagtgtccccctcaaggcaaacaggcctttggtgtttgatcctgtcagtcatgagtgtgttcctgtctttggaattggagctgggattgaaggttctgggagagcttcccttgaagggcttccctccccttttccaccctgctgctgacttcctgtcttcctcctcctgggcctctgaggccacgtgcctgcgtgaggggaggggctgaatcacatcccttctcaggggccttgggcaccattcgatatttaaatggtcattacacaaactagtggttggtggagttattaacttacataaggagaggagcatttgcccaggacgtacgtaaaggcctgttctatcaacatactgtggaagacaaatctgaatttgaagtgttctctttctctctgggagtcttcggagggtaatgttgtcacatctgttcagggagagagactcacccaggtgtaagggggcttggtgttttaatacaaattacagcaaacccttgaacaatacaggggttgggggcgccagcctcctgtgcagttgaaaatttgtgtagaacttttaactttccccaaacttaactaacagccttctgttgaccagagccttcctgaccacataaagccagtcacacacattttgtatgttatgtgtgttctgctcttactgttagggtagagcaaactagagacgtgaaaatactgagatcatgaggagaaaatagacttaagcctcgcgcagcagcagcgggtctccacgaatggctttcgtcctccgggttttcacgttgaggaggctgaagaggaagaggagagatgggtcttgctgtctcaggagaggcagaggtggaagaaaatctgcgtgtaagtgaacccacgcagtgcaaacccagacccaggttgttcatggtcagctctgcttacattccatccctttattgaaggtgaatttcaaccccaaagaagtctttttttttttctgtgagttttaagattagttgtgtcattacaagttttttcttatacggtccttctcaggtgttagtgtgcagaacagaacatgcttaaaatgcaggtttgggttcagaaggcccgaggggacccgtgagtctccatggtccacggactccctggtgatgccaaggcctctggcaaggagtgctcctgggcagcccctgccccgcagctgcggctccccacccggccccacagtccccgccccgcagctcccgccccacaccctgccctgcaggccccgccccacagtcccctccccacagtcccgccctgcagccccagtcctgccccgcccgacaggtgtctcagggttgtcctggcccagctcagatcctagaagccggggagaggcagcgccggattccccaccagtgcctgctcttgtcagctgaagagaccagataggctgaaattcctgggggttttgccaaactgaccttgccgtagtcagtgtaaccacttctgcatcaggcttaatcctggaggaaggctctttggtgctcgctgcatctcctgtggagcagagggaatcgcagctgggctcctgtgtgtgcggagggggagggcgcggtgcctggatggttcaggcgaaggctctgtgctcgctggcgcgtggtgggtgctgggaaacctgccctgtgccttccctgggccggtcttgacagcatctgtcacctcctgagtgctcttgaagccaccttccgggaggagcaggccatcgttgttcctgtcacgtctgtcctgccagccccgtagaaggattgtcttttgagccccattgcaggggaggtggagcccctctgggctgcaggggctctcgcagtgtggagaggcacagggcaaggacggctgttcccagcatcagctggccctggatcccagagctggccgcagacactgtccactccgctgggctgagttgtgtcttattttggcacagatgcggggctgccaggtaatgggcaagttccctgagcccacagctttggcgccgtggcttctgcttcagggagtgtgccagtggctcgtgtgggggactcccaccaccctggactctcggtgaccctgacagtccacgaagctgggacggttgccatccgccaggaggtgaagtaacaaggaatgcgtggcctgggggcggtcagggccaggtgctggccggcccctcggctctgcgtttaccttcccgcggctgtgccttgccgctcagcacagggcgtgagtcagccccagtggcctgaggcgtgtttcagtttcctgctgattcaagggtcgtgagtttaaaatagactttgcctgataacttggaaatgagggagatttaggctgcacttaaaatgagtctaggcagggacagccaagtcaccttccagggaagagtctcccccgggagtgagacccggtgccttctgttgtgtggtcggctgtgcagcatcgtgatgagaaggcacaggggctgcggaactgtctaaagaggggactcccagcttcaaggactgttttatgtgacagccctgccagggaggcctggggacatcatcacagcccccaccctcagacaacacccatgagtcagcagagcctgttggcctgactcctgagtgccgtgcagcccctggtagaagtcactgacacggctgagtaacggttcctcggccctcggctggctctgccatttcacggcaaggggtgaggctgaccagccctgagcctggtggagggaacacagggcagtgtgggggccaaaggtgccagaggcatcaccagggcagcttctgggaggactgggatggcaagtcttggaacagaacaaaagcaactggagcctctgtcctcatctggtctctcattgaaaaagactctagagtgggccgcgtgctgcacgcctggtgcctgcaggcgggtcctgggaggtgtagcctgggctagatggcagctacatccaaaccagcttcatccacatccagcagatgcttcagcaggacatctcagctgtcaccatctccatgactgtgatgagggtggtggttcatggagaggcgggggctggggttgcagggcctcgagcacatcgctgccatcggtaacatgttgtagccaaggccaggcggacacgagggtcctggaagggccacggcctggatggtcttagctgtcatcgtgcaggtggctggagaaacgtctccagaaaacacagcgtacacctgggacaacactcccgagtccccggagtgttcgctgtgatgcaggccgtgaaaagtattttgcctggtgggtgcgacccacttcctccacctcctgagtggactcccagatccctggtccattggggaaggtgcctgggcaaagcaccaagctagggacatgaagagaatcaggtgtctcaggagtgaagtgataagccccgcactgtcggggcccagacaccgtccggaggccgtggggtctgcgccctgaccacgccagagctgttgagtgtgtccgtgggccacagactcacatctgggatcaggacggtggactctacatggt

SEQ ID NO: 1243040 - DNA, 4001 bp, Homo sapiens
atatataattacatacatagatcttccctggctcccacactgtcctgtgcttcctgtattacggtactgatgaactgcattctattaattacccattttcactgtcacctctttcattagattatgggtcctctgacgacaaggaaccctgtcttattcttatttctggcactaggcccagagcactgataggtattcagtgactggtcaatgtagatagatcagatacatgaaaccattgccttatacccacccccattcccatgggaattgcactcctcaccttgatggcaaacaccagagccatgactcccaggcaagagcagccacagataatgctagtagctgccaagcagcggaggcggagccagcagcagcggatgggggatggaggatgagcagcttccgtgttgcccaagatctccactgccttctcctcgtcctccatcacctgtgggcgatagtcaaggtacttgtgagcccaacaacagagcccttggccttgcttgctcagactccacccctctcagagcattctgttctcatggcctagcctggcactcaggaatgttgccttactggggaattcctctagtgactcacagagcaggagaggaaatgtgtggctggaatccttttacctaagcttgaggttctgagtctttgaaagcaagccagtgtagacaaggcattatctgtattatttagtgtttcaacaagtgggaagaagccaaatgacaggtgcacaccgagaaggaggaaaaatacaaactcttgaaagctgctatgaatctgttattttaatctgtatttcaaaggactctacaattcccccaaattcccaagaggctgccccctgagtattatagatgtcagagagcaggaccctaggtactgcaacccgtttcaagcaaagcagccattttacatgaaaacagttatgggaatggagaaaggtaaggaaaatgtacccaagtaagccctttattaccactaaaaccaaacatcagaaagactttacttccctaagtcagggcttcctctgctatgctgcctccctgccacctcctctctccaatttaacccaggccacataacacaatcagactagtacactgagtctaaatgacctcattaccacacagaaacctgcaaaatgatgccctacttaatcatttcttgtctccctacttctcaggtcctctaggccctggcatcaaaccacctttctacccttatctccaaccattcccctacaacccagacaaaatgaaaccaccttggctccctgaacccaagtaacgaaggataggaaaggtgaaaggggcgagacaagtagagagcaaagaatgatgtgtgccaagaagctgcagggaagtagatacaaagaaataactcagatgaggtaagcacagagtcaacaggaggacacaaggagggcccagggagtgaacagagaatgtaaaaatgaacagggctcttacctggctataggccttgaaggactctgagtttcggctcctgcctcagctttggtttggcttgggtggtgatggagctgactcagggctccaagccaagcccaggggtggggttgagtggccagccaccacgtgaagagcccagggagctgggaaggggtgtggctgactcaaaccagtttggctagatgaagagcaggggagggcccaagggatggagcaactggagctaggacgcctgccctctggaaaaagttgtgaaaggaagcacctgagcaagagggataaaagggaaaggtctgaggcatcaaagagctccgaggaacgtctaggaaccgagggaaaagaaatgagaggaaaaggatatctgtgacttcaaactgactggggaaaggcaccctaccacatcaaattcaccaatcttccctcttcttgggtagatttctgcctggaacatatagtcctgggctagagatcaggtgctaggatctttgcaagaacaagagggaggagaaaaacgatgcccaagttcccacccaaccctccaccagaccagaaaatcagaagcctccttacgcggatgctcatacagaaactaagtttattattttttcttcttaaaaaaaaaaaaaaaagaaaaaaacctcattgtagagaagcccctcccccttcccctaagggtggggggctgtgtgaaagacagctggggaatcaagtacaagggggtggggacagagactatcttgccacccttaacactgcccagccacgtggggtgaaggggaaggggactgtgatgatccccatttccatgacaaccagttgcctaccccctactttggtgggaagaagggagaaggcccctatgtctccctggaggctttccccctcaagacttcaagtagtggttaacagagtcaggcctggtcatggagggagtggccacggtggaaagcctaggtggaggggcagcccactcacgtcttggccttgcggcctctgtgactaacagcagggccagccagggagggaggggcgctgctgcgcaggatgcgctggtccccttggttggtggtcccaacaagccggcgggggccaggacgtcggcgtggggtcccatccccttcctcctcctcacctgaggcttcagcctcagactcctctactgaaccctcaggccccaggggacttgggggctgtaggcggccccgctttgccagcccaggactcccaccaactggggcccctgctcgtttgcgaggcaacttctcagtctctagtggggggactagagaccctggacgcagccgggtcgagcgcagttttggggttagtgagaccacaggtggtgtcaattccaacccgcctggcccgctatctgctaagtccaggtcatcctgaattacagccaccaccatggaccctccactcttccgtcctcgcattccttctgcttcaagccgaaggcgggccaggcgggtgagggggcggcttccatcctcatcagaggaactaccctcactctccccttggccctggggttgccgtcgcctccccaatccacagctctcgagaacagaagtgctgtcacggtccaagacggggagctggctgggccgaggtgatggaggattcttgggaggtcggcccctcttccgtttgggtggggacgttgaaatggtgacagtggtgacagtgttggcaacagtagcagtgggacaaactagcagtggtgggagtggggttaggggtgatgggtgtgggggtggctgtgtccgactttcggagttgccatcccctgcagaggaaatggtcccagggatgggcaaatctcgtgctttagggggtcgtcctcgccttcttttctccacaggtgacaggaggggattgggtctgtgaactggctggggtccaagaggctggggcccaggaataagctgtggttccaggacaggatctgcaacaattagggtctcaggcccagggactgggtcagccccattggtttttcccttcaaggtggatgagggtgcctcatccacacctctcccagcatctgctggagacctgttcttcttggggggcctccccctccgacgtttcacagcaggtggggtgatggcgagcagtgctccgtctccattctcggggctgccaccaccagtcacccccagctcaatgtgacggcgagcaatgaagggctgctggggtggagtgggcagtgaggatgaaggagcagcttcacagggcccaccaatgggaggggaggattctggccctgacatgctgcggacagacgggcttcccgggctggcactagtctcagagaccccaggcactagggtgctggcagctccccgctgctgccgccgccgccgcaccagttccttttcctctaccacagttaccagccgtcctggcagctttcgaagcactttggggcctggtggttgtcctggccgaccagtcccttgacccctaatttccacatcagcactggtgcgacgccgaggaggtcgg

SEQ ID NO: 1243041 - DNA, 4001 bp, Homo sapiens
ttgccaccctccccacattccttcaggtccacacacacctgccctttgattcatggctctttccgctctgaggaaggcaagcaccaaaggccagggccccatcacactcggtcagcagctggggccaccgcctgccactgggtgtcttcacacacacctttcctggactctggagtgaggctgcttagagggggatgattgcagaggggctgggtgctgagggccctattcccagaaggcaaatcccaaaggcagctctggcctgacctctttttttttttttttaagagatggggggctgggcgcagtggctcatgcctgtaatcccagcactttgggaggctgaggcgggcagatcatgaggtcaggagatcgagaccatcctggctaacacggcgaaaccccatctctactaaaaatacaaaaaattagccgggcgaggtggcgggcgcctgtagtcccagctactcggtaggctgaggcaggagaatggcgtgaaccctaggggatggagcctccagtgagccgagatcgcgccactgcactccagcctgggtgacagcgagactccgtctcaaaaaaaaaaaaaaagagagagacggggtctcgctctgtcacctaggctgtagtgcagtggtctgatcatagctcactgcagccttgaactcctgggctcaagtgattctctggcctcaatcttcttttttttttttttttttgagacggagtcttgctgtcacctaggctagagtgcagtggcacaatcacaatctcggctcactgcaacctctgcctcccaggttcaagtgattctccgcctcagcctcccaagtagctgggtttacaagcttatgccaccatgcccggctaatttttgtatttttagtagagacagggtttcaccatgtgggccaggctggtctcgaactcctgacctcaaatgatccacctgcctcagcctcccaaagtgctaggattacaggtgtgagccactccgcttggccccacgcctcaggccttctaagtagctgggaccataggtatgcactccatacccagctaatttttaaatgtttttgtagaaatggggtcttgccacgttgcccaggctggtctcaaactcctggcctcaagtgatcctccctgctctgcctcccaaactgctgagattataggcgtgagccatcgcgcttggcctgacctctgtgtaggtctctctctctcctgtcctccctccttccttcttcctttctctcttaaacggctttactgagatataattatcataccataacattccctgtttaaagtgtacaatccaatagtttttagtatatttacagagttgtacactgtcaccataaactaactttaggacattttatcacgccccaaagaagccccattcatagtcactcatcattctccctcccaggccctggcaaccactcaactactttctttcagtggagttccttggagaagcaactgtgaacagtgaagccaaccccaggtactgaggtgggatgctcctgcccttggatcaggctttcagcaagcagagtcccagaatgaggaccatcccttccagctggcccactcacttccttgtggctgtagccctgagaaggtcaccagtccaccctcctcctttacccagggaggggcatgagacccagaacagggaggaagtctgaccaaggtcacatcgtgggttggggacacagctcctgctggcggtacccaccatctctggcactccaagctatcttcccacagcagcccctacacatccataggccttccactggcctcagtctctccatctgtacaatgggaataataacacctaccacacatgttgttgcggggattgaatgaaagcaaaggcaatcctgtgtgtaaagagtttttccctttgcctggcatgaagctgtccctcagcccattgctgaagttgaattagattaaattcccgtcctggcattcagggccctgcacattctggttgtctggggtggatggaagtttgtccctcccctcccttggaaggtggcagatggaagccactggaaccgcaggatccttgctgcttcctctcggtcacctggaagctggtggtgtcagcggggcgggcgggaggttgacactggtggcgatgactcagcactgagagctgtgggagtctagttaatcagcagcgtcaaaacttcctgttgctgtttgcaaacaagggccacccccagaggaggaggaccagagctaggggagaggctgcgcaccacagaacctcagcaaagcgaagctacagtttaaaggcagcagcagcagtggtgctaagagttcagcaggtggtcaggggctgtggctatggctttccaggagcacgtggcttcccttatggcccctgtccccatctccccacccaggaggaatttttttttcccccagtagtagctgattgacttactgcaaggagccccagtgaagtgccagggtgtgagagcaggaatcatggtggtggcaccagatgagactcatccgtctaggatgggccagagtgttggaccgcggggtactgaggcgttccaggactgacctcagaagatctctgagggcttaacagcaggcagggattgggagcactgagtcagtgctctcagccccacctggcctggcccagcagacagaaacactcccggcctgagcacctggcagaagaaccagatacgcccctctggtgacagccatcgctcagatatctttatatatgcctcatgcctcccaggagaaccagccagggcgagaattccagatccaagagaaaaactgtaaattagcgtgaaaagtagttctcgtcaaaaaatgctgccaacgacagtgtaaatttggtacaggccttctgaggggcaatctggcaacatgtttagaaagtgaaaaaaaaatgctcagactctttattcagaaagattttttatgaaattgacaacctctcttctcccttccctccccacaccagggaatgaacgggctgtgtgggtggcaatggtgacagcaatgctgtttataaaagtgacaaaaatgggagctactcaaatatcagaccctacggaatggccagctcagtcagggcacaggctctcagtggaatattatgcagccatttaaaatagttttttgctgggtgcagtggctcacagctgtagttccagtacacgggaggctgaggtgggaggactgcttcaactcaggagtttaaggctgcagtgagctctgatcatgccacctcactccagcctgggtgagagagcgagaccccaactctaaataagtgaataaatgaaatacttttcagccatttttattgagtgctaggtgcgccccagacactggaacctccattctgaatgtgaccttggctttatcctatgatgtctgcacttcagaaaaatgtaggcattagcaggaaaaagtgacatggaaaatgcttattataataattaaaaaaaatttagagatgggagtcttgctatgttggccaggctgaccaactcctgggcttaagcgatcctcccacctctgccttccaagaagctgggactacaggcatgagccaccacacccagcacttacatgattcaaagtaagaaaaggcagagtaaaaaattctatccggtctttgcctcccactataactgcagcttgtgtttgcagaaatgccaattgtgtgccagatgctgggctgagggtgctatgtgcttgctccaatttacatctcaccataactcaatgggttagacactagccctactctcattttcacaggaggaaactgaggcacagcagaagtgactgagccagtgaatgagctcaaacccaggtctgcctggcctcagaaccacctttagccatctctctatactgtctctccttaacacagaaatgacatcagctcaaggtcagatactggaaagaaaaatctgggccaatgacaataagtg

SEQ ID NO: 1243042 - DNA, 4001 bp, Homo sapiens
aaggcaggaggatcacctgaggtcaggagttcgagatcagcctggccaacacggtgaaaccccatgtcttctaaaaatacaaaaattggccaggcatggtggaatgcacctttaatctcagctactcaggaggctgaggcagaatcacttgaacccgggaggtggaggctgcagtgagccgagatcacgccattgcactccagcctgggtgacagagcaagactccatctcaaaaaaaaaagaaagaaaatagggaagatttgttagtagtctgtgagttccacaatcatgcgaagcatattaaaaattccttaaattcctaattaccttttcctgtcttttttcaaaagaagattaacttcatcagaatttttctttacatttaaaacacctgcatcttcagttgcctcatcatccggcaaagcaaaagtcactcttttcaagctttctttacattgtttactgtcttctctttcttccaggtgatcaccttcatccctacactaccaaaactcttataaaaagaaatatattgttttccattagaaaaacaaaaggaaacatattttcccttaacaaagttcctcttttatatgcctaatgcaaccagatacttagaacttccaaaatcattcaggtattaaggaagagaagctatcatttaagtgaaatgctatgtaagaaacaaaaagggtccaatatatagaaaataaattattcatcaatctataatacaaacctcttatctcacaaaaataacaggattttgggggcacaaaaccaaatcaaagttcctggtaagaaaggtttgattgctactgtcagtaatatttttcttcattaaatgatctctaatgtccgtttaaatccagtgactttcctctggctatcttgagaagatctgataggagagtatctaacttcttaaaacaaacatatgtgaaaaccacaaatacaaacactgattgggcaattccagctcacaaagtaaaggatgtttcaaaatactcacatttcagaaatgcttccttcttctgcttcttcttcagcaatttcatcatcttgtttgaacccagctcatcatcatgatcacttgctatgtcttcatcactttcaactggatcaaaaaaatctttgttgttcacatttctggaacttttacctgactaaaataaaaagatttttaaaactattaattaggaatagaaaaatacatcattaacacatgcatatatatatactgtatgtctatattactttctaacttaacactacaagtcaaaaatagttactaggtgaaattggcaactaaaaacactaccataaaactattataagaacaactggaacataaactgaatggaagtacagattcatttataactgataaaacaaagcataatatatcttagctctaaaccttctaactacaattacatctctcctagaaaaacagaacaaaagctaatttgaggaggaggaaagtgctctctcctttctcaaacttaaccttaagttttttacttccaaacagtccccttttatcttcatcagaatcaatatcttcaaaaaaaaatcagtatcttccacctcatcatcattatcatcttttcgttcctcttctttttctctgttttctaaataagcctccatttcagagagttggaagaatttctcgtctattatggacttttctcttggttttccatgtcctgtgttttgcaccttgctctgctgttccaatttgctgatatcaaagtcaaggtcagaatcctcatcactgaaaactgggcttttcctcagctcaaatttgcttgagtttctagctttcttgcccacttcaggattgtcaccacccatatctgacacttcctcttcctcctgtaaatcttctaggtcctcctggccaccagtctctgtctctgaaccatcctcttcacactcctgttcttcactctctgggagaagactgatgtcttcatctttgtttcactaactgcattttggaagcattgtaaaattggttcattttgcaattccagttgttgcaaagtctgctcatcatcaaaactttctatcacaagtttttgtaaagggcttccacagatccttccattctctaatattttattaaagtcataaaccacttttgttaaagaagtgaactttgatgacaatccatcttgaatcctattgggaggaattaaatgagatttagaattataggtaataatttcacagctctcttaattaaaagaaaaataaaaaccccaactcttctgtaaaatcaaatttgaatgaagtgtaagtatagattctggccccaacaacatacaagctgatgagccacagtgatatataaaacctgtcaatcaagtatttgtgaatcagctgtatagattttaggcaggaaaagcattacaaatctgtttgcttggagatacatagtgaattagccttaaattatcaactctgctatattatacaccactccattcattcattcccttattccttcagtgatcaacatttgctttggctacagtggtcaaggaaaacctcttttggatgtgacatctcagatgaaacctacagataaggatagtcttataaagattgggaaacatgtattccaggcagaagaaacagcaagaacaaattctctaagatgcaattgagcttggtaggcctgaggaataaaaaagtgagcacagctagagtgtgaaggaggcagaaggtgaaattggagaaactgatgggagccaaattctacagggctcaagggtaagagtttgccattttaagtgtaataagaaaacatgagaagattttaagcagaaggatgaaatgatgatttacaagaaggaagaagaaagggaggaaggaggaggaggaaagtagagtgattagaaggttgatgcagcattccaggcaaaggatgatggtgatttaagctggagttagagcagtgaatatgctgagtacagtctggaggtagaactgacaggattgctaaggaattagatacagaatagagaaaaatgaagacatcaaaatagcagcctagttttatgtgtgagcaacaggaaagacagaactgccatttactgtgacaggcaaggcttgagtgctggagcatggggaaaggacttcagcggatggcagagtataggtgggtagaacaacattctactctattttggacacagtgaatttgcgatgctgagagtaccaaaattttaaaaattgttaaaagccgtacagtgcggatatcccagttgtgtgctactgaattccaactaagctcagtctgtagtcgctgtgagccaggaactcaagggagaggttggagtttgaaatataaatgagtcataattttatagatcatatttgaagttcttcaacagaatacccataaaacttttgtgctgggaagagacaggaaagttctaattctcaagaagcttagttggggtggacagacaagtgacgagtttgtactttcaataaagtatgatgacaggtaaatactgagtgctttaggagtacataggcggaaggagaaaccaaaacagtttgtgtgtaggggtatggcggcagtaataagcctccaggggagcttctaggcgttaataactgaggttatttggtggatttcaataacattcaactgagagagccatactgtaaaaattttaacaattttgaaaattgtgatagcctaggaaagtataatctctgaaatgtggggaaaagcgatttacatttccccttaccttcccccagctccacaatttgccaggggtctgcaacccgcgtccaggtgcgaccccagtagcaccggagccagggatctgcgcgcatatgtgaggatgcactggggccagccggtggctttgccgacctctgtcagacaccgctccagggtccgtcagcgccaggcccgcggggctatggctgtccgcaactcccgacacaagctgcaagcaaggcaagaaagc

SEQ ID NO: 1243043 - DNA, 4001 bp, Homo sapiens
cacgtggaaggttgcacagcggctgggcagagacgctcctcacttcccagatggtgagggggccgggcagaggcgctcctcacttcccagacggtgcaggggctgggcagaggcactcctcccttacaaagggtgagggggctgggcagaggtgctcctcactttccagacagggcggtggctgggcagaagcgctcctcacttcccagatgggacggtggccgggcagaggcgcttctcatttcccagacggtgaggaggccgggcagaggcacgcctcacttcgcagacgggatggcggcgaggcagaggcgctccttacttcccagacagggcagctgggcagaggcgctcctgacttcccataccgtgaggcggccgggcagaggtgctcgtcacttcccagatggggtggaggccgggcagaggcggtgctccttctcaattcccagatggtgggcagctgggtagaggcactcctcacttcccagacagggcagtggccaggcagaagcactcctcacttcccagagtgtaagggggccgggcagaggcactccttgcttcgcagacaggacggcagccaggcagaggcgctcctcacttcccagatggtgcaggcagagatgctcctcaggtctcaatctcttgacctcctgatccgcccgcctgggcctcccaaagtgctggattacaggcgtgggccaccacgcctgccctgccgtctctcctttctcctcctaagcagctctcttagtctcctgaattttgatgttctacttagcaccctcatgttcttatgcatgttgccctgctggaggcgtccttctctttgggaagcctgacccaccaacagtgcctcaggagatagacatggaagcttagccggtgggggcccctcgtctctatcccacctcagttgcaggggaggggtcagttgcagctgcagcagtggccccgacagttttcttttgcgggaactgtggccggcagctctgggtggagaagacctacttgatccaagagctgcaggatccttgggctgcatgtcctcccccaccatcagcaagcctggagagctgggcaggtggtctttacccagcaccttcaaggcccccttctctggccacagggagcagcccggaactggggcagggagcactgttggaagtgggtcaggcttcccaaagggaaggatgcctccagcagggctgtgtgaactggcgactccatggcccttggagtagaaactcactgcatgcacctgggccttgtcagtctggttgttttctgtcaagctcttgaggtggacatttccctccaaggtcctgggattgtaccaggaggaagtgaggtttccctgagtctccaggggcctagaggtggaggccgcttccccattgctacaggggccccttttattgtcctcctgcccctgggtctctacctggtctttcacctccgttgcttctttgggctcttctgccctcatctccgtcttcgggagcctggctgggatcacctgctcatcaaatgaaggaagttgaaggttaaacttgcctctgagacgagggatcctcaggggcctgaggtgtccaaacatcgtggagttgcgagcagacagcgcaggtttcttcctcgagggggggctccagaccacaggaggcaggaccctctgtggggtgcccgtgttctgagggctaagacacagcctcataggggcaccatcccacctgtctggaaaagaaggcccaagatgtcgctgacggttgaagagtgggaaatggccccagattccccgggcaggcacaggtgcaggagccgcggggtgagcccggccagctgggaaggcctcacggacaagacgagcaggtggccgatggcatggccaggacctgcggcggaaccaggaacaaaatacgcttagtgagttgcccattttgagcgagttgtgcacagacgaaagtaagggtgagaagcggagaggatactcctaagtcacccacttctctgtggccgggtgcacactgggcatctgggagtttatgacatcacaatggggctggtgacagagctagggtgtggaggagtgcttaggagcccagcgagggtgcctacaagaggagtcaaagggcaaagggtgagacccttccaccggttcccctggactctagcctcagggacgtcctgctcctgggggcaggtgtgtggccctggatgggccccctgtggggctgttgggggtgcggggctgatctgccagagcgcttccgcctggcgcctggcccaggtgctggctggcacccagtggccctgtcttggccggccctgtaccccgggttgcagggccagaacctggaagcagagcgcaggaccagccagatcccgccaggctctccagtgcctctgtgctgcctggagccaggcctgccttctccatggctgccgtggcctcaagggccaccagcctcgctccacaggtttccaagagaggatgcagtgccctgacctgactggatgcacctcttaccacatgcctccctggcaggcagggtctccactttttacaagtttgcctgagaccattcctcaggtcattcaggtgatcatggcccagccaggctttgaacctgggctgtgcgattccacagctggcactctggcctgtgtgcctcatgatcatggatacagcatctattcttattttttcctctagtcctggggtacttagcaccgtggcatatctgtaataagcacatgcacacctcgaaggaggtcttcacttcaacatacaagttgaccatggcatgctctgggctccagtcctctacaaagatgtagggcaggaactaccagttgtcagcacagcaccatcccacattgctcttctaatggagactttcaccccagatgttctttctcgtctgatgggaaggatccaagtatgtaaagattatgttctagatcagctttggtctgtcctaaaagaaatttgccagtggattattccatatggataaaagtcagtttctctggtcttcctggaatgtgtctagaaagcaaatacattatttacaattcatagtagatcaatgtattggattaaaatatgacaaacataatttggtcattgtgagcatgccagctcagtcaactattcaccatacatgatgccctaaatataactctaggttttcttatgcccaagagagggacatactcttgggtgtctggactagggaaacatgcatgaaaaaccatttggccactctacatcttgttactggagaattgaaaccatctatattcaaagatattattaaaaggcaagaagttaaaaaaaaaaagaacattgatctcatgattctttcattatatccattttacattatcctgccttatacccacaattgaagagttgccactttatacctaggatagaggagttgccacatcatgagcatgctggcaccaagtggaggcacatccaggtttttcagcattctcctggtaaggttgattagctctcggaagctgagcatatgtttaaaatccttaaccaacatcacttagatttccttatagttgcatctcagtctatagctaaatggacatgaaatcaatatgcactcatggaaagctagcccccgtgagatacattctaaataatgcagcatatcgtaacaattggatggtacataattccctccatctaaaacaaaattgatttttgtcctctattatcccagtactgcaaagggatctattttcatttaaagtttcaaacttttcagccgtgcaccataaacaaacactaaaagatttcataatattctcaagattgtccactctcagcagcaaagagtgccactacgaatgctgaaggctaagaagtaataaaccatcaaaagcttcattgcaaatgctctgaaaaatctcttttccttccacagctcagcagggtgcagctctgcttacattttcaggccatgaatgagaaa

SEQ ID NO: 1243044 - DNA, 4001 bp, Homo sapiens
ctacttgggaggctgaggcataagaattgcttgaacccgggaggcagaggttgcagtgagcagagatcgtgacactgcactccagcttggggtaaagagcgagactctgtctctaaaaacaaaaaacgaaaaacaaaaaacaaactatataaagcagctgggggcggtggctcacacctgtagtcacagcactttgggaggctaaggtaggtggatcacctgaggtcaggagtttgagagcagcctgggcaacatggtgaaaccctgtctctaccaaaaatacaaaaattagctgagtgtggtggtgcacacctgtaatcccagctacttgggagggtgagccatgagaattgcttgagcccgggagacagaggctgcagggagccaagattgtgccattgcactccggcctgggtgacagagcaagactatctcaacaaatgaatacataaataaatactatgtaaagcacatcagaaagctaaccttgaccttaagatcatgggtgtgaaacactgaactatagtgaaatatactccacatttaggtagtcctttagagcttttttattttttcataattttaaaatttttaatttactgtagagacgacgtctcactatgttacccaggctggtcttgagctcctggcctcaagtgatcctcctgccttggcctcccaaagtgctggggttacaggtgtgagccaccgcacctggccctttagatctttcaaagcaattttacatcagcaattctatcctcactttacagaggaaactgaagctcagaaaggtgaagttaattgctcaaggtcacatagcaaggagttaatggcacaaggctaggtccaattcaggctctggcctgggatcccctcttctgggggtgatgggaggagggtctagaaaagatgggcatcatccacttttctttcaacccaaacttcatctgtaaaatgggaccaacaatcctcttcgcagggaagagctaaactgaatggaggaaggggagcttcatcagggcttcctaacctggcctcttagcgggggctttaggtggtaaaattttatgacagcgagtgcattcttgtggcttagactgcttggctaggaatcttgacttcaggatctgtcactgtgttttaacgcctgagcctcaattcgtttgtaaaatggagcagttaggattaaaagaaataatcaaggcaccaagtagtgtcagtagaaggtagctgttatttattgttctattctggggtaaaggtatcagattctcaaagggattcttaatctagaaagtttgcgaagagatggcaaaggtgtttgaaagctatcaggaaaccatcctcgcgtaaaacgaagcagcgctacagaagtgggctgccatgggaatcgggaggcccaggttccactgctaacttgctgcagcttactgggtgatctgtaaataaaaagggaggtggcggtggtccgagctggcagccgcaatgcagccccaggtagatctaggggcaaacggtaaaggcgctccgaggaagggcgagcgcgcagcctctgggagactacacctcccaggctgccttgcgcaccgtgctgcaccctacgctagcacgcgagcctccccgttcccccaccctccagttactgtctctcgcgagaagacgggccgcgccggcgatagcgattccgagcgagtggtggtggtagtggtggtggtggcggccgagacggcggcggccattttggtgaggcctcgggagcggcagcggcggttcgctgggagtagcgtctgccctttttcccacccaccgtccgcatctgtgtgctgcgcgaagaggcagtggaggcaaggcggtggcagtagccgcagtctccaggggagtttaaaggccgcgaaggcggtggccaagagggggccctcccccctcctaggcgggagggggggtggtgcgcacgcccccgaggacgcaggtaaggagagggagacaagatggcgaacgccccacagttccccctcccatgacggctgactgcgcgcgcatctttccgccaccgcctcccccccaccttcccggggtgctgcgcgcgcaccctcagccggggccccggggccggtgcgcgaggctgtcggcgcgcgcccatagagacagactgagggggtcaggccggccggcgctgggccccggcgtgtctcctctcccttcccgcccttctgcgcacgcgtgcctgagcgagcgagcgagcgagcgagccctgagaggacggacccaggtgcgctcctgcccgcccaccaacccagtcacccctcaggggcgcgcgggaagaggaaggggggcgtgggacgagtagtcggggcgcgcgcccaccacatctagccgggggaccaggacctggtggcacgaaccctcccttctctcagcctttcgcggtcgggtgatgggggggctccctgacgggcttggatgacgagcttcccagccccgcgacccttgtgtgcgtgggctcgggttctggcgggagcccctgggccgtgcgcgcagccggctcgctccgcctccagccgcgcacgcgcgggcccctcccccgcccggcgcgcacgttgggtggggtgggagtctggagggggcggggctatctcagggctagtggcaacttgggcagaggtcaggggtcacgcgaggtcagtccgtcgggagggctagggagatggtcacgaaacctgaagtcaagagttaaggcttgttggcttctggtgagctcgggtcttgggaacgtgtggcggagtagggagtgaatcaaagccggcactgtggtttaggaatttccttaaacactggggaagcatttccgggcctcctgcgggttcacactgcctgtttccggcgcgtggttcttggcagtgcggcctctcgcttttgactgctcctgagtctccttttgctgtggttcttgtatttggggaagtgtctcaaggcgcaggtatgggatatacagcgccctgccctgaatcctgggcggattttcctgtgaccagcctgtttgttgactcttcccgggagttccactctcacttctgcgttcagccctcactggaaaggcccgcaggcaggtagcacctttctgaggttctggatgtgacagcttttttttgctgtattttttttttgtcttccattctgtggttggagcctttacacttaaaatttttgaactttctttcttcactcctttcctgctcctgcccccaggcaggatcgtatgtccctccggaattcacaaaacatgatttgcatttccctgaaatgtgagattttcctactactgtagtttttctgtttctagtcttttaactgatttgggtatatttaaacgtctcaaaaaactggagtaaataatacgctttgatggatgtttcaggtgtgattcccttcagtacggcggcaccgtggaagtgcagactttcacagggggtgtggtctcagctcacacaggtgagggatctgctaccattttgtgtgctgatgctaatgggagaaatgtttgagataaagcaattataggtccgtattggggattttcactctagagaagcatgggaatgtttgcatgtgatttttctgtagagggtttgattatagtacaacaacagaactgaggctgtgggttgaggaaaacgtggtcaacctggctctaccaggaagagtagcaggttttccttggttttggcatcagactgtggattgaagccctcctatcacttttttactgtgtaaccttccgcaaatcataaggtcttaacttcgtaacttacaaaacagattatattagaatgtaagctacatttaggtcgggaatcctttctgcatggctatatccgttgtgtgtaggaggaagtcaatatttgttatgctgtgaaaagcacttggtttttaaggtaggtgtgaggattatagaacacatcaaacaggtactaaaagtatcttatacatagtaagtgctc

SEQ ID NO: 1243045 - DNA, 4001 bp, Homo sapiens
gggtgcagtggctcatgcctgtaagaggcagagacaggaggatccttgtcacaccactgtagtccagcctgagtccagcagagcagagaccctgtctcaaacacaaaaacaaacaaaaaagcccaatgaacgactgaagggatgaatgaagtatatttagttctcagtaaatggtaaggatgatagggataatcagcctttttattcccctattgcagcggtccccaaccgttggcaccagggaccggtttcgtgttagataatctttccactgactgggagaagggctggggggatggtttcggggtgattcaagtgcattacatttatcattagagtctcataagcagcatgccacctaggaccctcgtatgcaaagttcacaatagggctcacaataggtttggcacattcctatgagaatctaatgcctaggtggagctcagggggtaacgttctatcggccaccgctcacctcctgctgctttgtggcccggttcctaacaggccagctgtggacagtgggttggggaccccatggacaggcaggtactagtctgtgcacagggggttggggacccccgccctactggaatgtaaactgcacgagggcaaggaattgtatttttgtgccccaggatatcgatgaacattcctattatgtacaggcagttttttttttgttttgttttttgttttttttttttaagagatggggtccttgctatattgcccaggctggtcttgaattcctggcctcaaatgatgctcccgccttggcctcccaaactgctgggattacaggcgtgagccactgcacccggcccaccatcccagtttttttttttttttttttttttctgagacgtgatttctttcttgttgtccagggtggagtgtaatggcgtggtcttggctcattgcaacctctggttcctgggttctagcgattctcctgcctcagcctcccaagtaggtgggattacagtcacccactaccacgcctggctaattttgtgtgtgtgtttttggtagagacggggatttctccatgttgacaaggctggtctcgaactcctgacctcgtgatccgcccgcctcggcctcccaaagtgctggaattacaggcatgagccaccgcactcggccgactcactatcccagtgacagccaatgacagccttgttgcaggaaggtggtattacactcattcccattttaatgatcagggatcaggttcggagaggccagggcggagagcccgcccgaatccagtgcccccgacggcggttgggcgagggtccgggagctccaaaccgcctagggccgcctgctcgggatccccgttgctcaccttggcctcgggctgactctcctcgagatcccaaccggctttcatcgcctcagctgccccgaccagcttatttggggcctgcctgctttccctgaccttcctggggtgtctctcggtcccttccctctctggctccatggctgtggagaaagatgaggtagagctggggaaactccagcgcccctattcccccgcgtgccgcctcctagcgggagagctacacgggcttgacagctttcaacctccctcggatccgcttctcaattcagtttaccgaactatccccgttcccctaaaaaagcgaaggtgccaacgatctccccgttccgcggactggacacccgcgccgctctaacccaaacggctttaccgtccgcatcggttaccggattctcaacggttccccaacggctacaacgggcgtctgcctggcaaagaaggaaggtgctgccgagcggcttcgccgcctaaaaccactccccacgccccctagcccgggaaacgcagaagagaagacgggcggggagcagaggttctcccctccttagccacagctgccaacaacaaccgcccctcagcctcgcgggctttttgaacggaccggaagtagaagtcgagcgacttccggcagctggacttggaaaagcaaggagtgtcgggaatggcgaccaagcggctcgcgcggtactcgagggagttccgggtcgggggcgggtagctccgggtccagcgctggcgttggccgcagagcagggcacggcaggtggcatctgcggtgagggcctctattccccgcagccccggcgtctgcgacctgccctctctggcacggttggaaaggcgcctccctggacctcggtcttcagccttgggccaccttctacccgagggtgacaggagcccgaggcggacgaaccctggggccttgactgtgtggccttgagccagtgcctgcctattttaggccttgggaaacgactggacgtgacagtgccctgcagactggttggaggtctcaggcaggccacacactgaatctgtcaaggtgttcaacctgttcgaaatgctcgttcctcggtgctgtaaagaaatagaacttaaacttaaatttaatttatttagtaaggccatttttacttcctgcagaaagggtacactcgccagcagttttgccaggagagtacactgaacaaaggagacagggtcatttataacgtggcgcgtccaccctactgctgtgtccggtttcctttggctggaacgggacctcacattctgtatttgtcccgactgactagcaacatagaactttttaaaagaggcaaaggcagaggagaacaaaggaagaaggaagtaacttgtggaatgctgagaaaggtaaaaacacttttaagtaaggaagaggaacaggctatgacctaatgtttgattggaccagtataagcatgccagggcaaatatttaggctaaattgtgggagctaagaacataaagtacattgatttctttattatatctagcagatatttaagaatgttagcacaggtctttgaataaattttgctctaagagaagttactatttattcctaattagacggggaaggaagtctttgaagaggaacctctactttttacaaacccattttctagtgatctttttttttttttttgagacggagttttgttgcctaggctagagtgcagtggtgcgatctcggcttaccataacctctgcctcccgggttcaagtcattctcctgcctcagcctcccaagtagctgggattacaggcatgcaccaccacacccagctaattttgtatttttagtagaaatggggtttctctatgttggtcagactgttctcgaactcccgacctcaggtgatccacccgcctcaacctcccaaagtgctggggttacaggtgtgagccacggtgcctggcctagtgatccttttaattcacaatatgaattattgtgtcctccctgattcctggatgcgctgtgcatatttctgattactagaaagatgtaatataatagcaaatagcatgagcttcagaattggacagtcttgggttcacataccaaagctatgttctttggcaaattaagaatcagttttctcatccataaaatataggtaggaaaagtttctagctactacacttgttgaggattaaaggaggccatcatcttagtttaattttagtacctgctatgtagtaagcagtcaataaatgatatttattattcccaaatcctggcacttcccactcttagcaaacacagaaaactacaggaggtgtctgcctagttaaaactctacctgctaataccaagtagtttgttttacttgcacttaagacctcagtaagctcttctctttttttcttattttattttatttatttatttttttgagacagggtctcgctctgttgcccatgctggagtgcagtggcatgatctcggctcactgcagtctccacctcccgggctcaagcaatcctcccaccttagcctcctgagtagttgggactacaggtatgcaccatcacgccccagctaggttttataatttttgtagagacggggtttcaccatgttgctcaggctggtctcgaactccggagctcaagc

SEQ ID NO: 1243046 - DNA, 4001 bp, Homo sapiens
gtggaaggtttgttggtctttgttgctttgttttgctttcttttaacgggggtggggggaggtaccagtctcctttgagaatctgaagaaagcaaaggattctcctaaaaaaatgtacatagtcacaagattttgaggaaaaataagacatgtccaaccctccggaaatccattcagagtcaggaacccctaatttaaaaataagggataactgccaggaaaggagaagctctaaactgaaaacacaacacctccagtagagttaggaataggaggcgggtgcttggcaggtgagtttgaagatacttgttgagagcatacgatataccagcattgtccaataaaaatataatgtggaccacatataaaattttagtggccacattataaagtaaaaacagcagaaatcttaacattttattaaccccaagtactcaaaatattacctttccaacatttaatccatataaaatgtattaatcaaaaagttttttcaaaatctggcgtgtattgtacacttacagcacatttagggtgaccaacctcctggtttccctgggacggaggggctaaaacataggactttcaatgctaaaacagacaatcgcagcaaaccaggacaactggcaattctatcatctcaatttgacgagccacatgcactacacagtactggacagcaaagtcatccatcatgcatggtgcaaagtggaatatacacattattcaatttattcttcataacttgcctaagagatggatgctgtcagtttccaaattgcagaataaaagaaatagaggttaaagctctcacccaaagtcacaccaatagggcgagggtactgggcaatatagtagtaagcctggggcctaagaaatgttatgagtgaaggagcagaggtgagaagctaggaaagttccagaaagggggaccagcgaaaatgtgagcagtaaaggccctttacaaagggaaacagaaggattagggggagaaggagaagggtggcagggagtatagaagaaaggcacccacaaatagtgcagtttaggaatgaaacaggaaaagttaaaactcacggagcagagaatgcctcagcggacaaaaatgatgggtgacagaaaaggggaggcggataggagtaaagggcagtggggagaaaggtgaaaagcgaaggcaagtgaaggcagagatcaccggggagaaagaaagggcctggaaagttaaaagcactggcctaggaggctgaagaccgagggcgaggaattgcggagagggggaagaggattcaaattaaattatccagaacggtagggaactgcgtagtttcaccaggtgtcaggcactacttcatgaacgatctcattcatggtcatggggcaggtatctgacatccccattttgcaagtgatagcaccagagaggcggaaccgagccgcgaaggccgccccgaactgagcctcgcgctcaaggcaggccgtggcctgggcccaggtccccggaggaggccgcgccgcccgccgccgccgcgggggcagccaggcctacctgtgcagcggcggcaggtcctgcgcgtcgctggcggggtcaggcgtgttggggatgacgcccaggatggtgctttgcagcgacgtgcccttcagaaggcggctccgcaccagctgcaggttgcgggccgagtccacgctggtgcgcatggtggagccgggcagcaggacgccctcgtgggtgagcagcagcgggaggcgactggggatctggatggggctcactgatgacatgctggcagcctttcgcactgggggctgtcaaaaagagccagacagacagctgcccccggcctgccccgcagtcaccaaacctcagacccgcctccacgcctccgcttccggctacgcgctacggtccgtccccgggcccaaaagccatggcttcgcgctgctctctaggagagcctcccggtaagacttgagcgtcctacctatgcggaaagacgtgcactcaagcgtgcagcgaccttcgcctcacttacagagtatatttggaaggatgatcttatttgaattgtatatacttgaagtgtttttaacgttttcttcgattttttacatatacttgaagtgtttttaacttttgattcgaactaattatttatttatttatttatttatttattctgagacagattctcgctctgtcgcggaggctggagtgcaatggcgcgatacccacggcttgcagcctctgcctcccgggttcaagcgattctcctgcctcagcctcccgagtagctgggattacagatgcccgccaccacacccagctaattgttgtatttttagtagggaggggatttcaccatgttggccaggctggtctttaactcctgacctcaagcgatccgtccacctcggcctcccaaagtgctgggattacaggcgtgagccaacgtgcccggcccgaattgattttagatgtacaaaactacagcagagttcctatatacctttcacccagtttcgtctgttatcatcttacataatcatagttcaatgatcaaaaccaggaaattaacattattatcgtttaacctataggccttacccaaattttgccagttttcccactaatgtccttcattggatctggtccaggatccaatatccaggatcctgttgtgaaatctcctaggtgttttgttatgaaatctcctaggtgttctctaatctgtggcaagtcctcaattttttttttttttttttttttttgagacggagtctcgctctgtcacccaggctggagtgtagtggcgagatctcggctcactgcaagctccgcctcccgggttcatgccattctcctgcttcagcctcccgagtagctggggactacaggcacccgcaaccacgcccggctaattttttgtatttttagtagagacggggtttcgccatgttagccaggatggtctcaatctcctgacctcgtgatctgcccgccttggcctcccaaaagtgctgggattacaggcctgagccactgcgcccgtccaattttttttttttttacaaccttgatacttttattttttttctgtttttaatttaattttattttttattatagtttaagttctagggtacatgtgcacaacgtacaggtttgttacatatgtatacatgtgccatgttggtttgctgcactcactaactcgtcatttacattaggtatatctcctaatggtatcccttcccccccactccccaccacccaacgacaggcccctgagtgtgatgttccccaccctgtgtccaagtgttctcattgttcagttgccacctatgagtgagaacttgcagtgttttgttttcggtctttgcgatagtttgctcagaatgatggtttccagcatcatccatgtccctacaaaggacatgaactcatccttttttatggctgcatagtattccatggtgtatatgtgccacattttcttaatccagtctatcattgatggacatttgggttggttccaagtctttgctattgcgaatagtgccgcagtaagcatacgtgtgtgtgtgtctttatagcagcatgatttataatcctttgggtatatacccagcaatgggatggctgggtcaaatggtatttctagttccagatccttgaggaattgccacactgtcttccacaatggttgaactagtttacagtcccaccaacagtgtaaaagtgttcctatttctccacatcctctccagcacctgttgtttcctgactttttaatgattgccattctaactggtgtgagatggtatctcattgtggttttgatttgcatttctctgatggccactgatgatgagcattttttcatgtgtctgttggctgcataaatgtcttcttttgagaagtgtctgttcatatcctttgcccacttttagatggggttgtttgattttttcttgtaaacttgtttaagttctttgtagattct

SEQ ID NO: 1243047 - DNA, 4001 bp, Homo sapiens
actataactctcagagagttatttggaagagatctttaaacagtaacaaaccaggtgatggaaaaacttaataatttattataggtgcaatataaatatttgtcaacattccatgctgtttctttccaaaatatgaagtcaaatagatgggcatattttcatttaagtatgatttaattaaatcagactaaatttaatcttgaacaatggtctatgtatttacaaatgtttcagaatgtgaagacacaaaaagaatatctattaatttaaagacatgaggatcacatttttaaacgtttaatttcctcacaaagcagtattactacattctttatcttcttcctctctcacacccctcttcaaccagacacccatctaccattactcaagccaccacctgtgttgtttagctctgcacttaaccttcccccactgtagaggacaatggtcttagtgcatacaagctgattgcaaatattatactgcttcaaatccaaagtaatgtgtgagatggacatgaaaacttcaaaattgttcccccacccccccaacccccgcagaacacacggacaaatgtggttagcagggtctatcttgttctctgatcactaacttcaacaaagaggaagtccaaagagtgcaactgccaatggtaaaaggaaccctttacaagaaaaaggaaaggaaaggaaacttcctttgtgcataacagtatagccatttttaacaatggaaaacagcctgggctactacttctcatgcttcaacttaggaaacgtttttaggtgaagactgattctggaccaaaacttcttgaacatcctaagctgactcagttgtcccttttctttgattctgacttcccaccctccatcatgctcctgctcagctaaatctttccagccttacctgttgttctaaccacagacctaggctctctgccttctgcctcactcttatccatcccatactgactcctctccttcctaaggcaaaaaaaaaaaaaaaaagacttcttcaaatctactctcccgtagtagatctgcctcccactacactctcataaactcaagttgaagcttctgtcacagattcacagattccttcaaccttctggggcatggaatgtagcctgcgccaccagccagctcagtctcttcctgttttggattctcctctcaggcccgcatcttcccagcatcttctctcctcccgtgcccgctcagaccatcctctaaatgtcctcaattctcagacacacatctccgcccctttcaggctcacggcccctcagaagtcctctcctctcagatccactgctctttcttcctctgatgcctttgcttcccagacccacaacgcccctcagacccacgcgcccctcgaccgccctcccccgtcagacctacaccagtcacctggacccgccccagaccctggctcccctcgggccacctccctcctcagacccatgcccccttcaggccacctccctcctcagactctcgcccgcctcggaccacctcactccctcagacccacgcccccctcggccgccctcctctctcagacccacaccccttacctggacccccctctgacctaggcccccctcagaccacctctcccctcagacccacgcccctcacctggacccgcctcgcggagccgatctgcgtctgctgcacgaaggggttcggcaccggcggcgggaagaaggacgcctgacggggcaccatgggcggccgcagccccacgttcccgacgccggcacctggcactgtggccgccacttccgccgcctgggcgcaccggctcatagttgagccgggcgtagaacccggccgaagcgatctacgcgggcgctgcagccaaaactgagccgaagacctactagagtcccagcctagggcgacgctggggagcctctgcgcaggcgctgaagttacttagacgcctgctgctgccgccctgccccttcggctgtgacacgccccaggctctggccacaccccctcaggcatctggctccacccccttggtaatatagtccatcccctcggaggggaatgttttccttccgagccaagaccctgaagggtaccccaggatccctaacattccacagcgagacactaggcagagttccctgctttagggtcggacggacctggattttcaatcccttttactgggcctgtgacgctggccaaatcactatctctatgaacctcggttgccttccgtaaaatgcagataaatgtattctcagataatcctaacctggatccagtaatgccattgagcaaccacttcccctgggctgttccattaagtgagctaatattaatacacccatgatggcactaggagtggaatttgtttcactcaaaacataatggactgacaggggagagatggttctccagaggaaaactgagctactattaccagaaaaggcaaaaattacagttgccctccacgctagatgaggaacctgacccagaaaagggaaatgtattgggctgtggctccctttcacactgaggaagttcaagcctgtttggacctatgtgggtgctcgtgggggtgggagggcaggggtttgtcccattatctgaggacagttgatcaaccctgagtggctgagagttaaaggaaggagatgataatcaactcatcccaactgatcaactcttctcacagcaggtaggaaggccaggatgaaaatctgagtctgagccctggggttctccaaagttaccctctgaatgtcagaatcttccagccctaccacatagatgtgtggccttgagtcagtcacttaacctgagtttgcttccttgtctaggaatgggagattcattctaactccatagaattgtagcaaggattaaataaaataatgcatgtgtagtgttcatagagaaacactgaagaaatggcatgttttaagcattattatgttgtggagccactgacttttctctcagtgtaacagggaacattaataacagtgcattacagccatgatagaagattccccagtctagggggtcttcaagttgggactggcagacccttgagactctttagccagatacctgcacagaaagatgtctttccaactgtcaacaacctaagccaggccaggtgcagtggctcacgcctgtaatcctagcactttgggggctgaggagggtggatcccttgagcccaggagttcgagaccagcctgggcaacaaagagagactccaccatctctaaaaaaaattaaaaattagctggctgtgctgttgcatgcctgcagtcccagctactcaggaggctgaagtgggaggattgcttgagcccagaagatcaagtctgcagtgagctatgatcatgccattgcactccagcctgggtgacagagaaagacactgtctcaaaaaagaaaaaaaaagaagaagaagaaacaaaaagaatctgagtcaaggggacaggccatgggaggataaaagatagaaaagatggggccgagagtggtggctcacaccaataatcctagcactttgggaggccgagatgggtggattgcctgatctcaggagttcgagaccagcctgggcaacacggtgatacctgtctctaccaaaatacaaaacaaattagctgggtatggtggcgtgcacctgtaatcccagctacttgggaggctgaggcaggagaatcacttaaacctgggaggcagaggttacagtgagccgagattgcgccattgcactccagcctgggtgacagagtgagactccatctcaaaaacagaaaaaagagatagaaacaatgacatcaggctcactgaggaggtcacctgtagagttcactccttacgcaccttcctcaccagccccatcataagaggccagaagcaatatatatactatcaatcagactatcggagccagaaagggcctcagaaaaaccccaggccttcaatttctgttcagcagtagctcca

SEQ ID NO: 1243048 - DNA, 4001 bp, Homo sapiens
ctcattcaaattccagctccactacttccacatatactgatgtgtgaccttaaacaaggtacttgacctctgggagtttcagtttccatatctataaaatagggatactttaaaaaaatctagatcatagcctcatggggattaaattttacatatatatagtgtgtgtgtgacaactagatgttccataaatggttgctggattgctgttactaaaatttctacctctgcaacttccccacctcagtagctcagatttctaccaccccaaacctggattccttccacaatctcccacctgaactctttgcctccaagttcatccttgctaatacattatgcacactgtcacaaggttaatttttcctataaaacagttttcagtttcagctcacccctgctgtaaaacttcagggttcacagtactctcaggacagtctccactcctggatcagcactgccaggcctctgtgcctgattggactcgctggtccccaaacttccccagtccagtctccccattgccctacgcacacagcatgtctatttccttttgcctatgcgggccttttccctgggatccccttcttgaagcttaacttcaccaacccattgtgatctctccttcctttctcagatgccaagcacgcaggcacagtgctcagccagtgcttactggattaaattaaggttggacagtccagtcctctacctctattttcaccaagagtatgctcagggaaggggtcggggaaataaagcagtcattactgagaggacaatgactggcagaatagacttctgggccaggaagggaggcatagggaagacagtattgatggggactgggactgaccaagtcccaatccctccagggaggcacggaagcctgtttgagctgagttaagacagtggccatcctgtcttctggggctaagcagccagcccaagagcaaagggagaggggaacaaacctgtcatcccttggggtgagtcgggaagggacacaattcattgacctaagaagagggtggcctttctagagggacaagaggaggcagtgatgaggatggagtgaccatcccatgagtcccatctcaagggggctactggagataatgattggtcactcatggggtctatggggatggaaatagatagcccctaaagctaagggggaaagggatagcactgcaagctcaataggggtgggaacaggcctatttttgctaaggacaggagcatcattccaggaccgatgggaaagggtggcctgtttcccatgggcagagagagggggctgccaaccctcaggacaaaagagatggagaagccattccaacaggccactgaagacaaaacctgttatctccctggcagatggggcagagtggtcttgcccctggctaaggggaaggagcaaacatcccacggagtgaaagaggtaagggcggccatcactaggggcctaggaatggggaacaggcctatccttgttaaaggaactcagagatcattgcagttgatggggagggagcagtctgtttcccactgccagggagaaggggcggccgtctctgtaggaaatggagagatcatcccaagggaccaatggggataagatcagttacccttcgggacgatgagatggagcggacatcttccagaactgagcggggaggagacagccacttcaagggaaggggatgggcagagggcctgttctcgcggagatgacagggcagctatcttctggggccgatagggaaggggaggacggtcccccaagctaaagggacagagtggcccaaaggaggaaccgttacccagagctagaaggtcccgggatcgggagggcgggtcgtttccgccaggctggaggggccgggctagctatctgacagcccctccccaaagctcaggaccgcgagggcggggcctgtccagagctaggcctgagggcggcttcctctcacctccaggggcagcgactccgccatcgcatccctgccgcctccgcccccactgcgcaaggctttctgggaaatgtagtctcgcctctttggggcggggcttgggaaggaagtgagacctatttccgtcgcaaaagctgacgacttcggtctgcgccggaagtgcatgagctgccgatgtggtgcttagtgattgcggtttcggtcgctctcccgtgtttcccgggctgggtatttgcctcgcaccatggcggtaaggaggatggatagggcggggtccgcaccagcaaagctctccaggggctgtgagagtgaaaactgagaaagaacattaagggatatggggtgggccagagcggggcgccatccctggccagaccgtgctagagctgggctggggggatggcggcgcaggaccataccaggactagtgccagagcggggtgggcatcagtaccagggcaggccagagatctaagtgacctgaggtgggggttaacccagatcgggactacgccagcggaggcctgagagaggcaccattcaactccgctcaggagtacccttggaagagtcgttagcctaaagccagactaccacgggatccagaggcggtattagcttaggattgaattgttccagggcgagcaagaggcgattgatcctagctgcgggtgctggagagatggcgtcagccctaggcagaatggactggaggatgggtggacatcccagggattttgctaggtttctgcactacggggacctggctgagttgcggatggagctctatagctcaccaggctggtggggagaatgaggaggaccgtggcctcctgacggcatctcatcattcctctgcagcccaagggcaaagtgggcacgagagggaagaagcagatatttgaagagaacagagagactctgaagttctacctgcggatcatactgggggccaatgtaagtgcctacctccttgcttctatgcccacttatagtcagttccctagtcctcagccctgcttggtgacgaggagtggtacccgaaaaagctctagaagagagctccagtcaaaaagaaatgagagatctgggcacagagaaagtgctaactagtaaaacacaaagaaaatgaaggcgtgagtcgtagctgaatttgagagctcttcctacctccaagtacacaaaggcttctttcctgggctgagttgggtgtcagaggagagtgggtatttgggattcagggagcagggccctttcttcaaccctgtaagaacaaccttgctcctcccacagcctggcctaattcttggtcagagttgagggagacccatggtttggaggtaacttctgaccccaacctgatcctgtgattgcttgcaggccatttactgccttgtgacgttggtcttcttttactcatctgcctcattttgggcctgggtaagtatctccatcctgggaggtggatgagtgcgtagggtcagtggctggcctttgataccctcattcttgctctgcagttggccctgggctttagtctggcagtgtatggggccagctaccactctatgagctcgatggcacgagcagcgttctctgaggatggggccctgatggatggtggcatggacctcaacatggagcagggcatggcagagtgagtgtcccccaccgccagcccaggtgagcggccccagggctggggcccagatagcccaagaagcacagctacttgtaacttgaaaagggtggaagggagttgcaacttgaaaagggtggaagggcccatatgctgtctttccagctttatttctatccacaggcaccttaaggatgtgatcctactgacagccatcgtgcaggtgctcagctgcttctctctctatgtctggtccttctggcttctggtatgtgggctgggggcgctcccaagaaggggcatctaaccctccccatcttttattccctgcatcttgcttcaagttaccgtttctcttgtaggctccaggccgggccctttacctc

SEQ ID NO: 1243049 - DNA, 4001 bp, Homo sapiens
actttaatctcaaccaaaactcatgttctaccctcagcccaaaacagcctctcctcccaaattcccctttcaatgccaacagtgcatctacctgataacactttcaactattcaaaccattctgtcccttcctcccagatacaggtgtaatgcacaggctttaggccaggctaacctaaactcattcaaattccagctccactacttccacatatactgatgtgtgaccttaaacaaggtacttgacctctgggagtttcagtttccatatctataaaatagggatactttaaaaaaatctagatcatagcctcatggggattaaattttacatatatatagtgtgtgtgtgacaactagatgttccataaatggttgctggattgctgttactaaaatttctacctctgcaacttccccacctcagtagctcagatttctaccaccccaaacctggattccttccacaatctcccacctgaactctttgcctccaagttcatccttgctaatacattatgcacactgtcacaaggttaatttttcctataaaacagttttcagtttcagctcacccctgctgtaaaacttcagggttcacagtactctcaggacagtctccactcctggatcagcactgccaggcctctgtgcctgattggactcgctggtccccaaacttccccagtccagtctccccattgccctacgcacacagcatgtctatttccttttgcctatgcgggccttttccctgggatccccttcttgaagcttaacttcaccaacccattgtgatctctccttcctttctcagatgccaagcacgcaggcacagtgctcagccagtgcttactggattaaattaaggttggacagtccagtcctctacctctattttcaccaagagtatgctcagggaaggggtcggggaaataaagcagtcattactgagaggacaatgactggcagaatagacttctgggccaggaagggaggcatagggaagacagtattgatggggactgggactgaccaagtcccaatccctccagggaggcacggaagcctgtttgagctgagttaagacagtggccatcctgtcttctggggctaagcagccagcccaagagcaaagggagaggggaacaaacctgtcatcccttggggtgagtcgggaagggacacaattcattgacctaagaagagggtggcctttctagagggacaagaggaggcagtgatgaggatggagtgaccatcccatgagtcccatctcaagggggctactggagataatgattggtcactcatggggtctatggggatggaaatagatagcccctaaagctaagggggaaagggatagcactgcaagctcaataggggtgggaacaggcctatttttgctaaggacaggagcatcattccaggaccgatgggaaagggtggcctgtttcccatgggcagagagagggggctgccaaccctcaggacaaaagagatggagaagccattccaacaggccactgaagacaaaacctgttatctccctggcagatggggcagagtggtcttgcccctggctaaggggaaggagcaaacatcccacggagtgaaagaggtaagggcggccatcactaggggcctaggaatggggaacaggcctatccttgttaaaggaactcagagatcattgcagttgatggggagggagcagtctgtttcccactgccagggagaaggggcggccgtctctgtaggaaatggagagatcatcccaagggaccaatggggataagatcagttacccttcgggacgatgagatggagcggacatcttccagaactgagcggggaggagacagccacttcaagggaaggggatgggcagagggcctgttctcgcggagatgacagggcagctatcttctggggccgatagggaaggggaggacggtcccccaagctaaagggacagagtggcccaaaggaggaaccgttacccagagctagaaggtcccgggatcgggagggcgggtcgtttccgccaggctggaggggccgggctagctatctgacagcccctccccaaagctcaggaccgcgagggcggggcctgtccagagctaggcctgagggcggcttcctctcacctccaggggcagcgactccgccatcgcatccctgccgcctccgcccccactgcgcaaggctttctgggaaatgtagtctcgcctctttggggcggggcttgggaaggaagtgagacctatttccgtcgcaaaagctgacgacttcggtctgcgccggaagtgcatgagctgccgatgtggtgcttagtgattgcggtttcggtcgctctcccgtgtttcccgggctgggtatttgcctcgcaccatggcggtaaggaggatggatagggcggggtccgcaccagcaaagctctccaggggctgtgagagtgaaaactgagaaagaacattaagggatatggggtgggccagagcggggcgccatccctggccagaccgtgctagagctgggctggggggatggcggcgcaggaccataccaggactagtgccagagcggggtgggcatcagtaccagggcaggccagagatctaagtgacctgaggtgggggttaacccagatcgggactacgccagcggaggcctgagagaggcaccattcaactccgctcaggagtacccttggaagagtcgttagcctaaagccagactaccacgggatccagaggcggtattagcttaggattgaattgttccagggcgagcaagaggcgattgatcctagctgcgggtgctggagagatggcgtcagccctaggcagaatggactggaggatgggtggacatcccagggattttgctaggtttctgcactacggggacctggctgagttgcggatggagctctatagctcaccaggctggtggggagaatgaggaggaccgtggcctcctgacggcatctcatcattcctctgcagcccaagggcaaagtgggcacgagagggaagaagcagatatttgaagagaacagagagactctgaagttctacctgcggatcatactgggggccaatgtaagtgcctacctccttgcttctatgcccacttatagtcagttccctagtcctcagccctgcttggtgacgaggagtggtacccgaaaaagctctagaagagagctccagtcaaaaagaaatgagagatctgggcacagagaaagtgctaactagtaaaacacaaagaaaatgaaggcgtgagtcgtagctgaatttgagagctcttcctacctccaagtacacaaaggcttctttcctgggctgagttgggtgtcagaggagagtgggtatttgggattcagggagcagggccctttcttcaaccctgtaagaacaaccttgctcctcccacagcctggcctaattcttggtcagagttgagggagacccatggtttggaggtaacttctgaccccaacctgatcctgtgattgcttgcaggccatttactgccttgtgacgttggtcttcttttactcatctgcctcattttgggcctgggtaagtatctccatcctgggaggtggatgagtgcgtagggtcagtggctggcctttgataccctcattcttgctctgcagttggccctgggctttagtctggcagtgtatggggccagctaccactctatgagctcgatggcacgagcagcgttctctgaggatggggccctgatggatggtggcatggacctcaacatggagcagggcatggcagagtgagtgtcccccaccgccagcccaggtgagcggccccagggctggggcccagatagcccaagaagcacagctacttgtaacttgaaaagggtggaagggagttgcaacttgaaaagggtggaagggcccatatgctgtctttccagctttatttctatccacaggcaccttaaggatgtgatcctac

SEQ ID NO: 1243050 - DNA, 4001 bp, Homo sapiens
tttataggtgggggaactgggactcagaaaggcttaaaaaaaaaaaaacttcacccaaggttagagagcttataagatattaatgttaatacagggtacttgagtaacatttttcctccagttttgcaatcattatatggtaaataaacagataaatgatggaattaatttatctgtttattagaaggtttattcagttacacattaattaatctctgtatttttgtagtgaatgttacccattgcatttaaaatagaaattaatccacaaaacatataaacaatgttttagaagcattcaatttctatctaaagaagagtgactattccatgcaaagtaacctcaataaatctgattttaaaaaataggaaactaagaaaaaaataggaaactaagaatgttcactgaaggctgcactaaaaaacatataatggatcagagcagagacaggcaaagtcactgggaaagggaaggatctcaggccaataggcactgacctcattcattcatcattcaatacattatttcttagcatcgtctgtattccagacacggttctagcaactgggatactgtaataagcaagaccaacaagatccttgttctcatggagtttatgttctagtagtaaaggtaaaagcaataaacaaacaaaagacttattctggagaataatataagaataatgttgtggggatatgttcatgatagcttgttaaattaaaaatggtgagctaggcagtggtgtgcacctgtaatcccagctacacaggaggctgaggcagcagaatcacttgaacccgggaggtggaggttgtagtgagccaagatcgcaccactgcactccagcctgggtgacagagcaagactccgtctcaaaaagaaaaaaaaaaaggatatttaccagaatataatgaatgtttctttctgaatggtaggattatgaattacttattttatcccttgtgtttttttctgtactttccaaattctcaacaataagcatgtattacctttgtcatcagaaaaaatgctgatattatctatatgtgtctatagtacaaggatatctggaaggatatataccaaacattactaatagttaactctcaattgtaggatatgaagtgattttgacttttttcagtgtacttttctgtattattaaaattgtaatggactgctatctatttttaaaaaataataaaactactttttaaaaagcataggtttgggggtagaagataatggtaacttcttttgataggattttagtaatggacaaagctaccattcagaaattttagagcctcaatgtttgttcactttttgtttcgaagagaaatgcttctcttcccttcctttaacaaatttatctctaacaatcttgcccatggtaatgtaatcctaattcaataggacaagatcaggaactgattgataactctactgagaaagagttggtaagcatttataggaataagtaatctcatagtatccctatctataacctgtgaacaacaactttagagaatttctaacaattatacccaaagttcaagaaaacaggaatgtacccactgagggccagattatcatcccagataaatctcagtttgcagaataaatacttttattcctgatctgaggattcttacaatttgtgggaaatttctgctggaaaatgaagaaagctaagcaggaattcactatttcctatgtccagaaccaaactttaaaaattttgtaaagaatcttcttaccttttttccacctctaaaagaaaattttcactgttgcccaactgactaaaatgcagcttggcagcttttctctcaccttcacgtacagttcggtcatctggaggcaaaaaccgtggtctgagcatgtttctttttttggcatagacataactagtagttaatcagaaaaccatattcgcagaggaaaaattaggaccagtctcatcttggtgtgttagagacaggtcacaaaataatgctattatgttgtcactggagcaggcaggaactcagggagactgcaggaagccatagcgaccactgcctcacagttgtaactacccttcaggaaagcagagcttggacagtaaacaattcaaaggcctaatgttagggctgaaagtcataccattgtctgaaagagtttacttagtttccctacaattactttcccagggccatgtgaaatccaattttgtatcaataagaaatgtatactcaacaataaaattataaggaagtccagtctgggcaacatgatgaaaccccatctctacaaaaaacacaaaaattagctgggtgtggtggtgcgtgcctgtagttccagctacttgggagactgagatgtgagaattgcttgagcctgggaggtccaggcggcagtgagccaagatcgtgccactgcactccagcctgggcaacagagtgagaccctgtctcaaaataaataaataaataaaaaataaagtaaaataataagaaaatatagaccagctcatttgaaggaatatttcttcaactaagcccccaactaagcccccaaataaattgtattagctttctattgctaatacagttgcaaagttggggcacctggaaaaataattctcaacctggaaattttgtgttgaggaggaaggggcggtgaaaccatcaactgaagaaaactaaagctggaagtaactaataaaatcatagactgtcattcaataaacaataaaagaactcgtcatacatcctgccaacacaaaagagttacataaatattgactaataaacaaatatatcctgccagtgcacactgtgggccaacatccaaaaggttaaggggcagctgatttaaagtaagattctgtggacaggaacagagaaggaaggtcttacctaatttctccagagtttgtagtgtatatacagcaaagagcctataatctgtatctttccttacaacaggattaagtctcaaatccagttctttgaggaagggtaacggttgtagacgggacacttccactaatgaaggaatgttgttataatataaattcaggtcttggagtgaacataaatactggattccctacaaggaaaacaccacattatgaaatggcatattggtaaagactaggaacctcatagataaagatggaaatatatgttactttccgtccttaaacatgttatccaagtccccgtgagaaaggcagggctggaactctcacttaacttgtccgaaaataagaccactgcagtccatgagcactgggtgttccatacgttaaataattcacatatataatacatttccttctttacaaaatctgacactcaaatatctgcagtcaattctccacttctgttggctctccaattattctcccaatgcaatccaatccttcacagtggtttcccagtggccaagccacattagaattctctcacttttgtcccaacccctctcctgatcccaaaagcaccttaatttacaagaagaagggaggtaagcaaaaaagctggttctgggggaaaggggcatggttaaaaaaaaaaaagtgtgtgtgtgtgtatgtgtgtgtgtgttgtgttgtgttctcatatctcagtgcctcacttatatggtcaaaggactatttagggaaacaaaacaatgctatctccaagtcctcactcctggaccagtctaggcctcctagactgttttcctcttcagagttcctgctaccacgcaagcttcccatttaatcaatcagtcagttctcctttgcagaaatgttcttccttgttcagttctctttcttgtggatttagcaaccccaccctctacctaactggcaacagtacaatcaggcctggcaaactcaagaggaaaagccacagttttcttcctctgctgaaacctgctattgaaaagatttcatctttatgtatttagctagttagctgcttttgcccaatactaaatttcaggacaatttcaaaac

SEQ ID NO: 1243051 - DNA, 4001 bp, Homo sapiens
agtcagtgtagggggttggaggtgggtggaggataggtgaggtatacgtgaaagaagcttggccatgaattgatgataactgttgaggtaggctaatagagttcattattctgttatctctactcttgtatatatttgaaaattgccataatataaaattataaaataagtgataaatgcttatatatgtagagaatatttctggaaaactatccaagatactggtaacagtaattgcctttaggaaggggaactaggcctatgagacggggatgggggagtaaagactttcttctcactgtacaatttttattttatttatttattttttcgagacggagtctcactctgtcacccaggctggagtgcagtggcgcgatctcggctcactgcaagctccgcctcctgggttcacgccattctcctgcctcagcctcccgagtagctgggactacaggcgcccgccaccatgctccgctaattttttttgtatttttagtagagacggggtttcactgtgttagccaggatggtctcgatctcctgactcgtgatccgcccgcctcggcctcccagagtgctgggattacagtcgtgagccaccgcgcctggccctcactgtacaattattatattacccacagaataaattaattgaattattttaacagtcaaaatgagtaaatattacatatttcccccctctaccaaattaatcattagactaccgacatgctctagtatatccttcctgttctgttcttgactgcacatcatacgcttcagctaccatctatttctgcagtctcttttacagctaaaattttcagcaaaagttcttactttcactgtctcttcccctcaaatatcatttccctttttcatcccactccaatctggtttccctcctccccaccctcccaaaactccctctgtcaaggtcaccagtaagttccatgttgctaaatctaacagacactctgcatttaagttgctcagcctgtcaatagcatttggcacagttggccattgcttgctcgatacactaccccttctcaaattccaagataccacattcttcctctatacaacctctaaacactgaaatattccaaggttgagtcttaagctttctttcacttctccatcgacattctctccttagctgagttcatccactcccgtagctttaaataccacctattgctaatgtctccaaaattttcatctctaaccctgacctctcctctgaggtccagacccatatatccaactgcctactaggtaccttacacttggatgtctaatagacattttattatttatttattttatttattattattatttttgagatggagtctcgctctgtcgcccaggctgcagtgcagtggtgcgatctcggctaactgcaacctccgcctcccgggttcaagcgattctcctgcctcagcctcccgagtagctgggattatagacttgaaccaccacgccgggctaatttttgtattttagtagagacggggtttcaccatgttggccacgctcaggtgatccacccgcctccgcctcccaaagtgctgggattacagcggtcagccaccgccccccgcagttctgtcacctgcggcagggtcccctgttaaccttgtttctccttccctacttcacactcccctcttctctctcaattcctcgggctctgccccacaccctcccgttacttcagttcctccacctccacctccctctaaccttctgcctcaagttatccccccgccccccagcctcaggtaccgcttctctgtggttccctcgcctctatctcaggttccccgccttccacttcagttttctttccacagcttctgaccctacgttcccagtccacaccctcccggccagaccctacccggctgctccagcgtcagcgcccccaggcggcgaatgccttcctcgtccagctcccattgctccgccatccccgcccgccgctcacctgccaccgcccgcgagaccacccggcgcacgccaggccccgcccactgccccgccccccgcgcgcgcgccgccgcgaccccgggaaccgttattggccgggtcacaagcccgcccgcccgctgctggagccgcgaccatggtacggagcccgctctggcgggggcgccaaaagcaccaaagcggcgaatgggggccgctgtggccaaggattggggctaagtggttcgagacctggctctggggcatgggagagagcgaggggcccccagccgggaaggatttggggggctggctctgaggagttagaataacgctctgtcttgagggatgaagtgttctggctctgaggatgtgggggactccggttctgagggctgggcgtgtgcccctttgacggggtggtcttcatatctcagcgctgggggatgctgactttggggcaaggcgagggtgtgtgtgaaggggagatccaaatctgaaggattggagcgtggggacagaactctaaggcatgatggggagctccagatctgaaaggttgggaatcctggctctgaggagttggggtcctgtctttagagcatgaggaagttctagctctagaaattgacttggacgggctgggcgcggtgtctcacgcctgtaatcccagcactttgggagcccgaggtgggcggatcacctgaggtcaagagttcaagaccagcctggccaacatggtgaaaccccatctctactaaaaatacaaaaattagccgggtgtggtggcacggcctgtagtcccagctactcgggaggctgaggcaggagaatcgcttgaacccgggaggtggaggttgcagtgaaccgagattgcaccactgcactccagcctgggcgacctgagtgacagagccagaccttgtctcaaaaaaaaaaaaaaaaaaaaggtaagaaatttacttggacggagcttcttcgggggagaaggatcagcgtgggaaagagagaagctctttgtaatggggtggggatgactgctttagggctaccccgtttcctgaagtcagtccggcaagaagccttttgtctttcaagcaccacaggttcccctaagcttgcctgtgactgagggctgtcgccaggctgcgatagctctgcactaaccagcccctgagtagtctttgggaaagaacagccgcatccctaacccctaccctcactccagcaggcacttaagagcccacctgtggatgggacatgtatgtaagaaggagccaggaccctcttgtcacaccctatccttaacaagaaaagagggtgggctgggcgtggtggctcacgtctgtaatcccagcactttgggaggccgaagcatgtggatcacgaggtcaggagatcgagaccatcctggctaacacagtgaaaccccatctctactaaaaatacaaaaataaaacaaaataaaataaaataaaataaaataaagccgggcgtggtggcgggcgcctgtagtcccagctacttgaggaggctggaggctgaggcaggagaatggcgtaaacccgggaggtggagcttgcagtgagccaaaatcgtgccactgcactccagcctgggctagagagcgagactccgtctcaaaaaaaaaaaaaaagaaaaaaagaaaaaaagaaaaaaaagaaagaaagaaaagaggaactgagaccagaactggggctcaccttcgagaagtaggttttctttggcatccaacatctgcacactctgagcacccccattgagctctcagccacctttaaggagaacagaaagcagaatcaagggtccttccttgcatatttatgctttctggtctatgtgagacccttagtcactccatttgttacattcagcctttgcctgaacatgaacttgtagaaaggcttttagaagggctgggacttagaattctaggttagctcattagattgacttttctggctctgcttctgtcagttatgcaatcatttcacaatttg

SEQ ID NO: 1243052 - DNA, 4001 bp, Homo sapiens
catcaaatgcaatgaaaagctgatctaaagatatttacaactggagtggaatacacatttttttgaggctagttatatcatggagaatcacacttaatgagatctgactccatcactgtaccaaagaagtcaaggagtcagacgtaaacagctgagcaccaaaaggccattggctccacatatacatgtggcaatgagactgcaaaacccaagctaatcagaggtccatgaaccaccaagggtgacttatagagctggtaatttccaccaacaaaagctacttattaatctaatctttttgttatgaacaaatgcagaggcagtattttgcccaaaattgaatgaagaagaaagctttcaaactctatcgaagactgttaaataatctagatctattcttcctacgtccctttcgttcccacccttaaaaaagagagttgctacctgggagtcacttttaacaagacaataccaaaaaaagcaaaaaaggaactaggttagtcaatacacactgtgagctccaacacatactgtacccatctgcattcttcaagacctcagctgcagaattttatgcccgctgttgaaaagtgttaaaggaaaagttttcttgcccacacctgcagtaaggaagtcgggggaatgatacataaaagtaaaggtaaagtggtatgtgacaaattttaaagctagtctgtgtatacaacacagagctgtgcaacgctagaggaggaatatattttaggatttgcaagcatccaggattaatgtagtgtctttttattgaaaatgttttctttctaaactacacttttaaagttacttgtgaaaaaaagcaaacacttttttgttataacagcttagaaattggttgtgactcacggctcgatgaacatgaggctttctgcaactcccttgcagattgatgtaggcaggcaaagatacactgaacctttataaataaaatagaggggccacaattgttcagtttgtatgaaataaaaatatgggaagcaattcaaaagcaactcaatatacaaagaaagctaaaaagcacttattcacctatgaaataaagtgcaaataatctgcacagccctgagaatgtgccagtgtgaacttacaacttcattactcagcagaaaagaaaacacaaaccacagcaggtatatagttttgcaaagatgcaaccgctttctcctgtgacaaccatcatgatcttgagctcctccctacacagtacaacctacctaacgactgtcaagcgctggctacacagaggctctcctgtgtgctggggggaagggggcagctggaaaagtacttggcagaaacccacgttagaaaagctcagtttacggttccccttgcaatggtacagaaccagagcgggccaggttttcgaggcccatccggctccctcgggtgtagcttcttcccaaggagcctcggaagagttctgccacccggctgccagcgacctggagcccacgctgattccagccctccgccgactccacagttcgcggaggggcacggagccgcggcgcccgccggggaggaagtagcaggacggtacataggaaggaggctgaagccccatccatggcgcagactccgagagaggagcccgacctggacccacggccgcctcagagacgcaccggcttagacaaaggcccggcgcctgcggtcggagcgcgggggaggaggagcgatgccccgcgcaggcgcaggcgcagacgatcgcggcccccgcctcaggccgcccggcggcctcgcctcactcccaccccagaccctcgcctggttggccgctctgactcaccgtcccgagccgtgcccatgagctggtccagcagggcccgcatctgcgcctgggcggacatggtagccggcggaggcgacggggtcggccgcgacgacttctctcaggcaggcggtggcagcggcgtcgacaaacgatggtcgcgtcggcctcgagcccactcggctctttcccgccgcgggggacgccgggaggaagtacgacggcgccggcgcacgccctgctgggaaatgtagtttctggggtgggtgcttagggaggctgaggctctgagtggtcgcaagttgtccaacggcggaaccaaaatcccaaccctgattttactctagacccccaggacctcaaacgagtctctacggagggtaaactacaataaaatgaaatacagtcaatcaaaaacaagatgaatccgtgctttttctaagctagccatgaaaccgtgagcatattatttagctccccgacgctcgtttttttaaatctgtgaaatgagggttctaaaggtgcccctcatatgatttttgtgaaagttaaataaagcatggaattttatttatttatttatttatttatttagagcgagggtcttgctccgtcgcccaggctggaatgcagtggcgcgattaccgctcactgcagcctcgacctccccggctccttatcctcccgcctcagcccggcaaagtattgggattactggtgtgaaccaccacgtttggccatcagtcatggcattaatattaggttctatgattacaacctcgtggtcgtccttttgtgagctcatggtctactgtcccagggactaaagaaaaggcatatgtaagcagttattttatgtgataatagaattatagcatgcacttatgtgtgcatagtctggcatatacttctattatattaaacctctattatttatttatttatttttgagacggagtttcgcccaggctagagtgcaatggcgcgatcttggctctccgcaacctccgcctcctgggttcaagcgattctcctgcctcaacctcccaaagtgctgggattacaggcatgagccaccacgcccggtctttattttttatttgtttattttttttttgagacggagtcttgctctgtcacccaggctggaatgctgtggcgcgatctcggctcactgtaagctccgcctcccgggttgaagcgattctcctgcctcagtctccccagtagctggaatttcaggcgcccgccaccccctccggctaatttttgaatgttaagtagagacggggtttcaccatgctggccaggctggtctcaaagtcttgacctcaagtagccagccaccatgcccagctgatttttgtattttcggtagacacggtgttgtaccgtattggccaggctggtcttgaacttctgaccttgtgatctgcctgcctcggcctcccaaagtgctgagattacaggcgtgagccaccgcgccctgccgtattttatttatttttgagacggagtctccctctgtcgcccagcctggagtgcagtggcgcgatctcggcttcctgcatcctctgactcctgggttcaagcgattctcttgtctcagtctccccagtagctgggattacaggcacccgccatcattcccgactaactttttttttgtacttttgcagagacggggttccgccatgttggccaggctggtcttaaactcctaacctcaggtgatccgcccacctcagcctcccaaagtcctcggattacagctgtgagccagaacgccaggcccctgctctctatttaaaataaataaatagggtgtccgttgggctgctcgggtcggattccgcggtgccagcccttccccatggccgaccctgagaagttgcaggtttcttcgccgcccccgccgcctccttctccctcctcttcagacgcctctgcagcatcttaccctggcagcccagtgagtttgggctggccagttccgagcaggagcagcggccgaacggtggacccgctggaggaagtggggctgcagatcggagacgcagccttttcattaaccaaacttcttgaagccacatctgcagtatcagctcaagtggaagaacttgccttcaaatgtacagaaaaggcacgtttccttaaaacgtggcgggacctatggaaagaaggctatgat

SEQ ID NO: 1243053 - DNA, 4001 bp, Homo sapiens
gatttgagccaggacttagcttctacttgctgcgggtagaagctggcaagcgggtggatgagattcactgattacggggatgggtcccattattccaggatattaaggggcctcttcctttgatctctgaggtcttgtctgtgtcgtctcctttgctggcttctccttctctgggtactctctaaatggtaagaacccaagggatttaggggtcttcctcttttatttacacgctcttcttaggtgatctgggagctcctccctgccttccttatttattatctccaactatgatttttccccgacttgtatatctaacttcttgacaacttcatttgacttgttaatagacttatcaaacttaatatgttcaaaagagaactttcgatattcctttctaaactgttttcccgtagggagttaaccttggttcctccctctcctacacacttcacatccaattccccagcaagtcctgcaagcactacctcccaaatatatgctgaatggaattctctccatttccactgtgactgagggccttttcttttttcttaagacggagtctcactccgttgcccaggctggagtgaagtggcgcgatcttggctcactgcaacctccacctcccgggttcaagcgattctcctgagtagcagagattacaggcgcgtgccactacgcccagctgatttttgtatttttagtagagatggggtttcaccatgttggccaggatgatctcgatctcctgacctcgtgatccgcccgcctaggcctcccaaagtactgggtttataggcgtgagccaccgcgcccggccggccctttcaacactatcttcacctctcctttgtcttacagtgcaacagtctcctaacaggtctaactacttccacccttctctatccagcaggcagagcggatttttaaaaatgtaaatcaggtcaggtcacttcccttcttaaaacccttaaggtacacattagccaaacccctgccttgggctaaaaggcgctgctacagtcatgccacttccccaactacatcacagggcactccggccctggctctgtttgcttcagccacatggccttctggctgtttccaacctaaaagtccttctcattggctcttctctccacccagaaaacccattgtctcggatccccgcaaaaccgtggcctcctttgaacgaccttacccgatttcgaggggccctccccccatcttctgtcacctcatccggtctttggggggcatttctcacttgctgataccttctttattgatttacttaactctctcctgcacacgaatggaaggtaacggagcaacaccctactctcaggtttgaagagcaagagaattacgaagctggctctcacggtcctagggagtctccgttcctgtacgggacctggtgtgggtcaacgttccccagccagacacctctcgcccccggaccggcccctaccatctcccatttacattcgggggtccaaaagattcacagcctccgagggggccccacgccggcacctgagcgtccccacaccaggcctcccctcttggacgcgcgagccacttccgtgaggcaggtccccgaggccggtggcgatgacaccgagccgcccccgcgaagctggggtcacacaggcccgtctcccggcaacgccgcagcccaacctccaaaccatccctgcccgtggggagccaaccccttccccgccagtctcccgcgcctggagtcggcgcctccatcccctacactcactctgcgtcagtcctgccttcccccacccacagaagcgcgcagcccgcggcgggctgggaggaggcggcgccaggagcccagcagagccgtggccgaccgagcacaggctggtccagtaggccaggccggaccaaaccaccgggcccacctctgtgggagcaccagttccaggtctgggggagtctcgactgactgactctacccatctcccgccgcatccaacaataagctgagctcctcctccccctatttttcctttacgctttcattatcctccccgctccattcccgtaaaacaagaaaaaaaaatggtccagcccagctccctccgggttgctaggtctttgcccttacttggcgacggcttcgtacgtctttatgtgcgtcgtgacgcaatcttccactcgttccctccttgcccctctcccattctccctcctggagctggcggccggcggggttaccggaagtgatgatgcaggaggcgatggagggggcggggcttcggggcggccgccgccggtgggccgcagatgaagaggaggcggtggcagtggtggaagaagaggcggcggcggcgggggtagggagcctggaaacgcgagcggggatggtaggtggtttggacccgccgggccgccgtcgtttccagaaagggtttgactggaggaacctctggagcagctgtgagttttggggagggggggagttgaggaaaaggcgggggggcattgagagatgaaggggcgggggttgggtaccttcgagaaaggggggtggaaagggaggagtggaagtcagcgcgttgtctggagtggtacctctgaaagaagaggctgtgaggggagcctgtggcgtgtcagccgcagggctcagaaaacttacctactgtccctgcctccccaccgccagcacccctcaacccagggcctggggatatggggttggagctgccctggagggggtgcagactctggtcctctgtcctgggtgagcgctgtgaggtaggagccctagggggaggtggtgggtgaatctcccagctccctccgccctcatttccctccccacccccatcgttctctttaatcattaacagccctggaattaaggggctcagacctgaaggcctttttgtgcacctttgctataaacgataaccatctgtgtccgaggtaatgaggctggaggctttgcctgtatcctctataggaagtgggacggggtgacaaatgtattgtttgttcctccaccacaccccccgcacttctcacccctcatcctcccccatgcacacccctggtttccactttaattctctgtggctgagtggcaatagtggatttttttttcttcccctttcctcctttatggcacttagtgccttggttacctcttttgaatttggtgttcagcctctatcccagatcttaactgtaagctttgtaatacttcatacaggctgtcacgttgggagtacctcttacgctccgattataatgagcattttcttttatgaatactggaattccagagcctttgcaaggaatcctgaatggcatcatagcccaggaatcaaggtctcttgctcgaaatactttatgtgtgaggaatttacatgttgtcagctcttcccaaaatgatttgctaggctaattctggatttctgtgtttctctccacccacttttcatgatgcacttcagagaacagaaaaccccatattacttttttgtttctacaattggacaatagctcttttatgtttttctccatttatgtgtgacacacaaatcatcagtgacacgttcagcttgtgctgattttcatctttacgtagctgattctttgtgtatgggggtcctaaatgagacagtgtgatctgtttagttttggtttaagggcgaatacaaaccaataacggatgtgaaaaaattatttgaagcaaagaatggaaagaaggcctctttgttgatatgctgttggtttaaaaaaaatcaaggagcactcttctagcctctcagacagatatcagagtgaagtgttatgattttccttttggtgttgatacattcttcggaaatcttttgtagaatctgaaactgttttctgaagaactttaagagatagtgcctacattttcggagtcctttgattagaaagtgcccgtaagtcctgtccttctgtaactgagcttgatatgcatagtgctaggaagatctgat

SEQ ID NO: 1243054 - DNA, 4001 bp, Homo sapiens
aacttcaaatctaggccaacccttcagctcagagagaagagctttatccatggccactctgctggtcagtggcagatccaggattgaaacccaggccttcttattcatcttctgataccctttacactatattgtggaactgatcgtaattgtggtgggcttggcagcagtggcagggacaaaagcccctttttgtgagaagctgttggattgtatggctgataccttatgaacacagtgttcctgcccagctacaaccaccatatggacaaggctctgtaccaggagccaggaagacacaaataagaaacagtacctgggggagacagccatataaacagacaatttatccaaaaagtcaggttttctataacggacacaaattacctgagcacaagtccaaaagcactgacagctgggagagggagggagggaagagatttgagccaggacttagcttctacttgctgcgggtagaagctggcaagcgggtggatgagattcactgattacggggatgggtcccattattccaggatattaaggggcctcttcctttgatctctgaggtcttgtctgtgtcgtctcctttgctggcttctccttctctgggtactctctaaatggtaagaacccaagggatttaggggtcttcctcttttatttacacgctcttcttaggtgatctgggagctcctccctgccttccttatttattatctccaactatgatttttccccgacttgtatatctaacttcttgacaacttcatttgacttgttaatagacttatcaaacttaatatgttcaaaagagaactttcgatattcctttctaaactgttttcccgtagggagttaaccttggttcctccctctcctacacacttcacatccaattccccagcaagtcctgcaagcactacctcccaaatatatgctgaatggaattctctccatttccactgtgactgagggccttttcttttttcttaagacggagtctcactccgttgcccaggctggagtgaagtggcgcgatcttggctcactgcaacctccacctcccgggttcaagcgattctcctgagtagcagagattacaggcgcgtgccactacgcccagctgatttttgtatttttagtagagatggggtttcaccatgttggccaggatgatctcgatctcctgacctcgtgatccgcccgcctaggcctcccaaagtactgggtttataggcgtgagccaccgcgcccggccggccctttcaacactatcttcacctctcctttgtcttacagtgcaacagtctcctaacaggtctaactacttccacccttctctatccagcaggcagagcggatttttaaaaatgtaaatcaggtcaggtcacttcccttcttaaaacccttaaggtacacattagccaaacccctgccttgggctaaaaggcgctgctacagtcatgccacttccccaactacatcacagggcactccggccctggctctgtttgcttcagccacatggccttctggctgtttccaacctaaaagtccttctcattggctcttctctccacccagaaaacccattgtctcggatccccgcaaaaccgtggcctcctttgaacgaccttacccgatttcgaggggccctccccccatcttctgtcacctcatccggtctttggggggcatttctcacttgctgataccttctttattgatttacttaactctctcctgcacacgaatggaaggtaacggagcaacaccctactctcaggtttgaagagcaagagaattacgaagctggctctcacggtcctagggagtctccgttcctgtacgggacctggtgtgggtcaacgttccccagccagacacctctcgcccccggaccggcccctaccatctcccatttacattcgggggtccaaaagattcacagcctccgagggggccccacgccggcacctgagcgtccccacaccaggcctcccctcttggacgcgcgagccacttccgtgaggcaggtccccgaggccggtggcgatgacaccgagccgcccccgcgaagctggggtcacacaggcccgtctcccggcaacgccgcagcccaacctccaaaccatccctgcccgtggggagccaaccccttccccgccagtctcccgcgcctggagtcggcgcctccatcccctacactcactctgcgtcagtcctgccttcccccacccacagaagcgcgcagcccgcggcgggctgggaggaggcggcgccaggagcccagcagagccgtggccgaccgagcacaggctggtccagtaggccaggccggaccaaaccaccgggcccacctctgtgggagcaccagttccaggtctgggggagtctcgactgactgactctacccatctcccgccgcatccaacaataagctgagctcctcctccccctatttttcctttacgctttcattatcctccccgctccattcccgtaaaacaagaaaaaaaaatggtccagcccagctccctccgggttgctaggtctttgcccttacttggcgacggcttcgtacgtctttatgtgcgtcgtgacgcaatcttccactcgttccctccttgcccctctcccattctccctcctggagctggcggccggcggggttaccggaagtgatgatgcaggaggcgatggagggggcggggcttcggggcggccgccgccggtgggccgcagatgaagaggaggcggtggcagtggtggaagaagaggcggcggcggcgggggtagggagcctggaaacgcgagcggggatggtaggtggtttggacccgccgggccgccgtcgtttccagaaagggtttgactggaggaacctctggagcagctgtgagttttggggagggggggagttgaggaaaaggcgggggggcattgagagatgaaggggcgggggttgggtaccttcgagaaaggggggtggaaagggaggagtggaagtcagcgcgttgtctggagtggtacctctgaaagaagaggctgtgaggggagcctgtggcgtgtcagccgcagggctcagaaaacttacctactgtccctgcctccccaccgccagcacccctcaacccagggcctggggatatggggttggagctgccctggagggggtgcagactctggtcctctgtcctgggtgagcgctgtgaggtaggagccctagggggaggtggtgggtgaatctcccagctccctccgccctcatttccctccccacccccatcgttctctttaatcattaacagccctggaattaaggggctcagacctgaaggcctttttgtgcacctttgctataaacgataaccatctgtgtccgaggtaatgaggctggaggctttgcctgtatcctctataggaagtgggacggggtgacaaatgtattgtttgttcctccaccacaccccccgcacttctcacccctcatcctcccccatgcacacccctggtttccactttaattctctgtggctgagtggcaatagtggatttttttttcttcccctttcctcctttatggcacttagtgccttggttacctcttttgaatttggtgttcagcctctatcccagatcttaactgtaagctttgtaatacttcatacaggctgtcacgttgggagtacctcttacgctccgattataatgagcattttcttttatgaatactggaattccagagcctttgcaaggaatcctgaatggcatcatagcccaggaatcaaggtctcttgctcgaaatactttatgtgtgaggaatttacatgttgtcagctcttcccaaaatgatttgctaggctaattctggatttctgtgtttctctccacccacttttcatgatgcacttcagagaacagaaaaccccatattacttttttgtttctacaattggacaatagctcttttatgtttttctccatttatgtgtgac

SEQ ID NO: 1243055 - DNA, 4001 bp, Homo sapiens
gttcaaaagagaactttcgatattcctttctaaactgttttcccgtagggagttaaccttggttcctccctctcctacacacttcacatccaattccccagcaagtcctgcaagcactacctcccaaatatatgctgaatggaattctctccatttccactgtgactgagggccttttcttttttcttaagacggagtctcactccgttgcccaggctggagtgaagtggcgcgatcttggctcactgcaacctccacctcccgggttcaagcgattctcctgagtagcagagattacaggcgcgtgccactacgcccagctgatttttgtatttttagtagagatggggtttcaccatgttggccaggatgatctcgatctcctgacctcgtgatccgcccgcctaggcctcccaaagtactgggtttataggcgtgagccaccgcgcccggccggccctttcaacactatcttcacctctcctttgtcttacagtgcaacagtctcctaacaggtctaactacttccacccttctctatccagcaggcagagcggatttttaaaaatgtaaatcaggtcaggtcacttcccttcttaaaacccttaaggtacacattagccaaacccctgccttgggctaaaaggcgctgctacagtcatgccacttccccaactacatcacagggcactccggccctggctctgtttgcttcagccacatggccttctggctgtttccaacctaaaagtccttctcattggctcttctctccacccagaaaacccattgtctcggatccccgcaaaaccgtggcctcctttgaacgaccttacccgatttcgaggggccctccccccatcttctgtcacctcatccggtctttggggggcatttctcacttgctgataccttctttattgatttacttaactctctcctgcacacgaatggaaggtaacggagcaacaccctactctcaggtttgaagagcaagagaattacgaagctggctctcacggtcctagggagtctccgttcctgtacgggacctggtgtgggtcaacgttccccagccagacacctctcgcccccggaccggcccctaccatctcccatttacattcgggggtccaaaagattcacagcctccgagggggccccacgccggcacctgagcgtccccacaccaggcctcccctcttggacgcgcgagccacttccgtgaggcaggtccccgaggccggtggcgatgacaccgagccgcccccgcgaagctggggtcacacaggcccgtctcccggcaacgccgcagcccaacctccaaaccatccctgcccgtggggagccaaccccttccccgccagtctcccgcgcctggagtcggcgcctccatcccctacactcactctgcgtcagtcctgccttcccccacccacagaagcgcgcagcccgcggcgggctgggaggaggcggcgccaggagcccagcagagccgtggccgaccgagcacaggctggtccagtaggccaggccggaccaaaccaccgggcccacctctgtgggagcaccagttccaggtctgggggagtctcgactgactgactctacccatctcccgccgcatccaacaataagctgagctcctcctccccctatttttcctttacgctttcattatcctccccgctccattcccgtaaaacaagaaaaaaaaatggtccagcccagctccctccgggttgctaggtctttgcccttacttggcgacggcttcgtacgtctttatgtgcgtcgtgacgcaatcttccactcgttccctccttgcccctctcccattctccctcctggagctggcggccggcggggttaccggaagtgatgatgcaggaggcgatggagggggcggggcttcggggcggccgccgccggtgggccgcagatgaagaggaggcggtggcagtggtggaagaagaggcggcggcggcgggggtagggagcctggaaacgcgagcggggatggtaggtggtttggacccgccgggccgccgtcgtttccagaaagggtttgactggaggaacctctggagcagctgtgagttttggggagggggggagttgaggaaaaggcgggggggcattgagagatgaaggggcgggggttgggtaccttcgagaaaggggggtggaaagggaggagtggaagtcagcgcgttgtctggagtggtacctctgaaagaagaggctgtgaggggagcctgtggcgtgtcagccgcagggctcagaaaacttacctactgtccctgcctccccaccgccagcacccctcaacccagggcctggggatatggggttggagctgccctggagggggtgcagactctggtcctctgtcctgggtgagcgctgtgaggtaggagccctagggggaggtggtgggtgaatctcccagctccctccgccctcatttccctccccacccccatcgttctctttaatcattaacagccctggaattaaggggctcagacctgaaggcctttttgtgcacctttgctataaacgataaccatctgtgtccgaggtaatgaggctggaggctttgcctgtatcctctataggaagtgggacggggtgacaaatgtattgtttgttcctccaccacaccccccgcacttctcacccctcatcctcccccatgcacacccctggtttccactttaattctctgtggctgagtggcaatagtggatttttttttcttcccctttcctcctttatggcacttagtgccttggttacctcttttgaatttggtgttcagcctctatcccagatcttaactgtaagctttgtaatacttcatacaggctgtcacgttgggagtacctcttacgctccgattataatgagcattttcttttatgaatactggaattccagagcctttgcaaggaatcctgaatggcatcatagcccaggaatcaaggtctcttgctcgaaatactttatgtgtgaggaatttacatgttgtcagctcttcccaaaatgatttgctaggctaattctggatttctgtgtttctctccacccacttttcatgatgcacttcagagaacagaaaaccccatattacttttttgtttctacaattggacaatagctcttttatgtttttctccatttatgtgtgacacacaaatcatcagtgacacgttcagcttgtgctgattttcatctttacgtagctgattctttgtgtatgggggtcctaaatgagacagtgtgatctgtttagttttggtttaagggcgaatacaaaccaataacggatgtgaaaaaattatttgaagcaaagaatggaaagaaggcctctttgttgatatgctgttggtttaaaaaaaatcaaggagcactcttctagcctctcagacagatatcagagtgaagtgttatgattttccttttggtgttgatacattcttcggaaatcttttgtagaatctgaaactgttttctgaagaactttaagagatagtgcctacattttcggagtcctttgattagaaagtgcccgtaagtcctgtccttctgtaactgagcttgatatgcatagtgctaggaagatctgatgctaggaagtcctattcagggctttcgggccctaaaaaacagaatatttaatgcttgattataccagtaacagcgtgtttagatgtttcacaaaaatacaacagaagaatgactactgttctcactttaactgatttagaacctagtttgccattgactaaaaagttcacagttcattaattcaacaaacatttattgactcctaagtgctagccagtgtttcaggcactgggtgtacacaggtgaacacaagcaaaaggttcaccctttcatggagcttacatcggagtgggagctggggacagagagagacataatatatatcccagtaaaccagattttgatcaagcgctgaagaaaataagagt

SEQ ID NO: 1243056 - DNA, 4001 bp, Homo sapiens
taggcgtgagccaccgcgcccggccggccctttcaacactatcttcacctctcctttgtcttacagtgcaacagtctcctaacaggtctaactacttccacccttctctatccagcaggcagagcggatttttaaaaatgtaaatcaggtcaggtcacttcccttcttaaaacccttaaggtacacattagccaaacccctgccttgggctaaaaggcgctgctacagtcatgccacttccccaactacatcacagggcactccggccctggctctgtttgcttcagccacatggccttctggctgtttccaacctaaaagtccttctcattggctcttctctccacccagaaaacccattgtctcggatccccgcaaaaccgtggcctcctttgaacgaccttacccgatttcgaggggccctccccccatcttctgtcacctcatccggtctttggggggcatttctcacttgctgataccttctttattgatttacttaactctctcctgcacacgaatggaaggtaacggagcaacaccctactctcaggtttgaagagcaagagaattacgaagctggctctcacggtcctagggagtctccgttcctgtacgggacctggtgtgggtcaacgttccccagccagacacctctcgcccccggaccggcccctaccatctcccatttacattcgggggtccaaaagattcacagcctccgagggggccccacgccggcacctgagcgtccccacaccaggcctcccctcttggacgcgcgagccacttccgtgaggcaggtccccgaggccggtggcgatgacaccgagccgcccccgcgaagctggggtcacacaggcccgtctcccggcaacgccgcagcccaacctccaaaccatccctgcccgtggggagccaaccccttccccgccagtctcccgcgcctggagtcggcgcctccatcccctacactcactctgcgtcagtcctgccttcccccacccacagaagcgcgcagcccgcggcgggctgggaggaggcggcgccaggagcccagcagagccgtggccgaccgagcacaggctggtccagtaggccaggccggaccaaaccaccgggcccacctctgtgggagcaccagttccaggtctgggggagtctcgactgactgactctacccatctcccgccgcatccaacaataagctgagctcctcctccccctatttttcctttacgctttcattatcctccccgctccattcccgtaaaacaagaaaaaaaaatggtccagcccagctccctccgggttgctaggtctttgcccttacttggcgacggcttcgtacgtctttatgtgcgtcgtgacgcaatcttccactcgttccctccttgcccctctcccattctccctcctggagctggcggccggcggggttaccggaagtgatgatgcaggaggcgatggagggggcggggcttcggggcggccgccgccggtgggccgcagatgaagaggaggcggtggcagtggtggaagaagaggcggcggcggcgggggtagggagcctggaaacgcgagcggggatggtaggtggtttggacccgccgggccgccgtcgtttccagaaagggtttgactggaggaacctctggagcagctgtgagttttggggagggggggagttgaggaaaaggcgggggggcattgagagatgaaggggcgggggttgggtaccttcgagaaaggggggtggaaagggaggagtggaagtcagcgcgttgtctggagtggtacctctgaaagaagaggctgtgaggggagcctgtggcgtgtcagccgcagggctcagaaaacttacctactgtccctgcctccccaccgccagcacccctcaacccagggcctggggatatggggttggagctgccctggagggggtgcagactctggtcctctgtcctgggtgagcgctgtgaggtaggagccctagggggaggtggtgggtgaatctcccagctccctccgccctcatttccctccccacccccatcgttctctttaatcattaacagccctggaattaaggggctcagacctgaaggcctttttgtgcacctttgctataaacgataaccatctgtgtccgaggtaatgaggctggaggctttgcctgtatcctctataggaagtgggacggggtgacaaatgtattgtttgttcctccaccacaccccccgcacttctcacccctcatcctcccccatgcacacccctggtttccactttaattctctgtggctgagtggcaatagtggatttttttttcttcccctttcctcctttatggcacttagtgccttggttacctcttttgaatttggtgttcagcctctatcccagatcttaactgtaagctttgtaatacttcatacaggctgtcacgttgggagtacctcttacgctccgattataatgagcattttcttttatgaatactggaattccagagcctttgcaaggaatcctgaatggcatcatagcccaggaatcaaggtctcttgctcgaaatactttatgtgtgaggaatttacatgttgtcagctcttcccaaaatgatttgctaggctaattctggatttctgtgtttctctccacccacttttcatgatgcacttcagagaacagaaaaccccatattacttttttgtttctacaattggacaatagctcttttatgtttttctccatttatgtgtgacacacaaatcatcagtgacacgttcagcttgtgctgattttcatctttacgtagctgattctttgtgtatgggggtcctaaatgagacagtgtgatctgtttagttttggtttaagggcgaatacaaaccaataacggatgtgaaaaaattatttgaagcaaagaatggaaagaaggcctctttgttgatatgctgttggtttaaaaaaaatcaaggagcactcttctagcctctcagacagatatcagagtgaagtgttatgattttccttttggtgttgatacattcttcggaaatcttttgtagaatctgaaactgttttctgaagaactttaagagatagtgcctacattttcggagtcctttgattagaaagtgcccgtaagtcctgtccttctgtaactgagcttgatatgcatagtgctaggaagatctgatgctaggaagtcctattcagggctttcgggccctaaaaaacagaatatttaatgcttgattataccagtaacagcgtgtttagatgtttcacaaaaatacaacagaagaatgactactgttctcactttaactgatttagaacctagtttgccattgactaaaaagttcacagttcattaattcaacaaacatttattgactcctaagtgctagccagtgtttcaggcactgggtgtacacaggtgaacacaagcaaaaggttcaccctttcatggagcttacatcggagtgggagctggggacagagagagacataatatatatcccagtaaaccagattttgatcaagcgctgaagaaaataagagtgatgtgattgaaagtgtcttaactgtagatgcagtcaaagaggatctttctgaggaagtgacacttaagttgagctttaagtataaagaaggagccagccatccaaagaaaaggggaagatccttccaggttcagggaacagctggtgcagaaactggctggaatgcgcttgtcaagttccagggaatgggaagaaagggtcagggtaggtgggaggtagtggaaagaggatgggttgggtgagtaatagccagagcttagtgaacacgggggagagttggagataaggtcagagaggtggatatggggctcagaataggtaggcaaacaaattgccagaaggagtaggaagtagaaaatgatgctgcttgttgattaattctgtcgccttaactagggtcttatcacttactgtttttgcaggtactgt

SEQ ID NO: 1243057 - DNA, 4001 bp, Homo sapiens
gccggacccccgcggagcacttatcagggtggctagctggaatcgcgtgtcagactcacatgaaaaactcgggagaggacgggttgtcgctgctcgagccgttttctcggaagccgctgctcaccaacttctcgtatttctccttgtacgcgtccctctcgcgcaccagcctggagatctcctgcttgaggtggtcgacttgctgcagcagctggttcttctccgactccaggacgtgtctctgctgcaccctcttgaagcggcaggactgggcatagccgcggtttttcagggtccgcctcttctgcttcagccggatcacctcctccttgctgaccccgcgcagctgccggttcagctcgcgcacagacatggtcaccagctgctcgtcggagaagcggtcgtcgaagtgcaggccgccggcggcgtggtgcgggtgcagggcgccccccgcccccgccgcgcccccgccgcctccgccgccgccgccgccgccgccgcccccagcgctggccgggccaccgccgcccgcgcccccagcgccaccggccgaggcggccgcgctgcccgcggcgccgggcgcgccggccgtcgggtggtggtggtggccggcggcgtggtggtggtggtggtggtagtgcgggcccgcgccgctctgcgcggcggccgcggcgatcacggcggacaccacggcggcggcggggcccatctcctcgccgctgccgcccaaggaggcgccggcaccggccccggccgccgcggccagctgctgcgccccgcgcgcgtagccatcgaagccgccctggagctggtggctgttgctgatgagcgcctcgaccgcgtcctcggggctgaagcccagcgcctcggggttcagctgctgcgggtagccggtcatccagtagtagtcttccaggtgcgccttctgctcgctgcccgagcccgggctgggcgccgagaagctgggggaagggggcaccgagctgcacggcgtgctcatgggggtggaggacagcgagcccccggcgatgagacggccgcactggctgatgatgcggtcggtctccaccggttcctttttcacttcaaacttcatcagatcgaagtcattaacatattccatggccaggggactggtgggcaggtcggagttgctcattgccagttctgatgccattctcctgccgccgccgccgccgccgccgccgctccgccagatgggctgcaggagaggggccagcgggctgtgctgggtggccagcgggtgagccagcttgccgggctggggcgcttctagcttgcgcggcggtggctggcccgaaacctccgagcgcgctcacacacacacccccccgccctgcccgcgccccccgcgcccgccctccctcccccctgctcacgccaatgtgctccctcgctcgccccggcccctccttgctcgctcgcctccttgcgcgccgagccggcggcttcaggctcgggaagatcctccgcgagctgcggtggcggcggtggtggctgcggcggcgaagctggaggagcccggcccggtgcgcggcgtcccccgctcgccgctccgctgcgcgctttgcataaggaagggctcgcctcgccggcccgggctgcaggcagggcgcgcgcggcgtccgctcggggctggaggcgcggcgggcgtctgtccgggcggcgcgggccttggcacgggggagttaacacttcatgcttctcgcctcctcttctgcttggctctctttattattttttttctttcctctctctccctcgcgcgctctctacctctgtgcaaagtgcaaggcagaggtgcagcccgactggaggagagggaggggggagtttagttctttcttgcctttttttaaaaaagcaaaatagcgaagtcctggggaaagacgaggcagagagcaaaggggggagggggaggccaagccgacaagcagcccgagctacagctagaagatgaaaaaagattttaaagcctctgatccagcaagaagagtttaaagcaattgctgagttttatagcactcgtgacgtcaggtccaaatgagaaattgactggcactccgggccaatgggaggcggcgagagcggccgcgattagcataatagtatagaaacaaggaaacttttcggagctgtcaatcagggcccaatcagctgactgtcagctgggacgggctggcttaacccttcctgcgccgctgcctacccgggagggaacgaggcccggcgcaaagtttggtgtaagaggggaaggagtttttccagaggggcttcggcaatccgggcggacctgggagggcggtttgcttttctttggagcgcgagacaggcctcccatccggagccccagctcgctgggggctcactcggctgggattggcctgattcccctcccctgcctgccctccacccccaggattgtgaattcgcctcccagcttttcctcctcgcaccaactctggtacccaggtgtctgccggggaccttccttccctgagcctggccgtgcccggcgctcaaacttggccccaactctttgtccgtctctcgggcgcccgtgcggggaagggaccgggaagggagggatgcagtggggtgtccggatcggggctgcgggctgggcgccgcccggccatgcgcctgcccagaaggctgggcatccgtggagagggaaagcccattttatccctctctttacaacgaggtaaaataagttgtttagaggccattcttcacggagaccggctgcccgctggcgtcgcgtgcccttggacagagcgagcgcctatgcgagataactccggggaagctcaaagtcaggtcagccgggctcagccttccggctcctgactggccggagtttggcctttgagactcatattgcgcgctcgctctctctctctcttacacacacacacacaaacacacacacactcacactcacccgtccccttacgaaatctgacctctgtttatcagggtcaggcgcgccctttgcacttttacgtttcctttaattatttcggacttgatcgtggcagggagcaagggggaaaaacaataccccagccctcaccagctaccctcgaagggttaaattttaaaccgcggtttctggaactagtccggaaacgcagagtggggggtggggtgggggaggctgctccccccacccccagttgcaaatgctaataagtagttcaaatttctagattgattctctaaaagtttatgcaaaaaagaaataaaaaagaaaaagaaaaaagaaggaaaccaacaactaactctgtttctaagattttaaagcgataggcaagtcgaagaagcagagatttatttggagagaaagctcctgaaaccgacccagcctttggaagaccagcccgtctgcttagaagttgggactgttgattccttcaattaatgaaatgcatttggtgtttttaatcgtatttattttactttatgagaagggggagacgctaggagggtgcattaaaaaaaaaaaaaaattctgaaaagcctgcaaaaggatcgaagagtggaaactattgttggagcgagttggtttttacctcaacagcgccacctttcggcaaaggtcagttgaaattgatccgtgtccagttttgtcgatgaagtgaaaagcagctggttacccagtgtgggaggaggaaagagacacacaaagttagtttgactgaagtgggagaacccgaccctataggaaaggggccgaagaaagtgctggcagatgcagagatcatttttgcccctcctcttctccttgattgttgacaaagaggccaggggatacagacaccctcggggtgtaatttctggctgagacctttgcaagaggatccccatgtaacagggccccaaaccctttaaaagtgccaggatggattttcaacgggctttatggcaatatcaataggattaaagttacttgtaattcagtgataaatgagatg

SEQ ID NO: 1243058 - DNA, 4001 bp, Homo sapiens
taaaggggagggggcaaaataaaggtgagccaagggaaaaaaccctgaaaatacagtatatacaaggtccatacatcaatgggaaaaaaatggggcattattgctggtctaccctcagggccacttttaggttccaggaaattccttgttcggatgtgttagtctcacatttcctacccttactacccactcttcgcagagacttttccagaataacccaaaagtactaagcaaaaaagaaaataactatagtttctgttatgagaaaaagggcatctctcctacataaatgttcccagttaacttttcattggtgaaaacagaagccaggtctgaggggggccgctggatcgctttagcccgggaggtcgaggctgcagtgggctgtgattgcaccactgcactccagcccaggtgacagagtgagaccctgtctcaaaataaaaaagaaaagaaaatctgtctttaatgctgctctcagggctcaataagcctagacactacagtaaagagttcattaaggtgactaacaagaaaactactaacaaaaaaggcacgtgtaagtcttgctaaccaacggactgcctcaagaggctgtctgaaaagatatgcttggcaagctaaggtccattttaatttgcttaagtttctcaggcataagaaaaaaaataatggtcaatgagacctgcaaaactatatccaaactcaaatgaatgctaaactctttctagactccgggaaactaggcaaaagcagacaaacagcaccactgtgtgggctcctgacgaggatggcggcaggcattcgcagtccaccgcgatgaacacggtgcttcccttccaaaccggtgtctggaacttaggcaacaacagatacctggatctgcggcgttctcttgctcaagcgggaaataatcacttcgcatcatctgcgtggagtaaatattgtgatggtgacacctgcacgtttaaccaaatgccagcacacctaagctgggtttccagtctgaaccggcagaaaagggatgtattcggtattcctggtgccaaggtgagaacgtaatcgcaaacccaagagaagtctcccaccccagctcctgggctacagacaggaactggcaacaccgctgtgggccgtcccgggcgcggcgaggccggggcccagcacattcccctcctctcgaccgaggcactgaggtctgtaagaggcactcgcacccgggcgggctccctcgacgggaaaaccagccctgaaggtgacgcgctgggtcccggcgcagccccgcttcagagccgaacggcccagcgcggccccgggggctgttgggccccagaagcgcgaccctcgcccgcagcgcgcttgcgggggcggcggtggccggggtacggcaggcaccccgccgcggagggcgcggggtgattcagcaggcccggggccccgagcgcaccggcccccgcccgccctccgccggctgcctcctcccaggcctccgagaggtccgcaggccgccccggcccagaccagcccctggccctcccggctcggtcccggcctgggtccctcacggggccccgggccccgcatccctcggccccgccggccggcagccaccggccccgctcggcctcccggctcggccccgacccctcacggcgtcccaggccctgccgccctccacagctcggaccccggccccgccgcacccgccgccctcgcggcgacactcaccgaaggtgcggcgctgcttgaaggtcttctccgacggcatggtgcagggatctgggcggcggcggcggcgacgacgcgagggtcccggcggctcccgggggcggcggctgctgcggcggcgaatccgactctggcgatagccacttcccttgtatctcctcagcccgcagcctggtcaggtgactcgcgacgcgtcaccgaggggcggggccagagccggccggggccgccgccatgacgggcgtggcggaacccagcagcggcacgcagcgtgggggcggagcaggtgtgtgcgcgtgcgcgatgggcgaaacgcgcgctctgcgcatgctcccggtcgtgccccagccccgcccagcaccgctgggcgcctgaggcccctgaggtgacggttgtgggctgggccgcaccccgggtctgtgggcgctcgggagcctgctgcccggccctgaggagatggcagcgcggggcgggggaggctgagccacaggcggggtgtcccggggcactcttgagggaggggtcagaggaagggacatggggcaaatccgaccatcctttcccctccagagagacttggtggtgctgcccgagacgccggcacccggggctgaggcgcgcagggcaggccgcgccgtctccgggaggcagggtcgccgctcgcccgtggagccctggccccctctgcgtgcaggggcgcgcgtggtccgtgggtggcttccggggagtggccgctggtgacctccgcccgcggtcactcgacgcccagccttggcgcgtttgcgcaactgcttttgtcccgagccttcattctgggcgcagtcccctctcccagtccccctgccgcggcgcctggaactctcctggtggctgtaagattttcctaccgttaggtcgtctgtggcgactgccaggcctgccccacatcgctagccgccctgtctacccctcagcctcccagccactaaactcgctggacaaccttacgctagtgacagtttttgagtctcagactcatctgtgaaagggcagtcatatttgaggactccaaatgggctgcagtgcgtaaaccaccatgcgatatttggttgctattgcccacctcagcctgtggccaatgtgtctctgtaggaacagcactagattctttggggtttttttgagacagggtcttgctctgttgcccagcctggaatgcagtggcacgatcatagctcgcggcggcctcggtcgcctgggctcaagggatcctcctgcctcagcctcccgagaagctgggagtagagccgggatctcgctgtgttgcccgggctggtcttgaactcctggcctcaagcaaccctcccgcctcggcctccttaagagttgggattacaggcgtgagccactgctcccggctatttggctgtttttgttctttaacatctaatactttgaaagagccccatagttccaggatttctccttttgactttgtaaaagcctttcttctatcccaattggataaagtaattggattaggctaatacactctacactgtaagcttgaatcatacaaaacatgaaaatagcggggggcggtggctccaagcctgtaaacccagctctcagggaggcagaggctgggaggatcgcttgagcccaggagtttgagacctgactgggcaacatagcaagaccccgtcctccacaaaaaagaagaaaaaaagtatgaaaatatatttctcgcgccaggtgcggcgactcatgcctgtaattccagcactttgggaggtcaaggcaggaggatcacgaggtcaagagttcgagaccagcctggtcaacatggcgaaacccccatctctactaaaaatacaaaaattagccgggtgtggtggcaggcgcctgtaatcccagctactcgggaggctgaggcaggagaatcgcttgaaaccggaaggcagaggttgcagcgagccaagatcctgccactgcactccagcctgggggaaagagcgaaactccatctcaaaaaaaaaaagaaagaaaatatatttctcaaagtgcttttatacagttgggatttcttctagagaagccaactactgtcatagatccttgtataattaatttactcccaccatcagaagaatgacgttagttgtagttctttattacaccactgtttattttatttatttgttttttgagacagagccttgcactgttgcccaggctggagtgcagtggcgtgatctcagctcactgcaacctccacctcccgggttcaggtg

SEQ ID NO: 1243059 - DNA, 4001 bp, Homo sapiens
catgttggccaggctggtctccaactactgacctcaggtaatctcccacctcagcctcccaaagtgctgggattacaggcgtgagccaccacgcccagctgacagttttctttctccctgtctcccttccggtctgggcaaggaggaaagagaggaaagaatcatccattccttagcaagaagtgactgtgggcagaggccaggtcatgtctcagaactgccgacgtcagaagacaccactcccatagagaccatcctgcctagcccttccccctggggcacagagcagagaacccacttgctcgaggccatactgcctgggccgctgcaggcctgggttcatcagaggtctccaagtcctgttacactgtggcttcccctctgcaggaaagtttattttactgggtttgttttggagggtggtgggtaagatggaaacagaaaccaagcaacgggtccccagcccagctgcgaggccgtgcctgaccagccgactggccaaggtgaaggatacacatctctcatggcttccagggtggacgcccgcagaatgtctcggatgccgatgacattctcatggcggaagcgcagcaggatctggatctcccggagcgtgcgctggcagtaggtctgatgttcgaaggggctgatcttcttgatggccacgcgagtcttgcgcacgtggtcataggccgagctgaggggaccggagagaggctgctgctgtggccttacaaagggggagtccgggcctggtggccccacccaggccttggcagggaggggagagagcaggagctggctctggtcaaatcataaacaatgctggttccttcctgctgtggaggcctgggatctccagagagaaagctggggaccagccaggcggcccttcggtgactttacaaacagaggaagagactgaccgctcactgacttcccctctcctcaatccccttccattctactggccctgaacccttcgcccccattcccaggaaaggctccttaacccaagacaggtccgggggtgcagatgctggggacacaccatggggcaaatactgggaaggtggcagccaggggaggggcaggagagaatggacagggcaggggagggtcccagggtgagggatccgggcagcggggctgtcccagagggatagaggcccagagcacacggtggggccgggggcactcacagacccctcccaaaacatgcaggtggcactcctggccgcctcatctctctctgggcccctggggtggtggggccaaagccctgccccaccctgatctcggctcttctcccccaggctccctggcactgcctcacagggggaatccaagacaccctttcccccaaaacgggccctccactgcctcttcactaaggatgtcgcctccccgagagtactcatcctctgggcctcgccccgtgtcactagggtccccgcgggcccccacatgcactcggatgcccctcccatcattacagaagggtggactcaaagcctccaagcctgctcccctgaggacgtaggcagcgccccctcccccagaaagcactcaggggccccctccctgggacgctcccgatcatcccgagtctcctgcctcctcgggacgctccgcgtctccacgtcccggaaagcgctcggcgcctcctcctcctctcccgcgaagccccctcccctgagggcaccccctcccccggaacgccccctcacctgaccatgccgtacgcgccctcgccgatgtactgcaactgcgtgtagcgcgggcccacgtcgaacggctgccccttcaccatctccacctcccccgggacccccgggccgaccccctcggttctacggggctccccgcccccgcccccctgagccgccgccgccgccatctccactcctcccctcccaccgccctcctccccacggcggccccgcccgaggccccgccccttcccgcctgcctgtcacccgcagggccgcgcgcgccaggccccgcccttgccccggccccgcgtgggcctggagctgtcacgtgacccgccccgcgcgcgcccgcccttcttgccccaggttcgggggccatgggtccctgcgggctccgcggcctccaggtcaccgggaggttcggcagcgccgcctcggagactgtcctcaccctcccctcgatggcgaagcggccagggcgtgacctaccagagccacccagccaatgtatgcggcagcccaccagaacctgggcccgggatcaccctaggttaaaaataatgttctaataaatggatcaaattttacagatggagaatctgagagttaggtttactaacttgggtaaggtcactagtagtgacagctgagactcaaaatggtgtcttctgacacagagactctttctaattccatgcctctcagagtcctagactgtttttattttattatagagacagggtctctctctgtcgtccaggctggagtgtagtggtgcaataattgctcactgcagcctcaacctccctggggtcaagtgatcctcccacctcagcctcccaaagagctgggactacgagtgcgcgccaccacgccctgctaattaaaaaaaaaaattggggggctgggcacggtggctcacgcctgtaatcccagcactttgggaggccgaggtgggcagatcacctgagtttgagaccagcctgaccaacatggtgaaaccccgtctctactaaaaatacaaaaattagctgggcatggtggcacgtgcctgtaatccaagctacttgggagactgaggcaggagaatcgcttgaacccgagaggaggaggttgcagtgagctgagattgcaccacttcactccagcctgggcgacagagcaacactccgtctcaaaaacaaaaaacaaaaagaagaagagaaaaagtagggttgcagaaggtagggactgaagaaaggcatgaaggagaaggatcggggtgagctgaggcataaaggcagaagcataacttgtccagcatggctgcagtaaaaaaatgatgaggtttcagcctggagaggtaggttggggccagattaggaaggctctggattctggcaaggagtttggatgttactcagtaagcagtaaaaaccctagagggacttttgccagatcattttgcaactgcgggagaatatagtgactcagagaaaacactatggagttcagcatggagccaggtttgctgagtgggagtgagtttcccagcataggaaaggctggtgtatcagagctgcaagctgccacctcctgctgctggaagctcagttagagtgtgactgagattcccctctagtgactgaggttggcatttccttggaggactggactgggatttgttctggttcatagacgcatattcaactaatgtagacttaccatctcttctgtgccaggcacttttggtttttttttgtttgtttgtttgtttgtttttttgagacggagtcttgctctatcacccaggcaggagtgcaagctcactgcaacccctacctcctgggttcaagtcattctcccacctcagcctcccaagtagctaggattacaggcgccagccaccacgcccggctaatttttgtatttttagtagagacgaggtttcaccatgttggccaggctggtctcaaactcttgacctcaggtgatccacccacattggcctcccagagtgctgagattacggcacctggcttgccaggcacttttatgtacactacctcctgtaatcctcacagcagccatatgaagtagatactattaacatttaactggaaaatgatgctggctggtcgtggtggctcacctctgtgattccagcactttgggaggctgaggcaggctgattgcttgaccccagcagctggagaccagcctgggcaacatagtgagatcccatctctaccaaaaatacaaaaatgagctgggtgtggtggcatgcgtccgtaatcccagctactt

SEQ ID NO: 1243060 - DNA, 4001 bp, Homo sapiens
gctgggcacttctggggtgggtgaccttggttcagcccctccacttctcaggacaagtttccttcccagtaaaatgcctatagtcaccctgagctccaaaatccatgaacctttgcgttcccttaggttgagagctttaactcagctttgctggaaccggggcattccaatcaatgcataaccacctcgcgacagacacgaagcccaaacgcaatagaaaccacaggaaaggaggaatgatacaacatactgttatgatttttataaacacgctttaaaccaaactaggccataaatcaccttggtttcagaaaaagccaaaatactgacacaatcttttattttcctattaaagtcaagaatgtgttaagccgaattaattgaaaaggaattgaagctcatttcctaagacacttctattcataagtcaaacagcattacctaactcctagaatgagagaatttctgggcttggagatcgcctagtgcaattcactcctttgatggaaaatcgaaccccaggcaggcgacaggccaaggtcacagaggcaaagcagggatgggaaccagcctccctgaacctgtttctgacaaagggcgaggttctgggcccacacacaggcaggccgagctcagtatctgacggtgaatgaatgaagctaagtggtgctccccacagggcccggctcttgtaactgcttcacagacaagcgatttccaggttatggagacatcctagcacagaattaaacgcttcaaactcagactgttaactcctcagaagccagagtggagtttctcagccctggctacatcagctaacaatctcgccaagcaaggaaccaagggggcaaagacatcacctccagaaactcgagtgttccttctgctgacagaggagcagcccgcctgcggccttgttctgtgtttacatcaaccacccaattcacccgtgtcacagaccttcaaaatacgggattagggacaagggaaaggtctccaacatcatccacagacggctgcagccccctaagaacaccaaaagattccttttctagatgggtttagaatggcagccaacagaggtagcacttggggtcgggaaacggttttgactgaacacacgcacgaaagcaaaggcaattgtcatgcagaggtgggtggggaggggagagtgaggcctggctttgaagctgagctccccggggatgacgccaggcacatcgggtttggggctgaagattcagggctgggggcacggaggagggggccagggcccaggcctgggcggaaaagggggtccccgggagtcggggtggggtcccggggcaggcgggggagtgctctagggaggtgtctcacggcgggcagagggggtggggaagtcccggggcgggggatatggggtccaggcgggtctcggggcggggtctgggggtccaggggtcccgcggtccggggtgccggagcggggtctggggtcgggacgggtgttgggtccggggcccggggctggctgggggtccgggacggggatgcgggcgggtcccgcggcccacgcacctcctccgcctgcctgcgcagcgccttctcacgctcgtactgggtgagcagctgctcgttgtcctcgcgcagcagctccagctccacctcgtgctcctggttctcgctgagcaccgagtctaggttctccagcacgttcaccaccagcggcatgagctccttgaccacctcctcgtcgtagcagtggatgaggcgctcgaactcgcggtagatggagcccgccaggcccgacacccgctccgacatcaccgagccggagcagtagtcgtcctggtacaccaccacgccgccgccctcgtccatctggatctccatcatcgcggccaccgccgccgccagcgcggctcgctatccggccggcgcgcccggccctccccagctgcctcaggttccgcaggccgcagcccgtcgcctcccgcagctgctgtcgcctcagggctccgccgccgccgctgccgaggctgcgcccgtcactcactcaccggaagtcccgccctccagccggagggggcggtgcccgcgcgtcccgccgcagccgcgccgccagggggcgcaggggccgtgacgtcagaggaagccgggcttcgggccggaagcgcgggtgagccgggcagagggagctcccggccaggccggtgggatccgcggggcggcagtggtcgcttcccccagcgcgctgtagcttgatcatgtccccgcaaccgtgggcttccggtgacctcgatcccgtctccaggctctgcacacttcggcggacttaggtgaaggctcagcgcctgcgcctcaatcccggccgccctgatgagcctccgttccctacagcaccgcgccccgctcagtgcctcccctctcctgatgccttccccgctcagctggctcctcccgggattctgtgaatgcaccctcaacgcccatctcatcctgaaacccagcagcgtggcctccttcctttcgcccacttctccctactgcactgactgcttcagattttcttttttttttttttttttgagatggagtcttgctctgtcgcccaggctggagtgcggtggcgcgatcctggctcactgcaagctccgccttctgggttcaagtgattcttctccctcagcctccggagtagctgggattacagaccagctaattttgtatttttagtagagacggggtttcgccatgttggccaggctggtctcaaatttctgatctcaagtgatccgcccgcctcgacctcccagagtgctgggatgacaggcgtgagccaccgcgccagtccagattttcggttacttttcagctacgtgcaatctgtttaacccatccactgggttattaattgcaccgatttttttttttttgagacggtgtttcgctcttgtcgcccaggctggagtgtgatggcgcgatctcggctcactgcaaccttcgcctcctgggtccaagcgattctcctgcctcagcctcctgagtagctgggactacagacacgcgctattaacgcccggctcatttttttgtatttttagtagagacggggtttcaccatgttggccaggctggtcttgaactgctgacctcaagtgatccacccgcctccctcggcgtcccaaagtgctgggattacaggcgtgagccactgcaccctgccaatgattctgtttttgtcctatttgatttcttatattctagcagttttaataggctcttatacttccaaccacatatttatctttaagcgttgggtgtgcctcataactacagtatctgcagcccttgcaggtctgattctgcatgtcatcctggttgactcttggcccagggtcccctttcccccattctgagccagtgtccccaggacttttgtctctggaagtacttgaggcctgaacttaaaatgtgttgctccgtaagatttgcactttattttgctgggcaggggacaccatgaacccaagactttgaaactcaatttgggagccacacatgtattgtgaatcctgatgaaaccacatcagtgactatttaatgctaatagaaatggccacttaccgtctttcacctactgcaatgctcatcagttcagatcctctcatcctaatctgattgcaccgaaacagtaactcccgtagctgacaccctactgattttttttgttgttcagtttttagaggcagggtctcaccctgttgctcaggctggaggcactggcatgatcagggctcacttgaactcttaggctcaagtgatcccacctcagcctcctaagtagttgggtctacaggtgtaagccaccactgcttggccaattttaaaaacatttttgtagagacagaggtctcactgttactctggctggtcttgaactcctggcctcaagcgatcctcccccttggcctcccaaagtgcttagatgacaggtgtgagccaccatgccaggc

SEQ ID NO: 1243061 - DNA, 4001 bp, Homo sapiens
gtttccctgggcgaagctttgactgtatctgggcgcaccctttgttatgctagttagttttagataatgtaacataaactcaggataggagctctcccgctgtgtggacatagcagggagacagactggactcagcctccaagtccctgggagaggggagcctgactcctccctagaggagaggccaggtgtcaaaaaccagaagcagtcgtcacctcggacctgtctcctgttggagctggcaggggagatatcccatctgctcacagttcaccgtgtggggcacattatctgggtattcaatggatggaaaaaacaccaggtccctaggaggcggtgtggggaccaggtcccctcttgtcttcccttccccccccaccctcccctagctcacagagtcttccagtacaccctgaacctttctccttacaaggggcctatgggaattctgtgcaaggcagagatggcaaagttttttcattaggagggtgcggtctcaagcagccgtgggattcgaatgacgctgcctagagagacctcactggcaaaagggaaaacaaacctgtacccttcagtgggagaattttacgtagactttgttctttggttaaaaatgtagcgtctcccatctgacttttttttttttttttgagacggagtctcgctttgtcgcccaggctggagtgcagtggtgcgatctcggctcactgcaacctccgcctcccgggttcaagcgattctccctcctcagcctcccaagtagctgggattacaggcatctgccatcacgcctggctaagtttttgtatttttagtaaagacggggtttcaccatgttggccaggctggtctcgaactcctggcctcaggtgatccgcccgcctcggcctcccaaagtgttgggattacaggcatgagccaccgcgccggcccacctgtttctgaaggcacctattcctgggaggggtaacacattaaactattaactcttcatcgggcttcccaagtgggcggcccggccacaaggaaggggactttggagtcgggaagggctggctctggaacacgggacaagggtctgaaccccaaggcgcagtcctgtgaccatgcgggccgggccggggaggagcctggggtgaaccccacccgcctggtctcctcccacccctccctctcgggtcccggggcctctctttctcttctccaggtcctccagcccagccactgctcacaggggtggtttttgctttgttagttgggttcaggccacgagaagggggaaccctaaagttttccttccctgccaggtcgcctctgagagcgcagaagggagaaacggcatttgttcatttaaacgggctcctaggacgagaacccggggacgccagggcctcgcgggccggcctgggccacaggtgtccccggcgcggaggtcgcagcgccccggcccctctcacctttcgggtctgcggcgcccggggtctcccttcctctgcggctgcggcggctccggggcttcccagggcgcgggcccaggaggcgcggctgcgtcccaggtcagtccccgggctccgtcccgcgtccggctttggcgcggtttttcccaaactccgtgttcacctgcgcgagggcccgcgtccctgtgtgtgtcccggcgggggcctcggtccgggtctctttccctctctctctccctctcccggtcccggttccggtcgcggttcccgtccctctcctggtctctctccgggtcccggtccccgtcccttcgccggttcccgtcgctgcttcgcttcctgcgcgggtccccgggtcggtcccgcggtcgatcgtgggtgcggccttggtctgggtgggggcgccgtcccgggtcccgctctctcggccgggcccggggctcgcgagcccccgacggatcttccatggccgggttccgtgtccccgcccgggagcgacctgagggcaacaaccaacaagtttcttgggcaggtggccaagcccgggggcggggcgggcactcacctgtgcgcatgcgcgctagtccgggagctcacctgagaacgggcgccctcagggggcggcctgagcgcgtctggggcccgggcgggaggggtgcctgtgtgctgggtgggggctggggtgctgctgctggaaacccgggcggggcgacccacagccgcacctttctgccccgaagtaaccccttggtgaccccacgaggtgggcggcctaagggagccaactgtggccacctcccctggctcaacttacactgcaacttggatttaccttcccagaggtacccatcctctcactcactcagccagacactcattcattcacccaatcacccactacccgctcatccattcacccacccatccacccactcacccacccatccacccactcacccacccatccaccatccatccacccatccacccactcacccacccgtccaaccatccacccattcaaccactcacccatccatacacccgtctatccacctatccacctactcacctacccatctaaccatccacccatccatccatctatccacccactcacccacccatccaccacccatctacccgcccactcacctgcccatccgcccacccacccaccctccatccatccatccacccatccacccactcacccacccatccacccacccatctaccatccgcccactcacccactcacctgcccatccatccacccactcacctaaccatccactctcacccacccatccaccatccatccacccacccattcactcatccacccatccacccacccactcacccacccatctaccaactcacccatccatccacccattcatccacccactcacccatccagccacccacccacgcatccacccatccaccattcatccactcacccattcatccatccatctggccactaacctacccacacatccacccagtcacccaccttccacttctccctccacccatccactgtccctctttctcccttctcctgttttccttataacacctatgttgtaaggggcttgcagccagttcatctatcacaatagtcctgggcttacaaatagccctgttttttaaaatggggacttacacaaaattggcagcttttaattctgccaagtaaggatattacaaaatatatacaattgccatctggtaattaattctttcagcaaatatgtatgagcacctgctttagcaggtactggagatatagtggaaaatttgcttgcagggtgattgcattctagtgtgtcaggaaaagggaaaacaggtagtaaacaaagaagacagtgtctaaagtttaatgggaagggcaggtttcctcatatagacctgggaagatgtcgtttgaattgagttctggatgacaagaaggctgagaaaatgtcccagaaagagagaaggttgaggaacgcgggagctggacaaggaggtccctgggagtagagttggtgggcatgaattgaggctggagaagtggaccaggcagatggtgtagacgacagtgtgcatttttattctaaacaatgggagaacattgaagattttgaggaggagagtaaacctttctgattgatatttttgaaagaccactctggcttctgtgaggagggtggatgatggaggcccagagtagagggaagagatgagttacaaagctgctgctgaaggagtccaggtgagggtgacggtggccatggagacagtgacaagttgacagatccaggttgtagttttggggaagaatttacagtatggatcagatgtggggaaatgaggggaggggaggagtgaccaggtgaatggtggggtttttcactgagacgggggagactggacagaaccagatttgcggggaaattagagagttccattttggacatggtaaatttgagatggctataattcatccaagtgtagatgtctagttgcagttgaatatatgagtctgaa

SEQ ID NO: 1243062 - DNA, 4001 bp, Homo sapiens
caggagagttaaagcttggtgggctggggaggggggagcaagagattaaaggaatcagagccttggggatctttgatctgtaggaaatgggagtgacatgatgaggccttgaagaagggatgagaaaatggagcaaaaaggcaaaaagaagagagagaaaaagggggtctgagagactgactcagacagctaccatgaggatcaaaatcatgaaaaccaagacaggaggaggcgggcttcctacctcacatttgaagggccgttctgttgagtgcacttgtctgacgtgactgttgaggtgatccggcctggggacacgttggggttggggttagggcggaggtggtgcgccccaaatccaccaaaccgcaccacaggcctttccgaggatccctgcgcctcctcccggagcccaggccgtcacagcgacacttaagcaggaaatccctcccctggagcccagcagccgctgccgccgccgccgcctcctcccacgcgaagcttccgtcaaccccaaggcccacctcctcgacaaaggaccaccccttgctccctggtaaccgggagaggcttcctccctccgccctgggagtggctccccttccccagcctcagcagccgcctccctccccgccagccacggccaggccacctccgtcgcgtccctccctccccacggcctagcgggcggccgaggccccgtgcacaccgggagaagctcttgccacagtgggagcagttgtagggcttgtgcacagcgccgtcatgtgagcgcacgtggtagctcatgcggtccttgcgcttgaagcgctgctggcacaccgggcactggtagggcttctcgtccgagtgcgacagcttgtgtcggttcaggtggtagacgtcgcggaaggccttgccacacatctcgcaggcatggttcttccggatgcgcttccccgaggcggtcgtggtcaccacgccaccggcggccactgcggcagcgccgccgccggcacccgcctctccccctcccccgccggctccgctcagctggggcacgctcaggaggctcaggggcaccatggtcggcatcttcatagcacccgaggggacccggccggccttggctcccgtgtggatggcttcgtgcctccggagattgtagccgttcttgaactccttggcgcacagagcgcagatgtagggccccttgctctttgtcttcttctccaaggcagacgcgaccggggccacggcgaccgtcgaggttggggctacgacggcggtggccgccgccgcggcgatagtggcggcggaggcggggggcgcggcctcggccgcgggcgccgacactggcgggggtggcggagggggcgccggaggctgcttcagggccgctgtgtccaccgtagaggcggcggcaggggccgggggcgcggcagcgacggcggcagcagcggcggcagcggccgcagcagccgcggcggactcctgggcggcggcgagcaccgggagcaagtccacctggaggggctcggccgccggggcctggggcgtgggcgggggcgccggcgcggcctgcggagacaaggcgccgagtgggccgcgggtgcgggcgggcgtccccccccagcccgggccgccgcggccggccctactcacctggaatggactctgggcgcagccctgggaggcaaagaagcgggactggagctcagccccgacctgcagggggttctgggcgtgaccctgaggtggcgggaaggagttcatgaggccgcccaccccccgggagtccaggcccagcacggggaaggggggggccagcagcgtgcaaggaaacaccgggaacatggcctcggccgcagcggggcccccggggctcagcgggggccgggggcgcgggccgcgcggggcccgggctcggggcgccgcccccggccggccgggctgggccgcgccgaacgcatggcccgcgggccgccccgccgcccgcgcaccccggccggcgggagggaggaaaagagggcgccttgcgggccgcggagcgccgcggcgacggcggcggcgacgccccctgggtgggggcgggaggccccgcggggccggggccgggggcgggggcccgggcggcggcggcggcggcggcggcggttggagcctggcggggcggggtggggggagcgagggagcagcctcggcccccgccgcgcgcgcgcccagccggcgcctcggggagggcgggggagggcgcgagggagggagggggacagctgcgcgcgcaccgggcgcgcggagggggggtgggacgggagggagggcgggcaggagggggtgtgggcaggggggtgggggcggggggagggagttgttacctggaagatgaagctgctccagttgctgggatccatggcggagggagggagggaggtggctcgcgctcaccctggggcgggaggaggaggcggcggcggtgggggagggggaacccgggaggaggcgcgcggggcgggcaggaggggggaggtggagggtgggggaagcggagcacactacgcgcggggagggcgggcggggggcgcgaggacacacaagaggctggagcgggcgcgagcgctagcgcgagcgcgcgcgtggccagcgggaggggcaggcgcgagagggactctggcgggaggagggacgggggagccacccagcagcccgagtcgccccgagcgcgagacccctgagacggctgctgattggctgacgatggcgcaggtggtgggcgcgcgggagacagggcggcttctctcctcttccccccgccaacgattccactccccctccctccgccagcggccgttatttcgcgcgcacgcgcacaaggccgccgtcgttgccgagcgggagaatgggggagcgcgcgcgccgggggcacggacggggcggggctaatccctgagcgcgcgcccgcctaacggtcgcaggcctcatgcttcggcttccgctttttgcgtcctgcaggccaccgtcctccccgccccaccccagcggtgtatttacaatcctgcgctgagtcgttccccgaagatggcgcccagtggagtcgcctgccttgctcgcggcccaccccgaggcggtcacaccccggtcccgcccccgcagccccaaaaatcaggcggaagcaccggagcaaaaactgtatttacacaacacggggttatacaaaaatttgaaaaggcggagtgaggagacgacggtcaggaggcgccacagcgctggccggcggcgagacccaggatgtttgcctgcaacacaggagggagggagacagcgacgttagagaggggcgcggggcgcaggacaggcagaggaggggcagggccgtgacttcaccttcaggaaggactccatctgtttccccgttatgccctccacgcgttccaggtcctccacctggcgggacaggatcgataggggacagggtctcgggggtacccggtctcccccgcccccgccctcccccagtccagtgggctgctacctggctgaaggggccgtggagctcccgccagcccacgattagctgggccttcttcgggccaatgcgctgaagactgcggagatctcgggctgagccttcgttcagcagatccagtattttttggcgcccatgagccagtagctccgggctgatctgtagctcccagcagtcctcagccttctcctcaggctctagggcatccagggactccagctgggaggcaaagggagatgagtgacacgcagggcagccaagtgctttgggctcctctgccaagactaggagcccagcaccagctacctcctgcgctccagcctcttcctctcttgtcaagtgtgtccaaaatcccgccctcaggtcactctctgggttaattcttattatgcaactagtgaaagagaggtactactcagtacccagtggtaatattagcacccttctcatggagttgctgtggagatcaagtgagttaatgaatgtaaagcacaaa

SEQ ID NO: 1243063 - DNA, 4001 bp, Homo sapiens
aaatccctcccctggagcccagcagccgctgccgccgccgccgcctcctcccacgcgaagcttccgtcaaccccaaggcccacctcctcgacaaaggaccaccccttgctccctggtaaccgggagaggcttcctccctccgccctgggagtggctccccttccccagcctcagcagccgcctccctccccgccagccacggccaggccacctccgtcgcgtccctccctccccacggcctagcgggcggccgaggccccgtgcacaccgggagaagctcttgccacagtgggagcagttgtagggcttgtgcacagcgccgtcatgtgagcgcacgtggtagctcatgcggtccttgcgcttgaagcgctgctggcacaccgggcactggtagggcttctcgtccgagtgcgacagcttgtgtcggttcaggtggtagacgtcgcggaaggccttgccacacatctcgcaggcatggttcttccggatgcgcttccccgaggcggtcgtggtcaccacgccaccggcggccactgcggcagcgccgccgccggcacccgcctctccccctcccccgccggctccgctcagctggggcacgctcaggaggctcaggggcaccatggtcggcatcttcatagcacccgaggggacccggccggccttggctcccgtgtggatggcttcgtgcctccggagattgtagccgttcttgaactccttggcgcacagagcgcagatgtagggccccttgctctttgtcttcttctccaaggcagacgcgaccggggccacggcgaccgtcgaggttggggctacgacggcggtggccgccgccgcggcgatagtggcggcggaggcggggggcgcggcctcggccgcgggcgccgacactggcgggggtggcggagggggcgccggaggctgcttcagggccgctgtgtccaccgtagaggcggcggcaggggccgggggcgcggcagcgacggcggcagcagcggcggcagcggccgcagcagccgcggcggactcctgggcggcggcgagcaccgggagcaagtccacctggaggggctcggccgccggggcctggggcgtgggcgggggcgccggcgcggcctgcggagacaaggcgccgagtgggccgcgggtgcgggcgggcgtccccccccagcccgggccgccgcggccggccctactcacctggaatggactctgggcgcagccctgggaggcaaagaagcgggactggagctcagccccgacctgcagggggttctgggcgtgaccctgaggtggcgggaaggagttcatgaggccgcccaccccccgggagtccaggcccagcacggggaaggggggggccagcagcgtgcaaggaaacaccgggaacatggcctcggccgcagcggggcccccggggctcagcgggggccgggggcgcgggccgcgcggggcccgggctcggggcgccgcccccggccggccgggctgggccgcgccgaacgcatggcccgcgggccgccccgccgcccgcgcaccccggccggcgggagggaggaaaagagggcgccttgcgggccgcggagcgccgcggcgacggcggcggcgacgccccctgggtgggggcgggaggccccgcggggccggggccgggggcgggggcccgggcggcggcggcggcggcggcggcggttggagcctggcggggcggggtggggggagcgagggagcagcctcggcccccgccgcgcgcgcgcccagccggcgcctcggggagggcgggggagggcgcgagggagggagggggacagctgcgcgcgcaccgggcgcgcggagggggggtgggacgggagggagggcgggcaggagggggtgtgggcaggggggtgggggcggggggagggagttgttacctggaagatgaagctgctccagttgctgggatccatggcggagggagggagggaggtggctcgcgctcaccctggggcgggaggaggaggcggcggcggtgggggagggggaacccgggaggaggcgcgcggggcgggcaggaggggggaggtggagggtgggggaagcggagcacactacgcgcggggagggcgggcggggggcgcgaggacacacaagaggctggagcgggcgcgagcgctagcgcgagcgcgcgcgtggccagcgggaggggcaggcgcgagagggactctggcgggaggagggacgggggagccacccagcagcccgagtcgccccgagcgcgagacccctgagacggctgctgattggctgacgatggcgcaggtggtgggcgcgcgggagacagggcggcttctctcctcttccccccgccaacgattccactccccctccctccgccagcggccgttatttcgcgcgcacgcgcacaaggccgccgtcgttgccgagcgggagaatgggggagcgcgcgcgccgggggcacggacggggcggggctaatccctgagcgcgcgcccgcctaacggtcgcaggcctcatgcttcggcttccgctttttgcgtcctgcaggccaccgtcctccccgccccaccccagcggtgtatttacaatcctgcgctgagtcgttccccgaagatggcgcccagtggagtcgcctgccttgctcgcggcccaccccgaggcggtcacaccccggtcccgcccccgcagccccaaaaatcaggcggaagcaccggagcaaaaactgtatttacacaacacggggttatacaaaaatttgaaaaggcggagtgaggagacgacggtcaggaggcgccacagcgctggccggcggcgagacccaggatgtttgcctgcaacacaggagggagggagacagcgacgttagagaggggcgcggggcgcaggacaggcagaggaggggcagggccgtgacttcaccttcaggaaggactccatctgtttccccgttatgccctccacgcgttccaggtcctccacctggcgggacaggatcgataggggacagggtctcgggggtacccggtctcccccgcccccgccctcccccagtccagtgggctgctacctggctgaaggggccgtggagctcccgccagcccacgattagctgggccttcttcgggccaatgcgctgaagactgcggagatctcgggctgagccttcgttcagcagatccagtattttttggcgcccatgagccagtagctccgggctgatctgtagctcccagcagtcctcagccttctcctcaggctctagggcatccagggactccagctgggaggcaaagggagatgagtgacacgcagggcagccaagtgctttgggctcctctgccaagactaggagcccagcaccagctacctcctgcgctccagcctcttcctctcttgtcaagtgtgtccaaaatcccgccctcaggtcactctctgggttaattcttattatgcaactagtgaaagagaggtactactcagtacccagtggtaatattagcacccttctcatggagttgctgtggagatcaagtgagttaatgaatgtaaagcacaaaataagctcttaaatctggtccctcatctctaaaagggaaagaataagctgtctttcaaaaagtacatgggagaaagtaatatgaataaatgatacctcccccaaccatctcagtttttgggtagttctagtggtgttcgattctgggtatgtgcatatgtgtggtttcttgcttgactgcttaggtcatagttccctaagttttccctcttaagcttgtagagggtagaagccaggctacacagtggaacatccgctctgcgaggtacatccacatcactgccttccaccctaaatgccctgcaaggaaccatccatcaccacattccaggggtaagcaagttgaggtctgttagtagctggcggccatcatccagttcgtttaaccccaaggccaacgctcctccccctagagcctactcccccttacttctgggctcca

SEQ ID NO: 1243064 - DNA, 4001 bp, Homo sapiens
tttgagacatagtctcactctgtcgcccaggctggaatgcagcggcgtgatcttggctcactacaacctctgccgcctgggttcaagggattctcctgcctcagcctcccgagtagctgggattacaggcgcctgccattgcgcccagctaatttttgtattttcagtagagacgggatttcaccacgttggccaggctggtcttgaacacctgaccttgtgatccgcccgcctcggcctcccaaattgtgggattacaggcgtgagccaccgcgcccggcccagccttcctagttcttgttaacctcctgactagaagagctcccacttcttccctaggtgcttcaaaggttccgcaagctctgcattggaattttccctttttatatagaaaggaccaactcttgattatacggggtgcctggggagtgcagtcgtttgacacgtgtctgggtcaggtcccagctcccattctcaatcaacagttttgctgtcatccgcatcacacattagagcataaaataaacttttatttgtcaaaagtgttctgcataaatgcttaaacaaaatgtggtatagccatacaactgaatattatttggtcataaaaggaatgaaatcctgattcatgctacaacatggatgaactgtgaaaacatgctaagtgaaagaagcctgacacaaaaggccgcatatcatatgtttccatctgaatatacgaaatagtcattaaaggcaaatctagaaagacaaagtagatgaaaggttgcctgtggcggggcctggaaatgggcattgactacaactgggcatcagaggtcttggggtaacggaaatgttctaaaagtggatttggtagtggctgtgctgctgtaaatttactaaaaaccactgaatagtacacttaaaacaggtggattttatggtatgtaaattctacttcaatgaagctcttacattaaaaaataagtataaataataaaagcggattctccagattgaaaaaaaaaaaaatgagaggaattacttctcttctgcaagccctccttttcgtagacatacaattggagaccttgacgttaggagggcttacctacacagttcagactaaaggatgagtctccagaattcaacgcaggtcgtattccactccacgtaatttcgaagtgtcaatcagaatctaataacttaatttgtgtagacaaataggccaagattctcaggggctcaacccaatatgaaaggtaaacatcttaataaaaatactgacgatccacaacggtcttaggtagcgcaaccatgccaaggcgaggcaagatttttaagaagctacaggtttaaaaggcaatctggttctgagagttcgccgaacagaatccccgcatttccaaaaaccagcagcgcaatatgcacagaccgagataaggcaaagaatcgacgtcttttaaacctgacgccagcactgccccggaagcgcacctagaattgagtctgtctggaggctccgggccagagcagggcgtattgtttcactcggtgaatgctcatttcacgtaaagaaaaccaggcaacggaacaagctgccggagcgcgcagacccccgcagggccgcggtacaggcacgctgtgtccaaacaagcgccggaggccccgcgcccacctcccccgacccggcccggcccccgcagccctcgcctcggggcctcggacgcaaccggcacacctgagcgagcgggccgccgccgctaggcggagcgggtcggggaggccgcgcgcgggcggctgacgtacctgcgccgccgggagctcagggccggcgggcccgggataacggcgcctccgcggcgaacacgcctgggcactccattcggggctgtttactcccaactctcgcgagactgggcgaccgggccagcgaggcccacagctgggagcctcagctccgccgacccagcgtgccctgtctgtcccgcgctcccggggcttgcgtgcgcgctctggacgccgtgggcagcgggaccacgccgggaggatggacgaaggtctcgcgacatttgcggcggcgggggccggtggcagggtggaagcggaggggcgtggccagcgagctgccaggcggcgagaacgcgctgggggaacccttggtccgctctgcgcgtcgctctaggatccccgaaaaggagcacgggcgcgaaagcggccaggctgggccaggatctagaaagactgcctggcgcaggctccctgcccccgcgggcctgctgtcatggactcgtggagagctcgcttcccgcgcggacccttcctgcaggggtccacgtccaggcaccggcggctcggacaccccacccccggccgggcacctgccctgggtgccccttaacccgggcggtagctcgttaagatggcgaagtgtccggtccggaacacgcgaaaccccaaatcccgcctgcccgacctcctgacccccggccccacgggacgacagactgggcctcccgacgcgcagcgcgctgccgggacaccggtgcgtgcgaaacggaggacctttgtaacgccacgtgtttgctctttttgaaaaaacaagaataaatgtgttaaactgtctgaaaagcttgccgcctaaaagatgtctgggtgacttagatgctaggatcagtttgttttcaatgtaaatggaccagcccggactccgtacggcactagcaggggactgaaagcgtcttcaggtactgctggtgggcggtgatgcgctacaggccgatcagacagttttgtgtcttttggaacttgacactgcaccacggtaatgctgaactgcaccaatattacagatcacagcgcatcatcttccttcaacatgatttaacacagttgacttaatatggtggataaatgtagaatcacaaattaccataccccacctcaggcttctacttcgtaattttgagcaggttgtttaacctctttgtacctcagcttcttcattacaaaaataggggtactagccaggcggggtggctcgcgcctgtaatcccagcacttggggaggccgaggcagccggatcacttgaggtcagaagtttcagaccagcctggtcaacatgggtgaaacgccggctctaccaaaaatataaaaacttagctgagtgtggtagcgcatgactgtaatcccagcaactcaggaggctgaggcagagaatcgcttgaacctgggaggcggaggttgcagtgagctgagatcgtaccactgcactccagcttgggcgacagagcgagactctgccttaaaaataaataaataatttttttaaaaaataggggtactaatatctaccttaaaggatgagggttaaattaagtacacacataagccctagcgcagtggcttatgcctgtaatctcaacactttgggagtctgtggcgggaggatcacttgagcccaggagtttgagactagtctgggcaacagagacatgtctctatagttgtgtttggttttgtttttaccaggtgtggtggtgtgcacctgcagtcccagctactagggaggctgaggtgggaggactgcctgagcccaggaggtcgaggctgcagtgagccatgattgtgccactgcactccagcctgggcaacacagcaagaccttgtctcaaaaacaaacaaaaagcatactcataaagtgctcggctcctatatgattcaatatgtggtggtggattcttgaatcctttcctgactcagatctcatacgattttctgaacttttggagaatccttgcctctctgcatttgcaaaccgtcaaaggcactcccttctgccaccacacaaagcatttgattttaaacttgactatgtccttctgttccaactttaggtaaattaatcttggtcagggttctctgaacagccctttagtcactatgccattgaatacatggccctacagctggaaactggggtagaacagtgattgcaggcatccatcatgtgacagcg

SEQ ID NO: 1243065 - DNA, 4001 bp, Homo sapiens
gtacagcacggccatgagcaccagcatagccaggaagaagaccacgaggcacagcaggacggccacgtggtcgtagtaggcgatgaagagcgtgctgaagacgacactggccacccagatggccgcaacggctcgccgcgcccgcggcagggtcacgatgctgtggtagcgcagtgcgtagaagatggagatgtagcggtccacggcgatggcgcccaggaagcagaggctggacagcatggagctgcaggtgatcacgtcaatgacattgtccagctgctgcagcaccgcagcccgggccaccagtgcaccggcctccagcaggaggatgacggccgtctccagcacgttgctcccgctcaccagcaggtccgacaaggccaggcagcagatgaagcagtacatgggtgagtgcaggttccggttcttggcgatggtggccaccaccagcgcgttctccaccaagctcaccagccccaggctgaggaagagcccgtcagagatggacacctccaggcaccgggctcctgtctggttggcagccagccccagctgggggatggctgtgggggtggagttgagggagcccagaagtcttctctgggatccctgcacagccatagtcctgtccaggaagcaggaaggagtcgttggaggcctccaggtccccacagttcttcccctccaggtgtcctgcttagttcatggtgctgccagggggccttgggtgtcccccatgcctgcctccttccatctgggcacccccagatctgccctcacaccctctccctggctggacaggtcagcccaggcatggcccagccagtccagacacctcctggcatctaccgcctgggctcagggattctcacaaccaagcctggtcctcagctccctccctgcctcttccctggtggctgctgctcaggtccccaggacatttcgacacctctggaccgtcctggcctctgtctcctgccttcctgggccagggctgcgctgaggtcctgggaagaatggagcttttctctgcgttttaaaaagtcgttctcagagcccctcccactgagggcggccacatgccgggggcgtgagcacccaccatggcccggcctgccaccaggcggcgtgcaggacccagggggtccctcacaccgcggatctcctttacgttaaaaaacaccacagtctgtcctggtcaccagggcccccacctggccgcccctctaggagtccggagcttccccgggacctgccctctccagaggccccacccttcacccctcccctcgtcagcagctcagggaggacaggggtcccctctgctctcagccaaagcacgcatggagcagcaactcagctgtcaacgttcacggcagatttgggggctggaccagggagaactttccaataattaaagttctggaaactgagtgagccctgcaggagtttgcacatcgcgcggggtgagggggcttccggccagggcagagcgtgaaagcgtccaatgctagtgagccctggagaggttggtgttttcaggcatcttgtagagcctgaggccactctggcgcctgcccccaagggcccagcctcgcccagccagagtggcgaccccctcagctgcagccctggggctgtgggggtgtcgcttcctgggagcggaccggctgggggcaccctagtgaggtcttcagggaccctccagtcatctcgtcgctcatcctcacaggggcacccgggacgctgctcccgccctccccgggcggcgcgccatttccgctgcggaaggcaccacaggccctgcaccaacagccacatcaaaggcagacctctcgcctccagccgtcgcacgtggtgctccgcaggccgttcacagcagtcgggcgtggccccgaagcccagcagggacggtggagaggggccctggcacccactgcaggcatcttcctgggttcactccagggcgttcccagcacttccttgctgaagactgcgtctgtgctgaagggtggaagcgggagggggatggaattactcgtcccatttacagctgcaggaaaggaggcaacggtgcaggcaccgcatcagggttttcagttttgtgtctgcgatgttcgagttaaaatccatcctgtctctcgcccaactgccaaactctgaccatgaaatgctcacaccactcacaagccacctccatgtgtgtgaggacattaatatttttcatatttactggtacagtaaatacttgttacaaccgcattttacaatttataaatctttagttttgctttaaaattttttattattgtcagccatggtggctcagggctgtaatcccagcactttgggagcccaaggcgggtggatcacctgaggtcaggagttcgagaccagcctggccgacatggagaaaccccgtctctactaaaaataccaaaatcagccaggtgtggtggtgggtgcctgtaatcccagctgagtcaggataatagcttgaacatgagaggcggaggttgccgtgagccgagattgcaccattgcactccagcctgggcaacaagagcaaaactctgtctcaaaaaaaaaaaaaattattattgccgggcacagtggctcacccctataatctcagcactttgggaggctgaggcaggcggatcatgaggtcaggagttcaagaccagcttgggtaatatggtgaaactccatctctactaaaaatacaaaaatcagccaggcgtggtggcgcacgcctataatcccagctacttgggaggctgaggcagaattgcttgaacccaggaggcggaggttgcagtgagccgagatcacaccactgcactccagcctgggaaacagagatacagtctcaaaaaaaaaaaaatatatatatatatatatatacatataatttttatgtatttatttattttgagacagtttcactctgtcgcgcaggctggagtgtagtggtgcattcttggctcactgcaacctccaccttctggattcaagcaatacttatgcctcagcctcccaactagctgggactacggcacccactaccacacctggctattttttgtattttttgtagagatgaggtttcaccatgttgaccaggctggtcttgaactcctgacctcaggtgatcggtccgcctcagcctcccaaaatgctgagattacagggatgagcccccacaccccatctgctttaatttttttttttttttttttgagacgaagtctcactgtcacccaggctggagtgcagtggcatgatcttggctcacggtagcctctgcctactgggttcaagtaattctcatacctcagcctcctgagtagctggaactacaggcgcgtgccgccacacccggcaaatttttgtattttttttagtagagatggggtttcaccatgttggccaggacggtcttgatctcctgacctcatgatcctcccgcctccgcctcccacagtgctgggattacaggcgtgagccaccgcgcccggccctaaaatgttttaattgaggtacaacatacatgaaaatgcaccagtgataaatatgcaggttgacggatgacagacctgaaccagccacataagcagcaccagaccaacagacacagcgttcccacccggacggctccagcgagccgctgccagcccatctggcccatcacgtgaatggtgtcccagttcactctctctggctgagattcgcctatgccggtggctgtaaccgtctgcctcagaccgtggtgtccacggcgtgaacagaccacgtctgggtggcttcagactccctatcaacgataccgtctgatggacacaggtgcgtctgtggattgccacccgggggacatgggcagggacctctcttcagctttgggagacttggtcaaaccatcttcaaatcggcaggcctgtttctgttcacacacgcagccccaggctgctcagaggagagagcgcgccctgcccacacca

SEQ ID NO: 1243066 - DNA, 4001 bp, Homo sapiens
ggctggctgcaccgcaggctggcagctccgcccccgtacggccgagggccgttcccctcgttcccctcggggtggtctggagtcttcaggctcctgggcttgttctcccccagggagctggacgctgcggaatcatctgtgccgttttcttgtgtggaatattctggaaggacaaccagatgcaaaatgatgaagctgtcccacgtttagggcccaagattcagggcagaggagagagaatccccttggatattaaagtttagaaattgaggaaaacaacgggccgggcgcggtggctcatgcctgtattcccggcactctgggaggccgaggcgggaggatcacctgagatcaggagttcaagaccaacagggtgaaaccccgtctctactaaaaatacaaaaataagctgagcgtggtggcgcatgcctgtaatcccagcttctccagaggccaaggtgggaggatcatttgaggtcaggagttcgagaccagcctggccaacatggcaaaaccccgttcctactaaaaataagaaactcagccagacgcggtggtgcgcacctgtagtcccagctactcgggaggctgaggcatgagaatcgcttgagcccgggatgtggaggttgcagtgagctgagatcgggccactgcactccagcctgagtgacagagcaagactccatctcaaaaacaaaagttcaggacttcctagactagacaatggcagtcaattaccattcagtaagaacatgcttgatgttgctatgtatttctctctctcttattttattttttgagacaggatcttgctctgttgccctgatgtgatctcagctcactgcaacctctgcctcccaggctcaagcaatcctctcacctcagcctgttttctgttttttcaatagctgaaaatacaggtgtgtgctaccacgcctggctcatttttttgtatttttggtagagacagggtttcaccatgttgcccaagctggtctcaaactcctgagctctagcaatccacccaccttagcctcccaaagtgctgagattatttataagtgtgagccaccatgcctagcctatatttctcaaatagtacttttcaaacgttttaagcaggacaactgtttcaaataagatcttacacaggtcagcaaaacccagattatacgctttaaaaataaaaataagccgggcacggtggcctatgtctgaaatcccagcactttgggaggctgaggcgggaggatcacttgaggtcaggagttcgagaccagcctggccaacatggtgaacagcactgagaagattctataccaaccccgttcatatgattgcatagcaatccctttttgctaacctagagatgtttgtctgacatgagtattaatcataaatgtagtgaagaagtctcaaagaacaggtgttccagctcctgcctttcgtgaccctgacctgcttcttaaaaaacccattaggagcctgaaggaagtttactaacccagttccaaaggccagagtgaagaaagggacgttcctgaactaaagtcatctggattttggtagacctgagactcccaatccccaggtcagagtgagctgctctgagctcctggtcccctttcccacaaagcagccagcactcagcactggatgaggaggaggcctgggcccgcttaccctgaatggctgccctgtggagctcctcggccagcaggcgctggttgatggcccgcaggacctgcagggtgagctgcacggcgtactcttccccatagtaggtgaccagcagagtggccatcttcaccggcctggctctctggatctggctccgggggatcctggagtgctccttctgcacactggtgttctgcagcttgaacttgaacttctcgaagtcatagggcaccagctcctccagggtggacagcagatggtcactaggggtcttagccatggtgctgagcaggagaggctcgagccagctgtctggcttctggtaggaaaagaagcctctgtccttggtgagcaagaaaaggcaggttgtgaaatagcggaaaaggcacaggaaatgctctgtgtcttggtgggaactgagactaagggtaagggtgtgtccatgccggctgtgttctcttcttacaggttcagaggattttccagctgggagggctccatgccttggcagacatgtgcccccacacccctcccaaaccctggacctcgcctccacactagaccacagacagatgggcaagtctgcaagggaaggtctgggattggattccagacaccccctccaatcttccttcctgccaggatctggggctggcagagcgggtgagtgggaacagagaggactatgctgagggcccgccctgctggtcaactgttctcctccagactcggggtttcagggaccttccagagccaatggcacaggacgggggaaggggtgggcactgaatacagtcctgtgagctttgcctttcctggcccaagaaggcaagtgaggccagaagggcactgccaggagataactcttgccatgccatcacccctgttgatccggttccagttgactggttcttccagccacatgaaggacttgaaaagcaatgcctggaccaccagcctgactcatctgttcccagagctgactcagtcctcgctccctggagccagaatgctcttccgtgcacattcattgaacattctagacagtgtgccaagatgctggagctacacgggtgaaaaggcacgggtgtccttcagctcatatgtggtgcagggccccagaggtggctttgaagctaacagaagttacatgttgggggcagggcacagtggctaacgcctgtaatcccagcactttgggaggccgaggtgggtggatcacctcaggttgggagtacaagaccagcctggccaacacagtaaaaccccatctctactaaaaatacaaaaattagccaggcatggtggcacgcacctgtactcccagctactcaggaggctgaggcaggagaatcacttgaacatgggaggcagatgttgcagtgagccgaggttgcgccattgtactccagcttgggcgacagagcgggactttgtctcaaaaaaaataaataaatgaaaaattacatgtagggtgaactgactcctcacttacctacttctgaccgttgcataccctaatttttttatttttagatagggtcttgctcagtcactcaggctggagtgcagtagtgggatcttggctcactgcaacttctgcctcctgggcttgagcaaccctccaacctcagcctcccaagtagctgagactacaggtgcattccaccacatctggccaatttttgtattttttatagagacagggtctcactatgttgcgcaggctggtcttgaactcctgatctcaagcgatccactcgctttggcctcccaaagtgctgggattacaggtgtgagccactgcgcccggccagaagttttgttaataatgcaatttacccttcaccagcacttcctcggcaccagccaccactagctttataaacacttcctcctagaatctctgcagcaccctgcagggctgcgtttatcatccccctgtgcagccaagaatctgtagcttagtgacttgcctagagccaagatccaaacgtcaaaccacttcacaacatcgtctcctgcatgacaataatttgtgattttactgttaatgactacccatggatgtcacatttccagctgaccactgaggtccaggatgggtcacttccacaggtcagtcacaacattgcgacgcctagctgaacacccagctctgggtgtgagctcctctgtgtgtgcccagcctgggattcaaggctttgatgagttctggttggttgaatttaacttactgtccagctggtccacctgtttcctatttcacagagtatttggtgtttttgcattgttttcatagctgacaacaaacatgcagt

SEQ ID NO: 1243067 - DNA, 4001 bp, Homo sapiens
attattgattttaaacacacctctacatagtaaaactacatgagggcagaggtggcatcttacgtatttttatgtatgtatttcataactgaaaaccataaatatcagatgaacgaaatggtggtttgtccctcaacatcatcactctaaaaggttctattgtagaaaaattgtaagctacaccaaacagattgacttcactttataatccagggcctctttaactctgggaatgcccacacccacccgctccagttcaaggacgtgtctcatgacacctgaatttcaggcagcctgtggagttagtcaaatatgattttgaattgcaacaccactagtttgtagtcgtgtgttttaacattactaaacattaatttcctcatccttaaattgtggataacatccacctggcagtgaaaagtagaaacagtgtatacaagatgcctcgatgttcacaggctcacagtcaatgatggccctgcttgtcaatattatccaatgtaccagtttttgtattcaaggcctttcagtgccagaagaaacatttgggaattaagctgtgtcaagtttttcattcgttctttggcctggtctgatgtggctcacaatgcagtgtcactatctaaaacacttgccgaactgtgacaaattcattcactcattcaaccattcaactaatatttatttacagcccaaagtgccagacatgtgagtcgagaggatgagtcagacatttgactcagtggctgaatattctgtacaaacacaactacctacacaccaagggatttctccacatttttaccccttagcatctcttggtgggacatggtatcctattatctctctgaattcccttatttgtctgctaccgttagaggtatatggtaatagacgttagtgtctgcccacaaaaaatatgacttgcttctctacctggtcactttaacagatacaaaattaacatgaactaaagagctcaatctgagaattcagagatgacttcattcaacaactactgtctcttttaccctacaattttgttttgttttgttttttgagacagagtcttgctctgtcgcccaggctggagcgcagtggcgcaatctcggctcactacaagctccgcctcccgggttcacgccattctcctgcctcagcctcccgagtagctgggactacaggcactcgccgccacgcctggctaattttttgtatttttagtagagacggggtttcaccgtgttagccaggatggtctcgatctcctgacctcgtgatccacccgcctcggcctcccaaagtgctgggattacaggcttgagccaccgcgcccggccctttttttttttttttttttttttttgacagagtcttgctctgttgcccagaccggagtgcaatggtgcgatcttggttcactgcaacctccacctcccgggttctagcgagtctcctggttcagcctccacagtagctgggattacagaagcctgctaccacacctggctaatttttgtattttttgtagagatggggttgcacctgaggtgggcagatcgcgaggtcaggaatttgagaccagcttggccaacatggtgaaaccccgtctatactaaaaatacaaaaaaaattagccaggtatggtggcgcacgcctctaatccctgctactcgggaggctgaggcaggggaatccttgaaccagggaggaggagccgggccctgacccgcgcgggctcccttcctcggacgccgccccacagctggaggcctggcccgcgtcgccacctggccgtccacgccgctgcttacccgaggctcgcccggccggctgctccccgggcctgcacagctgccgccgcggcctcgcggacctggcccgcccgacccccgggtcgcccgcgcttcgcggcttctccacaggacgctcgggccacagcctcgtgcaggtgcgacggccgcgcgaccgttagcgcgaggccccgccccgtcctcagcgactccgcccccaccgctcactgactccgcccccaccgctcactggctccgcccccaccgctcactggctccgcccccaacgcgctcagactcagccctcgggggaggggaggggagcccggttcccgtttcctccttcttgggagttagagggacaagacagccgcaggcgcggggaggggtctccgtgcgctctcacagccgcgtgtggctctgtggtcgctggattccaaaagacggtgcgccggaaaaaaataaacatatctctctatctataatattatgaagggcgggcgcggtggctcacgcgtgtaatcccagcactttgggaggcagagacgggcggatcacctgagctcaggagttcaagaccagcctggccaacatggtgaaaccccgtctttactaaaaatacgaaagaaattagccaggcgtggtggtgagtgcctggttgtcttgtggcgccgcccgcccacccgagtagtcccagctactcaggaggctgaggtatgaaaatcgcttgaacccgggagaggtcgcttgaacccaggagaggaaggttgcagtgagccgagactgtactactgcactccagcctgggcaacagagtgagactctgtctccaaaaaaaaaaaaaaagaaaaaatgagccaggcacgacgatgcatgcctgtagtcccagctactggggaagctgaggggggagaatcgcttgagcccaggagttcaaggctgtggtgagctatgatggcgctactgcactccagcctgggcaagagtaagaccctgtctctacaaaattaattaattaattaattaattaatatatctacatctaatgatagatttggcatgtagtacatcaagaaaatacccatagatgggctgggcgcggtggctcacgcctgtaatcccagcactttgggaggccgaggcgggcggatcacgaggtcaggagatggagaccatcctgactaacaagatgaaaccccatctctactaaaaatacaaaaaattagccgggcgtggtggcgggtgcctgtagtcgcagctactccggaggctgaggcaggagaatggcgtgaacccgggaggcggagctggcagtgagctgagaccgcgccactgcactccagcctgggtgacagagcgagactccgtctcaaaagaaaagaaaaaagaaaaagaaagaaaaaaccctagatgtgtatatctatgtatgaaaaatatatatataattagatgtgctaaggattggacttaggtgaatctgacaaaaattttctcagctcttcatgtttttaattacttccatttagaaatctttttagtttaatgacttatactaatttttgttaacagagtaccaacccagggcaagtaagatccaaaaactaagtccattaaatttgtcacctactactgtccacatgtagcattatttaagtttctctttaaaaagagaagaacaactttggtgcatataacacacacatattataaaagaaaaataccactgtagaaccaagttttatgttattattaaaatacagtttttcttttcctcatttttttttaatttcccaaataatactgggaagcaaaataaagtacctgcatttcaccatttcaaatataatgggaagagttgggtttttaaatcgtccctattcctttccagtctctgcctttaaaagaagatatttttggccggggttggtagctcatgcctgtaatcccagcactttgggaggctgaggagggcagattgcctgagctcaggcgttcgaggccagactggcccaacgtggtgaaaccccatctctactaaaaatacaaaaattagccaggcatggtggcgggagcctgtaatcccagctactcgggaggctgaggcaggagaatcgcttaaacctgggaggcaaaggttgcagtgagccaagattacgccactgcactccagcctgggtgacagatggagactccatctcaaaaaaaaaa

SEQ ID NO: 1243068 - DNA, 4001 bp, Homo sapiens
gacctgatgatccacccgcatcagcctcccaaagtgctgggattacaggcgtgagccactgagcccagcccgggaaaattattgattttaaacacacctctacatagtaaaactacatgagggcagaggtggcatcttacgtatttttatgtatgtatttcataactgaaaaccataaatatcagatgaacgaaatggtggtttgtccctcaacatcatcactctaaaaggttctattgtagaaaaattgtaagctacaccaaacagattgacttcactttataatccagggcctctttaactctgggaatgcccacacccacccgctccagttcaaggacgtgtctcatgacacctgaatttcaggcagcctgtggagttagtcaaatatgattttgaattgcaacaccactagtttgtagtcgtgtgttttaacattactaaacattaatttcctcatccttaaattgtggataacatccacctggcagtgaaaagtagaaacagtgtatacaagatgcctcgatgttcacaggctcacagtcaatgatggccctgcttgtcaatattatccaatgtaccagtttttgtattcaaggcctttcagtgccagaagaaacatttgggaattaagctgtgtcaagtttttcattcgttctttggcctggtctgatgtggctcacaatgcagtgtcactatctaaaacacttgccgaactgtgacaaattcattcactcattcaaccattcaactaatatttatttacagcccaaagtgccagacatgtgagtcgagaggatgagtcagacatttgactcagtggctgaatattctgtacaaacacaactacctacacaccaagggatttctccacatttttaccccttagcatctcttggtgggacatggtatcctattatctctctgaattcccttatttgtctgctaccgttagaggtatatggtaatagacgttagtgtctgcccacaaaaaatatgacttgcttctctacctggtcactttaacagatacaaaattaacatgaactaaagagctcaatctgagaattcagagatgacttcattcaacaactactgtctcttttaccctacaattttgttttgttttgttttttgagacagagtcttgctctgtcgcccaggctggagcgcagtggcgcaatctcggctcactacaagctccgcctcccgggttcacgccattctcctgcctcagcctcccgagtagctgggactacaggcactcgccgccacgcctggctaattttttgtatttttagtagagacggggtttcaccgtgttagccaggatggtctcgatctcctgacctcgtgatccacccgcctcggcctcccaaagtgctgggattacaggcttgagccaccgcgcccggccctttttttttttttttttttttttttgacagagtcttgctctgttgcccagaccggagtgcaatggtgcgatcttggttcactgcaacctccacctcccgggttctagcgagtctcctggttcagcctccacagtagctgggattacagaagcctgctaccacacctggctaatttttgtattttttgtagagatggggttgcacctgaggtgggcagatcgcgaggtcaggaatttgagaccagcttggccaacatggtgaaaccccgtctatactaaaaatacaaaaaaaattagccaggtatggtggcgcacgcctctaatccctgctactcgggaggctgaggcaggggaatccttgaaccagggaggaggagccgggccctgacccgcgcgggctcccttcctcggacgccgccccacagctggaggcctggcccgcgtcgccacctggccgtccacgccgctgcttacccgaggctcgcccggccggctgctccccgggcctgcacagctgccgccgcggcctcgcggacctggcccgcccgacccccgggtcgcccgcgcttcgcggcttctccacaggacgctcgggccacagcctcgtgcaggtgcgacggccgcgcgaccgttagcgcgaggccccgccccgtcctcagcgactccgcccccaccgctcactgactccgcccccaccgctcactggctccgcccccaccgctcactggctccgcccccaacgcgctcagactcagccctcgggggaggggaggggagcccggttcccgtttcctccttcttgggagttagagggacaagacagccgcaggcgcggggaggggtctccgtgcgctctcacagccgcgtgtggctctgtggtcgctggattccaaaagacggtgcgccggaaaaaaataaacatatctctctatctataatattatgaagggcgggcgcggtggctcacgcgtgtaatcccagcactttgggaggcagagacgggcggatcacctgagctcaggagttcaagaccagcctggccaacatggtgaaaccccgtctttactaaaaatacgaaagaaattagccaggcgtggtggtgagtgcctggttgtcttgtggcgccgcccgcccacccgagtagtcccagctactcaggaggctgaggtatgaaaatcgcttgaacccgggagaggtcgcttgaacccaggagaggaaggttgcagtgagccgagactgtactactgcactccagcctgggcaacagagtgagactctgtctccaaaaaaaaaaaaaaagaaaaaatgagccaggcacgacgatgcatgcctgtagtcccagctactggggaagctgaggggggagaatcgcttgagcccaggagttcaaggctgtggtgagctatgatggcgctactgcactccagcctgggcaagagtaagaccctgtctctacaaaattaattaattaattaattaattaatatatctacatctaatgatagatttggcatgtagtacatcaagaaaatacccatagatgggctgggcgcggtggctcacgcctgtaatcccagcactttgggaggccgaggcgggcggatcacgaggtcaggagatggagaccatcctgactaacaagatgaaaccccatctctactaaaaatacaaaaaattagccgggcgtggtggcgggtgcctgtagtcgcagctactccggaggctgaggcaggagaatggcgtgaacccgggaggcggagctggcagtgagctgagaccgcgccactgcactccagcctgggtgacagagcgagactccgtctcaaaagaaaagaaaaaagaaaaagaaagaaaaaaccctagatgtgtatatctatgtatgaaaaatatatatataattagatgtgctaaggattggacttaggtgaatctgacaaaaattttctcagctcttcatgtttttaattacttccatttagaaatctttttagtttaatgacttatactaatttttgttaacagagtaccaacccagggcaagtaagatccaaaaactaagtccattaaatttgtcacctactactgtccacatgtagcattatttaagtttctctttaaaaagagaagaacaactttggtgcatataacacacacatattataaaagaaaaataccactgtagaaccaagttttatgttattattaaaatacagtttttcttttcctcatttttttttaatttcccaaataatactgggaagcaaaataaagtacctgcatttcaccatttcaaatataatgggaagagttgggtttttaaatcgtccctattcctttccagtctctgcctttaaaagaagatatttttggccggggttggtagctcatgcctgtaatcccagcactttgggaggctgaggagggcagattgcctgagctcaggcgttcgaggccagactggcccaacgtggtgaaaccccatctctactaaaaatacaaaaattagccaggcatggtggcgggagcctgtaatcccagctactcgggaggctgaggcaggagaatcgcttaaacctgggaggca

SEQ ID NO: 1243069 - DNA, 4001 bp, Homo sapiens
aacagcggcggtgtctggcggaggacacgggcggccaccacagtgatgacagactcctgcagctccacgtcatgggtgaccccatggatgatcccgtgaattactgtggggaggcatgtggctgcggtaggcattcaggggaaggcaggctccaggctccccccatggcggggacactcaccgaagtcgctggtgcatgcggccaggagcagctcagcgtcgctgcagggcctgcaggcacctggcatgcagagggggtggtgaggagaggccctgccctctcccggcatcaccccaggccccgtcccttgtccgcacaagcggcaggaggcagcaggcaaatgagcagagcccacgctcagggcctgatggcacctgggggtcccagagagctacacagcagatgtgcacgccctcggcgacacctgtactcaggaaacacacttgcaggcgcgtacctccaaggcaggaatgcacacagacgtgggcctgggggccatgcctagcgatcagctgtcctgggccgccctcctgcactcccatctgacatatgcaccccagcatctgggacccctctagtttcccggatctgaggtctgaagagcagcagcccagctagggtgataggaagtgggggcagaggaagggtggtctggggtccctggcccagggccagggggcagaatagcgagagcccatccctttcagggtcaggcgccaagctccaggagagccaagcaagagctgggcctggtgccctgcagggaggcgagcggcgtctccatggtgaccgggctgcacactggacttttgttggttgggctgggggaggggagagaggtcaccgctgggccagggagccccggacagctttggccggaggcttcgattctgtccccaccatctcttcccccaaccgttcagggaccagaggcccaggattgctgggcccggcctccccttccctccactctgcccctgccagctctttccagagatgaatcgggaagggagggcggggaggccatccctccccagcagtcccaggctgtgtggcctgacaagcccatccaacccttgtagctcactttttccttctgcagtggggccgacaaggcacattcccgccaagcccaggcagggtaagacttcgggactcccaccctgtcccaaccagaccgccactcaccgtctacgccgagaccgtgggcctgcgggggcagctcggggcgcccgtcctcgcgcagctcaaagcggaaggcggccacgcggcggctgatgtcctggtgcggcgtggcctgcaggaagagggcccggcgctcgcggggaccccagcgcacgcagcggccccctgccgggcccgggccctcggccagcagcagctccagggcgccccctgcgcgctccgcgaagacctgggcgcccgcgaagggccgcaccggccgcagacaggcgatgccgggccgcgctctgggatcggggccgcccagggtcaggcgcagcgccccagccgggtacagccactcaaccgcgccctccgcacaggccagggccagctgccccacgctgccgggctcctgggtgaggccgctggggacaggacgggacggggcgctgagacgggggcgggtccccgcccggcgcagcccccgctccctcccgaggccgcctcgcggatggggaaaccggcccagcgctctgcgcgctccgaggggcgcctggggggtcctagccgcagcgcaccccgtcctaagtgcggggacagccccccggaccgtacctgcccctccagctgcagcgctcctcggagtagccggcgcgggcagccggggccaggaggccgcagcacagcgcgcagagcagcgccgcggccgggaaccccatggcacggcgggcggcgtccggggagtcggggctctcaccaccgctgccccggcggggcgcgggtccgggcggcggcgggagcagccgggggcgccggccgcccggccccggcgaagcccccaagcccgcggccgctccgcctgccgcgcagccccagcgccggggccgccttggagcgggtcgggaagggggcggggcctgcggcgtgtcggccagtcgcggcgcggcccggaactttccgccaatagcaggcgcggggcggagcgggggcggggccggagctcgggcgccgccggaggactatcccacggtccaagcgcctcgagggttggggggggccttggcgcggaagggaggctccttgcccgccccgcgctgtgcgtctctccttcgccgcgccctcaccctggcctcgccccccgcgctgtcccgatcggagtcctggagcctctgatggagccgaggttttgatgtccactggaacctcggggtggcggtagggaaggtggcccacctggtggttccgcctcgcgggcggccgggcctgctccttcctaacactgggacctgggcctgttggccacatccctcccaaccaggtccggtcctgctgaccagaggccggtggagccccagaggagaggggtcatgactccagaggcggggaaggcctggcctgggggctgcgccttggagcggggccaggcctcgggttttggtaaggccgtctgcaggagggggtcctgctgaagagcgcgcagcccgcaggcttaggcccctttcctcagacctagcggcaccccatagttgccggatgaccgaccccgggccagacggggctcctggaggggcgtgaatggagcagccacgggcacccctgcaggcctgcagcacgtggagacacaggagctgggaggacacccctgggccacaggagcagcccccaccaagatgaaacaagcagaaacaggcgattcgcaaacacactgtagcctcaggctggagcagtgtgggattcccagcatccgggactgctgagttggcctgatgggaggaagtgggcagtggctggccaggtggacaggaagagaatgggggagagcagacagcctgggtcaagggcctgaggaaggagctcttggcagcccagtgaaaccccagggcatgggtggtgggtggggacgacaggtcagatcacagaaggcctaaggcacaagcaaaggggtcccactacatactgaaccccttacggacgacagaagctttagccggggactgcaaggaccagcatagactgtgcagcctgaagatgtgaacattccgtcccctgcccccaaacctcctgccacccggcgctcgaaactcatggtggacagatgagttcaccagtggcagtcggacagatgaggccagatggctcagtggcagtgggaggctggatcccactgaccaggccctccctcaaccccagggccctcccaggccaaacaggaacaaggcgcctactgggctcggccagccccttgctctgggcgaggtgcaggtcagaagtagccatcacaatccccaaaaggtggaagactcccaaaggcctgtctgcagctgagtggacaagcaagtgcagtgggtccatttttttttttttttttgagacggaatctcgttctgtcgcccaggctggagtgcagtggctcgatctcggctcactgcaacctctgcctcctgggttcatgccattctcctgcctcagcctcccgagcagctgagactacaggcgcccgccaccacacccggctaaatttttgtattttttctttttttagtagagagggtgtttcaccgtgttagccaggatggtctcgatctcctgacctcgtgatctgcccgccttggcctcccaaagtgctgggattacagatgtgagccaccgcgcccggcctcttttttttttttttttttttttttttttttgagatggagtttcgctctttgcccagtctggagtgcaatggcgcgatcttggctcactgcaacctccacctcctgggttcaagcgattctcctgcgtcagcctcccgagcagctgggattacaggcatgtgccatcatgccggcta

SEQ ID NO: 1243070 - DNA, 4001 bp, Homo sapiens
aaaatgcaagtgggttgtaaagaaagtctgtgaatctggcaaatcaatgcagaatttcatggtgtcattgaaagtgatggagaaatgctggacctgaaggccaacactcaatcaatcggactggcaaaaccacaccagattccagaagagaaaatacagcttatacctaccactcatttcaaaggcagatcaagctctctcaggacttagagatgtcctgggggaaaactgaggactttcacatacagttttttttgaagggggtggggaagatcctctctaatattgctgtaaaaatcaaaagtgaaccaaaggatgccatttctttttttgccatagcgcatttttttttttttttctgagacagagtctcactctgttgcccaggctagagtgcagtggtgccatctcggctcactacaacctccgcctcctgggctcaagtgatcctacctcagagtcccgagtaactgggactacaggcatgcaccacaatgtccacctaatttttgtatttttagtaaagatggggttttgccatgttggccaggctagtcttgaactcctgaccaaggtagatccatctaccttggcctcccaaagtgctgggattataggtgtgagccaccaggcatggcctatagcgcaattttgttggaaaacttacatcccagaaaaatcaatgttctttgctttttccaaaagtgagcataatattacacaccaaattttaagtatagacacacacaaaaaaactcaaattcttaatctctagttgaattttccatttttaaattcaacccaaccaggcttcccaagaaatgtacgctgcaatgtaagttccagatgaaggagattccctttaagtggctttccctagaatcagctatctgggaataaggaggccctcttgaacctatctcaggccctcatatactcagaggagtatatgagacaattaccacttttcgggcttacgacatatagtaaacgttcaataagcaacaatagtaaatactatcattatagtaatataataatgattaaagtgaatgctgggaagaaagaaaaaaggtaacagtttctctagtcaggaaaagtctctttccggaaatgcagggtctgtatgggcttcgggctcctctctttactgggcagagctgagaaaggagacccaggttgcagatggggacctgccccaccacctctccatagggctgcaggctcatccctgcagcaggagctaacgtgttcttggctcttctaaggctgtgggggctagactgagacgctaccagctttcttctcctataggtccccagtcagttgtcccaaataagcagtgtgctgggatcacggtgttgaaataacttccctcctcatctttctttctgataactgcaactcactcaacaatcaataatttggcgcgatcccatgacgatttaggccaggagctggggagggcagggtgtgaaggcccaggctgggggcaggaaagacgtggcctggccacggtgcgtagagtggtagtgaggggctccggggacgtcccccgtggggctactcgttctctttgtcttgtcgccttcctgacgccacccttgtgggttaactattgccctctcaaaaaacagtcacaggtcgggcactgccctcccttcctaatctagaaccgaaggagaggtgcctggacccaggatggaaacccaggtgaggacgtggacttctttccccaacacccgtgttgagaaggggaaactgacgctaagagtggggtcgggccttagggatctgggcctccgatctgtgggagctcggatttcaaagtcaggctcggcgccaggaggttccctgcaccctaccctatcccgccgcctctcccaggcacttacccgccgcggggcccagcctgggatcccacccgactcccgtctctgtgggacttaggcggccgccataacaggcggtctgcgcaggcgcggccccgcccccgcgtgcgaccatccgactgccccgcaccgtggctccacctacctgcccgggccgcgcatgcgtccgagggttgccggcgggcacctgtagccttcgctctggtcgcgggcgaggcgtgtttgctggggggacccgcctaggtggctaaactcattcctctaaaagacttaaataggagttaaataactctcccagctactaagtggtaaagcctggattcgaacccggggtgtgggatcagagccggtgctatttaaccagcatgctactgtatttattatcacgggtgttaccgtcatccatgctcttagtactcgtttgtttgtttgtttgtttatttgagatggtcttgctctgtcacccaggctggagtgcagcggcgcaattttagctcactgcagccttgaactcctgggcttaaggaatcctgtttcagcctctctagtagctgggactacagttgcgtggcaccatttttttttttttttgtacagactgtatcttgttgtgttgcccaggctggtctcaaactcctggcttcaagcagtcctcctgcttcggcctcctaaagctcataaattacaggcatgagccaccacgcccagccagtacttgttattattaataggtggtagtgatttcattaggtggtagtgatttcgttaattcgtatgctcatcaagtttccaacaccaagggggtgagacagagtggcaaacataagactccatgtttgctcgttttttcttgcctgcagaatttcagaaagcctctgagtccgtgactgagcacagccctcagaagaatcccctgaagaggatgagcaggatagaccacagattctcacgtctcttgcctgagtcactgcatttttagaaaaagtacagtcaataatattggcccttttctcaatctatatattcagtgacatcatggaagtcagcctggccacaatggagtaagccaggggatgggccgcaggaaacgaggatacataggtagccagggttagaacttttgtgacattctaagaactttggattttactgtgcgtgagatggggagctgccagggatatacaccacactgacgtgttcacagacatgcccagacacacacagtggtgctcactctcagacatgtcagtgaacatacaaatatacacacaggaacatatgtaaagtccacatatgtaaaatctatatccctgtgtgttcacatatacacacacgcacacacatggcctcagctggcaacctttgtctaaattacttttttttctcttttcaaaatagaattaaatcaacatcaatttcatggttactgatgataaaacgtggagagttgatagggtgactaagcgacacaaataagaattttttttttttttttttttaagaaacagattatgtttcctgaaatcccccaggacagtacacagagagccagttgggtgtcttgggaccagattctattcatagttttctctctagttcgctgagggttctcttagttatccccagaggatgttgagtggtggggagggcactaggaaggcattgttcacacccttgggagttttgtcttcaaatttaaaccgggggaatgacccttaaaaatcaaaagatcacattcctcctcttgtcaaacctataatcttttataggggattagtgcccctacaaaagaggccccaaagagctgcctcacttcttctgtcatgtgaggacacggcaaaaagacagccatctatgaccaagaattggacacagaatctgccagtgccttgattttggactttccagcccctagaaccatgagaaatgaatgtgtttatcagccaccccatgtatggtattctgttatagcagcccagatggccccaaaagggttatcatttctgccacaaattttgaggtggtttgcaacacagtaataggtcaccaggtaaggggaaagaaagccagcccttcttggcagggctgcaaagagatggtagctggggg

SEQ ID NO: 1243071 - DNA, 4001 bp, Homo sapiens
tgataagtgttataaataccaatagctaagagactcaaccataatcccccatcaatggagataaatcgctttttctcctatccaggaccttatttctatcaactgcttaaaaatgttaaaaatgacatttctaattcattgtctaccccattgttccatatgtgacattctggtaactgtacagtcaacggtacagtacctttgagttgtctctataagaatgaactagtgtaagcaaataatccataggaataaatgtggttttgcaatttaagtttacatacattcctaaccatatcatacaagtgatcaatgatactgatattgcacctaacaaactgcaatggctggaggctttcaaaaaaatttacagaaatttaggattcctttaacaatagaaaaaagcccaatatacatattactaaagactaaatgctacttttctaaattgctctatctccttcttagacaattctctaccctcattaaaacacatgaaatcaacctgggtgtaaattctctgaacacctggcataataaaaaagtaatgtaggaaaatgagaaatatatgaaaatgatgagacacaagatgatatagggaataattaatactctatggaaaagcaaaatgtattataaatgctagctatgacaagccaacactctggcagagttcaaaagcctcttttcaatgaatttaacattaactgcaaactatgttaaggtcatatacgaaatatctcacttaattctacagttaacctgtacacgtttaagtggcgcaagactgagctaatgaaaagcctacctacccggtcacagcgtaacgctcacgatgcataactaaaactccctcccgtcccgttctgttttaaaaacccttcctgtaaaacttgcataatcttcctcctcatcacacacaatctttctagcaggctgactaaatccaagtttaaaggagatctctgctaggtaggaggggaaggttccgtaggatgggagcgacaacctgtcaaacccattttttaagtgcttagggagaaatgtcaccccaatcagcctggagagttcaatggcttgcgatgtacagttacatttcttcacgaccctttgtacgttctgggattcaacgagacaacaagaggggctggcttttcgttttgtttctcggggtaatggatctggccgggtctcttcagtctcaggcctcggtgccaggcgggcgcccccagccacgctctggccccaaagttccccagtcccgctgccgggcgtccgcagtcaccgcccgggacccaggaacaatgcggggctccgggccgctcacgatcgggcccgggaggccatgccccgcctgcgctgcggaacaaaaggcgctcgcggggccgcggccgggtgcccggggctcgcggagtcgacgcccggcggggaaggcgcggggaaaactttccaaggggccgaggcggaggggcgagggccgggccgccccctcgcggagccgtcccgcacaatagccgggcccagcgcgggaaggccgggccgccacgcccccgccccggccccggccccagcccgtacctggtggttctccttcctgccgcccgcggccgccgccggcccacccgggccgctagtcatgttcacgtacagggagcgggtgagcgggctccgcagcgtccacatcctccgcgccagccacacggacgccaggctcaggcacagccagcccgccagcagtctcatcgggggccgcggccgctcgctcggatcaccgccggcgccggggcgaggaggaggaggcaccgccgcctccggccaccgccgccaccgcccgagctcgagccatcgcggccgccttgcccatccagcccccttcagggcaaaggctgggggtggggaggagcagccggcgcgcagcctcggcacctcccccttcccttccggccgcggaacgccgctgccccctgcaccagtttccatccggagcacttacgagcggccgcgtcgctttctcccccggcgccctccctccgtccaatgagcgggccgctgggaggcgggacaaagggagcgcgcatccgcccggagcgcgttctcgtgtcccggccctgccttggcctctagtaaatggcggaggtggttttaatttttttgagggctgaggagatcacttccgaaggcggtaactgcagcctccctgcccctccaaggtggtgctggaaggacctccagtctttcctcgcctcatcccactccacggcgggactttgacagggttacctctcgaccctcatcccactccacggcgggactttgacagggtcgtgcagttaaccccgggggcgcaaagaggggagtcattcctttcgtgcatcctgacacacacaggttcttcccggagacgaatggtgccagtgatggttgcccgctcggatgcgtagtttccagtttacatttagaaccgacctgccagactccctcctctactctccccaccaccacgacccgcctgccccgttccccaagcctgagaagttgctggctacgtgtttctataaagaatgagtgaaaattctgccttttggggaagctaccgcagctggggtacccacaagtaatgttttagatgtattgatggccctgcccaagaatgaagacctcaagttagactccttggctgccttgtttccttgaattagcacagggaagttggacccaacactcttaagagtgaactcagctctgggagcagtgtttaacccggatatttatttgatcatttataacacgaggagacctagcaacatttcagaactgaagggttagttacactgtgttcctgtctgcagttcttcctgctattatccaagccacaattaaggagtaacatttcgtgggagtccctaactttaatactttcctaggtttgtttggaaagtgcttttaatttaactgcaccagaaataatgtaaatgtgtctaagttcaaaacaaaagaagtaagccttttggttaattcagcgttgcacatcagagattttcatttatgaaacagtggggtggtgagccacagatggggaacaaaatcattccttacccaacagcttttttttttttttttttttgaaacggagtggagtctcgctctgtctccaggctggagtgcagtggctcgatctcggctcacttcaaactccgcctcccgggttcaagcaattcttctgcctcagcctcccgagcagctgggactacgggtgcgcgccaccatgcccagctaatttttgtgtttttcgtagagacgggatttcaccatgttggccaggatggtctccatctcttgacctcgtgatccgcctgcctcggcctcccaaagtgctgggattacaggcgtgagccaccgcacctggcccaacagctctttcattagcttttaagaatctcagcttggcacctttggctaacaaggatatcttgttgcctaatgtaacaggctgtaacaacaaacaaaaaggcacagggtgggtggggttcggtattttgtgttctctctttccaatatactccctgactgcttcctgccaaaaccccgaaaagcccaagccttactaaatctagttcaaacctctagtggtcctggcccaagtcatcaaaaaggaactatggtagcaagtccaataactgtttatttactatgacacctctccttcctgtctcttaggatcagtgtaacagacaaagcaactctgtcacaaaaggaagccttcatctttttaaagtgggggtgaaagcagcaggagtgcataaaatggcatatttcctttctgaagacaaaggagacaaaaaggtatgccccagctatagagtgagaccacatagctgtagctgagagactgcaaaatgttatcagatgaacaagcaagtagatggctgctgtagtcagaaggattttggggtcagttgactgccacgaagcctaacagctcaaaggagcagattttgttt

SEQ ID NO: 1243072 - DNA, 4001 bp, Homo sapiens
cacggcgggactttgacagggttacctctcgaccctcatcccactccacggcgggactttgacagggtcgtgcagttaaccccgggggcgcaaagaggggagtcattcctttcgtgcatcctgacacacacaggttcttcccggagacgaatggtgccagtgatggttgcccgctcggatgcgtagtttccagtttacatttagaaccgacctgccagactccctcctctactctccccaccaccacgacccgcctgccccgttccccaagcctgagaagttgctggctacgtgtttctataaagaatgagtgaaaattctgccttttggggaagctaccgcagctggggtacccacaagtaatgttttagatgtattgatggccctgcccaagaatgaagacctcaagttagactccttggctgccttgtttccttgaattagcacagggaagttggacccaacactcttaagagtgaactcagctctgggagcagtgtttaacccggatatttatttgatcatttataacacgaggagacctagcaacatttcagaactgaagggttagttacactgtgttcctgtctgcagttcttcctgctattatccaagccacaattaaggagtaacatttcgtgggagtccctaactttaatactttcctaggtttgtttggaaagtgcttttaatttaactgcaccagaaataatgtaaatgtgtctaagttcaaaacaaaagaagtaagccttttggttaattcagcgttgcacatcagagattttcatttatgaaacagtggggtggtgagccacagatggggaacaaaatcattccttacccaacagcttttttttttttttttttttgaaacggagtggagtctcgctctgtctccaggctggagtgcagtggctcgatctcggctcacttcaaactccgcctcccgggttcaagcaattcttctgcctcagcctcccgagcagctgggactacgggtgcgcgccaccatgcccagctaatttttgtgtttttcgtagagacgggatttcaccatgttggccaggatggtctccatctcttgacctcgtgatccgcctgcctcggcctcccaaagtgctgggattacaggcgtgagccaccgcacctggcccaacagctctttcattagcttttaagaatctcagcttggcacctttggctaacaaggatatcttgttgcctaatgtaacaggctgtaacaacaaacaaaaaggcacagggtgggtggggttcggtattttgtgttctctctttccaatatactccctgactgcttcctgccaaaaccccgaaaagcccaagccttactaaatctagttcaaacctctagtggtcctggcccaagtcatcaaaaaggaactatggtagcaagtccaataactgtttatttactatgacacctctccttcctgtctcttaggatcagtgtaacagacaaagcaactctgtcacaaaaggaagccttcatctttttaaagtgggggtgaaagcagcaggagtgcataaaatggcatatttcctttctgaagacaaaggagacaaaaaggtatgccccagctatagagtgagaccacatagctgtagctgagagactgcaaaatgttatcagatgaacaagcaagtagatggctgctgtagtcagaaggattttggggtcagttgactgccacgaagcctaacagctcaaaggagcagattttgttttatatctgagcagctggcctagaaaaataaatcactcatacatttaaaatactctataataaccaccaaacactcaaacccatgctatttacatttagcaggcacaggaagaaaccagagcatccgatgatcaaatgatttgcctgaaggtagcagagtaaattcaatagctgaccttttcatagaacttggtatcccagctcgtggtctttcgatccatctaagaagctttgctgtctcttctcagagagcctcctgaattacaaatgaggagaaacgaaaacagcaagagtaaatatacgaagcagaagttcagattgcccactggggacagcccccttccttcatctactagaatgtcactaccgtatattaaaacctcaattctccataatggagacgggaaggggcaagatgacacaaaaagccaaatagccaatactcgttctaacatgatcttgagatgcagttagtaatattcaaaagatacacaaatgaccctctgcaccgaactctgctcattgaccccaggtgtcccacttgggtcacagccctgtacacaggcccaaaattttggcgggatcactttcctatctagatctctaggcaaaggctttttgttattgttgttctttgaagttacaaagcttggcattttcatattctcttttcaattacaaagtatcatgttaagagaatccacaagcagagagtttggatctgtacaaaacctattgatgattgttatctccttgaagagataatgatttaaaaagaactcatatagaccaggcagggtggctcatgcttgtaatcccagcactttgggaagccaaggcaggtggatggcttgagcccaggagttcaaggccagcctgggcaacatggagaaaccccgtgtctacaaaaaatacaaaaataagacaggcgtggtgacatgcacctgtagacccatctactcaggaggctgaggtgggaggatcacctgagcctgggaggctgaggctgcagtgaactgagattgtgccactgcactccagcttgggtgaccctgtatcaaaaaataaaaataaaaataactcatataatcactttttttttcccgagatggagtcttgctctgttgcccaggctggagtgcagtggcacgatctcggcttgctgcaacctctgcctctcgggttcaagcaattctcctgcctcagcctcctgagtagctgggattataggcacctgccaccacgcctggctattttttgtatttttagtagagatggggtttcaccatgttggccaggctggtctcaaactcctgacctcgtgatccgcctgctgcagcctcccaaagtgctaggattacaggcgtgagccactgcacctggccataatcatgtttttatggacagatattttttatgcttcttaatattgttttgtataccttcagagaaagatacagctttttcccagtatattcaatagaatgtgtcctgtagttattaagcaatgagcacctctaacaaaattagcaaatgtactcaacaatttgtttaattaattaacgtaggagatctttatctgaatttagttgatacaacttcaatcctgtgcaatgatatcactgtgggctccagttgatgaattctaagtcaaggcaaaactgcagacagctttgaaaaaaaaaaaattagtagcctaggccaggcaccatggctcatgcttgtaatcccagctactcaggaggctgacacaggagaatcgcttgaacccaggaggcagaggccgcagtgagctgagatcatgccactgtactccaggctgggcaacacagtgaaactccatctcaaaaaaaaaaaaaaaaaaaaaagcctcaagtagcagaattgaaccaggggttagaagatgttagtagttggccaggtgcggtggctcacacctgtaatcccagcactttgggagattgaggtgggtggatcacaaggtcaggagtttgagaccagcctggccaacatggtgaaacccggtctctactaaaaatacaaaaaaaattagccaggggtgatggcctgcacctgcaatcccagctgctcatgaggctgatgcaggagaattgcttgaacctgagaggtggaagttgcagtgagctgagatcacaccactgcactccagcctgggtgacagagtgagactccatctcaaaaaaaagaagacgttagtagcaaatacaagtaacatcgtgtgcttcattggagaac

SEQ ID NO: 1243073 - DNA, 4001 bp, Homo sapiens
gtggctgacgcgagtgttctgcgatggatgctcagtgggagggagggccacgagtgattagcaatgacatttcagccacagtgggatcccgaagcgggctgtaaatgacatgtatgttattctgttcagcccaagtgaagaacggacatcaagtgagctcaggtcccaggtgacaggaagtgccactcaactttttgatatctgtgtcatgccactgcttactatgattatggtcattagctagtcacttatcttcctttatgagcaattgtagcagctaccatttggggacttctgagccaggtgtggttctgagggctgtataagcatcagcccgttttacagatgaggaaactgggacccagggggttaagcaacctcgaccaaggtcactcagccagaggcaggctggaagaatatcagagatgaaagaggacaacagcaaactgctccatctgatgtagggccatcagccctcggaacctctagggaaaccccagggtggaaccacccaaaggccaggctgacccgctgctgggcctgggatacagctgtgctctccccagcaggcaggcaacagtgcgttctgcctagctctgagtccatccccttcagagtgcccccaaactgtgctggttcccctcacttcatcccagtggccccaggccctcacctagtcacaccttacaaaacctgggcagagcagtttttcaaacctgagtggacgtaaaactcacatggggaatgggttgaaaatgcaggttcccaggccccaaggggtcccaggcaggccctggcatgtctagcagtcctcccccacttgtggacctggcccacactcagagaaatctggcctgtgggtgtccggagacacccaggagactgagacatcagatcagatgagacgccaggatctgaggacccaatctagatgtccccatgatgcccaagttctctctcctcttccttctctcctttccaccacaaagaaccccacgaggagatggagggtgagacttggagctagatgctcccagtcaacacataactcatcaatagaggcagaaagagagctgggaacaaagctacgtgggagccccacagctggtcccggtcccaactatgcttccatccagctgagatcttggcagtcacttcctccttggtgtcttacgtccctcagccataacacagaggcccgagtatcggctgggtcctctcagcaaggaccctggcccctcccgatcaactataatcgtctccttgggcccagccccactcctccaacccacacaccaagagcctccgtcctgatgggagggaaattgcccaaaccactggctcggccttcacaccaagccactaaagaaagcgaaagccggcccccgcggtgaggtcaatctgatgacaatgagagttttctaggcagaagcgatgcgccgggacccgcgctcagcaccccgccccgccctcggggtttcccccaggagctcccccctgttgcaaggacggagctgaggtgcccggggcgaagggactgccccaaggtcacccaagccgggcagtagcagcgccaggtacggctcgggcaggttcctccggggcccccagccacgcctagggatcggggccgtggggccgcgcgaaggctcggggtagcaacgaggcccggagggggccgagcagggcgccccgccccgagtccccgcccccgcgcccgccgggtccgcgttccagcgcgtgcctagcagtccgcgcctggggccgggcgctcaccggacttcggagggtagcgataggccgagttcgcctggatgtcgatgtcctccacccccgcgatgcggcggctgagaatggagcccatggtgcgcggcgctgccgggcagaggggccagggccggaacgggagcggcgacagcggcggggtcctcacgcggacatggcccggaccaggccgcacggacgctcgtccacggccgcggaggcgcctcgagcccccacccccggctcggcccggggaccgacgccacggcggccctccgcctcccggtcccggggcacgtcgggaaatggagtcctctcgccgccgaaggcgccgggaagcagcgcgggaagcccgtctgggaactatctttcccaggatgctccgttcccaggccctctgacgggttgacaagcactccgggacaaaccaaatggacctaaattcagagggaaggaaccaaccaaccacagggcaaatggtccttccctctgcgttccaagcgctgcactaacatattaactctttggtcatttcctcatctgttcgcttacagactctcctggagccccagcgccttccacttgccccctctgaaatagctccctgagtcgctgtggttctccccactcccctgagtttgtctcccgccccgaccggcagagggcgtagctgcacctgccacccggagcccacttgcagggtgtgcacggaagaagtgaagcacctgctttggccttggccagaatttgaggactaccatttggggacttctgaaccaggtgtggttctgagagctgtataggcatcagcccgttttacagatgaggaagctgggatccagggggttaagcaacctccggccccctgacaaggctgaggcccggtgcagtggctcacctgtaatcccgatactttggccccacgtctggaccaattagtttaaagacataatttcacagcctccacggaaggcagtagactctcccacattttacacacagggaaactgaggcacagaggagagagagccgcatgaaatggcgctgcgggcaagattgcaagaatcgctttcagaatgaaaacctcgcagtgtgcaaggtgttccctggcttttgagtcacacacagctctgcaaatagatcgctttttacctacttttcagttgaggaacttggattctgagcagagtgatttcccaagtcaagcctgctgtaccaagaaagcagctagggagggcaaggcagactgagtctccaatggtcaattcaccacagtccatgtggaaatgcttcttatacccttccagagaccacagtccaggatccagtcttcctctttttttttaaattgttctgtcgcgcagtctggagagaagtggcacaatctcagctcactacagcctttgcctcccgtgttcaagcgattctcgtgcctcagcctccccagtagctgggattacaggcatgcaccatcacacccagccaatttttgcatttttagtagagacagggtttcaccatgttagccaggctggtcttgaactcccgtcctcaagtgatccgcctgccttggcctcccaaagtgttgggattagagatgagccactgcacctggcctcagacttcctcttgtcaggggaacttgggaagccaaatgagtacggcagccaagagacttgtgtgattatgatgcaggtccaggtcttggaggagcctgattaaatctccctgccccacaaccaagatccacacttactgagcattatgtgccaggcatcatgctgagggctctgcacatatcctctcatataattctttgatgttggccgggcgcagtggctcacacctgtaatcctaacactttgggaggccgaggcaggcagatagcctgcacccaggagttccagaacagactgggcaacatgtcatgaccctgtctctaccaaaaatgtaaaaattagccaggtgtgatggcacgcccctgtagtcacagctactctggaggtggaggcaggagcatagcttgagcctgggaggtcgaggttgcagtgagccatgatcatgccactgcactccagcctgggtgatagagtgagaccctatctctaaaaaggataaaaattttaaaaaataaaatattaaaaaaacaggccaggcactgtggctcacgcctgtaatcccagcactttgggaggccgaggcaggcatatcacttgaggtcaagggtttaagactag

SEQ ID NO: 1243074 - DNA, 4001 bp, Homo sapiens
agactgggggacaccgctggcatttagggtttggggggcctggatctaaaagacttcacacaacacataggtgggacagatctgtataatgaagattcgcctggtacgagagtctttcaaatgaacgggcagattaagcccactataaactggcattactttacaatatttaaaagtttttataagaaattgcagggaaactccagtaatgtaggagaaagtagcaagggaagcttaaatagagtaagggaaaactgtctaaacattagcgatcgtttcctcacaccacacaccgttaacatacaattgtagtatcagaatactgagcatatacaaacaagtgagatactgatattgaaccaaaaattttcaaccttgttaatattttattaattattaccaatggtaattgttaggaagccagtattgtcccttcgagtgtgtgacacaaaaaattctacaatatagtttaaaaatatggatccatggagggcttgtgctaatatttacgtatttattgagacagtctgttatttgtcttgccatgttatccctagttcaatctaggttgtttctctctttaattcgcaagaaacaggttatgccaacctaggtgtttttcccaacctccgtctgtatctctgctctttccctgaagtagcggcctcactctgtagcccaggctggagggcagtggtgcaatcacagctcactgcagcctttaactcctgggctcaagagatcccctcacctcagcctcccaagcagctgagactacaggtgtgcgccaccacaccacgctaattttttctttttttgtacaggtgggatctcgctatattgcccaggcttgctcttgtttgaaatagctcctcctaattttttttaaccaatacaaatgtactcattagaagctggcacaagcaccccagtatatactgtcttccagcacaagagtatgtcctagatgtgaatggtacagcaacatctgtcatatactgttctctatttcgcccttacgcttcaatcaaaccatcatactgcttttcaaggatgtgtgtagggaggtcacattgtttatgaatttcatttcagggtagtaaagagggctttatacatgtttgctgcaaaggggaagaagggaccttgattctgacgaggttgagaaccactgttcccaagagtggaatcgcgtgctgaaacaaaaatcgaacttttagagaagagtttcctttgcctaaggcaagccctgggctccaatattccacttcattgggcctgacaccccactaccagcacacgcccgctgctctcagcccacctctgcttccaagcagggccaaacaatggttcttgaccacttggggatcggggacccttttaggaacgagacaaaagccctggaaaaactctctcccaagaaacccatataccaagctgcatccaacttcagggcgctcccagacaccccctctgaagcctggtcgggaccccaggagaaaagggctgaggggagtgggaggtgggaagaggaagggggcgcaggggtcccggtcccctcccaccgcctcctcgcagtgtggctctggcccgggcgctccacctctctgtgcagccccggcgtgcaagcgcgcaacttaagtgcccggcacacagcagaggctccataaacgccgctgccactgtcagcagggccaactctgcagtcgagatggacactgaggcggccccggggtcgcgcccgggcgcgaggaccggttgaaggaggcaccggcccgcggccccggccgccccgccccgcgcgagtcccggggacggtgcggaccaaacggcgccgcagctgctgcggggacgaacagggatggctgcctgggacgcgggatgttcaccaggcccgctcccccacccagccctcggtctcggccgctctcacccggcctcagcccccaacggccgccaccgcccgccgctcacctccccggccgccgccgccgccgctcccgccgccgccgcgcgatctcgcgagacttcgctcccctcggcactccccctcctccccgcggcgcgcgcggaccccaggctagaagcggctcggcgcgctccccggacgctgcccaccccgcctcaagggtcaagcccggcctctctcgctgctcgcccccgactccgtccctgcgtgcactccgcccactcccgtgactgggaagggttaaagcccaggtgcgaggcggccgcctccttctcacctggccggccgggtgcgcgtgcgcatgcgcatgtccggggctcggccctgagcctctgcaaaggcttggacggtggcgacaaaggtgaccgctgccacccgtcctgagtgctcgctgcgcgccgagcacttaacagcccccttcggtcctcacactgccctccaaagtgggtattaccagcctccccattctagagagaggaaaaatggaggcctggcaaggaaagtacagtaatggctccatgtcacacagccaggaattggctgagccagtgttgggatctggggttgtctgatgcccagcccaaaacccatttctgcacctcagtgacagcccccaggccctgtccctctttccgttcaaggctcaaggcgctgcctctcagccgcagtcttcattctctcccaacattcaccaaggtgagaggaggagctcctgggaagtcatttgctacaatctgttttcaatggagctggcgacagtaaagtgcttctccctcactttacaaacttcccaaggcctgtgaagcccctgtgccactccctgtgcagctctgaagactgtgtgactatttttatgcggttctgtctcctccttagactggtggcgttttgctggtagagagcatgatggaatggcacacaggacagagaatcagaatgtacatgatgttagcacacagaaaagtgtgacttcttcccaggagtaagtcttaatgaaataataattgtttgtaaagaggaagggctaacatttattgcgggcatatcaaggtcataccaatcttcttgcaatcctggaggtggagaaagtagcctgtttccattgtgaaataggatttgaacctgggtctgagtccggagcccagcactaccttgtaggtaggtcctgttctgcaagcaagcgagcatgagctagctcatctgggccggctgctgtaagatcaggagccctggaggttctaggtagccttccacctgcaacagcgtctgcatgggcttacccagcccacctgataatcacatcaatgtcagcaagtgctggcctgcccatgctccaaacctgtccactctccccggaaccaattgctgtgtacaggccagagcatgtgggtgcccttgcatgtttcaacctcactcaactcaccagatggaggaagtgggtgaagaaggaaaatcacacctgctgggcagctacaaagtgctgagccctgctccaggtgctgtctatttattaatttatttagccctcccaacaaccctgtattagggttctccagagaaacacagctactaggttctagatagatgtaggctgggcaaggttgctcattcctgtaatcccagcaccttaggaggtccagtcaggaggatcacttgagcctaggagttttagaccagcctgggtaacacagtgagaccccgtctctacaaaaaataaaaagaattgggcatggtggcacatgcctggagttccagttactctggaggctgatgtgagaggatctcttgagcccaggagtcgaggctgcagtgagctctgactgtgccactgccctccagtctggacaacagagtgagaccctgtctctaaaaaagaaaaaactatatagattcataagaggggatgtatgatggcagctgagaagtcctacgatgtgccatctccaaactggaaagccagggaaactggtgacatagctcagtcgcagttgtggcccgagaaccagggaatctgatggtgtaactctcagtt

SEQ ID NO: 1243075 - DNA, 4001 bp, Homo sapiens
tcacctgaggtcgggagtttgagatcgcccggccaacatggtgaaaccccatctctactaaaaatactaaaattagccaagcatggtagcaggcgcctgtaatcccagctactcgggaggctgaggcaggagaattgcttgaacccgggaggtggaggttgcactgagccgagatcacaccactgtgctccaacctgggcaacagagcaaaactccgtctcaaaaacaaaaacaaaaacaaaaaaaaagaaagaaagaaaattgcacaaaacaaagcttgaagaaaggaggaaagagaagtgttatatttctggctgggaagactaaaacagaccaacccagcaatccttcccaaatttaaatccaatttaatgcagttccaataaaacatctactgacatattttggcattaaatcaaaatgatcctaaagttcatttgaaatgggaaattagtagggataaccaggattttaaaaaataaagaaaaggggacttgcctgtatgaaattaaaatatattaaaaactgcaaaatattgggaaaaagcaccctacaataacttaaattgtttaaggtcttattaagtatatgatctacaagggaagaaagggaatatacatatatacacacttagactgggcaatttgaatttctaggaacttatgatgtagaaaagcttgtgtttgtagatagatggctaccgagatgttcactgcagtgctatttataatatgtaaaacaaacagctaagaatatgttcaggccagctgcagtggctcacacctgtaatcccagcactttgggagggtgaggtaggaggatcacctgagcccaggagtttgagaccagcctgggtgacaaagcgagaccctggctctaccaaaaaatacaaaaaaaatttaattgggtgtggtgatgtgcaccttgtagtcctagctacttgggaggatctggttggaggatcacttgagcccatgagttcggaggctgcagtgagctatgattgtgccactgcgctccagcctgggcaacagaggaagactccatctctcaaaataaataaataaaaagaaaaaggggattatgttcatatgttacgatgagaaaacaggttactaattttaaaagtgaaaaatctttaaatggtaataacaatgcaaattcacctcttccctccaaaaaataaaaaataaaaataaaataaaataagtaaaggttatcaggcatttccctcttctctctctctcactctgtctctctctcacgccttcagcctgcaaacctgaagacttcctttttctgagaagacatcaggtaacttgttcccgtgcccctgccctccacgacccccactgctactgggcgtctcgctttggcggaaggtagtgcgagatccgagcaggcagctccaccatcagagctgaggaaatgaaaccaactcggtcctgagttccaggaactcggaccgggccaccctcacccctggttcttcccatcaccgtccaggaattcggctgcagcccctcggccccgccgcctcctgggaagaccccatgctcaccttcgcgcctcccgaggggtgtgcgtccaatctgtcccgtgcacagttccaaaaagctcgctcttccaccttctttcccacgaccgcctcctgcccaggcgagaagtttgcaaacgcgaggcccgcgggagttcccctgcgccccctttcctggtgcccgcaccctgcactctgctgactgtaccggacgccacacgtggctggcggcgacaaggcgccccgatccctacctgagggaaaccccggccactgcagctgcacttgagcagggtccctccactcagccacttggatggctgtttctgtccagtgccctccggaggccactgcctcaggtctgtgatgcctgcagagaatgctgcgacacttccccctccgacgtggctccagctgccaaccaccaggctcacggtgccctggctccctggagccgctttctaggcagctcggagccacggcccctcccttccttcctcctgtcctttccacactcttcctgccttccccaaagtcactgggtaactacgctgtacacgtcagtaccaagccttctttaggggctggggattcagaatagaataaggtcccagcaactattataaccaggacacagtatgagaaggactggaagtttagagaaaaactgaaagttggagagaagcttctggtgtttgcttctctgtgctggataatattggcggggtggggagggtacgagggaagagacaccaaagtgggaaaaaagtcacttcctcttctaaggtcattgcagaacatcctgttacagtgtgagtcaggttttcttaagattaactacatcttcagctagaaagtctaagtagtgttatgcatttactcaacagactatttgcctctaaaagaacagaactgggagctgggtgtggtggctcatgcctgtaattccagcactttgggaggcggaggtggccagatcacctgaggtcaggagttcaagaccatcctggccaacatggggaaaccctgtctctactaaaaatacaaaaattagccaggcgtggtggtgcatgcctgtaatcccagctactcgggagcctgagaggggagaatcgcttgaagccggccttggagattcatttcttcgccttgctattgttcttcgtctcctgcatcatcagttttcttcctgtcttaggtgaagagattgaggtgaggcaggagaatagggtctgcaggcagggaacataaagctgattcacgctgacttcttagaactaaataaaatggacacatttcagctatgacaggaaatattttcttcatttacatatggcgttcactgagtaagtgactgagcaacttcacttcatcttcttcatttacatagggtgtacaccaattaaccaatgggagcctctagagggtatttaaatcccagaaaattctgtaacggagttcttgagcccctatgctcacgctggctcccaccctgtggagtgtacctttgttttcaatacatctctgcttttgttgcctcattctttccttgctttgtgcattttgcccatttctttgttcaagatgccaagaacctggacaccttcaacaagtaacacaggtgcctgtgatttattgaaggaagactcttaggagagtggtgggtatgatagggcagaggaagaaaaagtgaaacaagtatgtagtcagtggaggctccatggggaggtctggaatgtgaaggtctggaacaagaggcagcctcctttctgcccagggcaattcttctggacgagggggaagctgtgtgagtgtttagctgtcaacactcatagcagctgcaggatgggtatactgatctgctataaacaaaatcatacaatgtataaccttttggaagtttttttcttttcttttctttttttttttttttactgtcccaccatcaatgtacaagacattcagtttctctgcatcctcagcagcattttattttgtccctgcctgaatttttagctattctaacaggtgaatagtgatatatcatcatggttttttgttttgttttgttttgagatagagtcttactctgttgcccaggctggagtgcagtggcgccatctcagctcactgcaacctccacctcctgggttcaagcgattctccagcctcagcctcccaagtagctgggactacaggcgtgcaccaccacacctgtctattttttgtatttttagtagagacagcgtttcgccatattggccagactggtctcgaactcctgacctcaggtgatccacccaccttggcctcccaaagtgctgggattataggcatgagccactgcgcctggtctcatcatggttttaattggcatttctttagtgcctggtgatgatggacatgttttcatgtgcttgtttgccatctgtatagcctcattggtgaaatgtctgtccatgtc

SEQ ID NO: 1243076 - DNA, 4001 bp, Homo sapiens
ggtgaggcagggcccaagcccagccctccaaagtcccagggtgcctggccccatgagcacccctcacctggttggggtgcaggcacacgcagttaatgggtgcgttcacctggaagatccgctggcactgcaggttccgggacctgcgggccgggccggggcacatgctgtccatctgggcttgttggtgccctacccagatggcctcggcctggccattcctcccctccctctgctgaaggacctgcctcttgggaaatacttgggacgcagggccctctgctccagcagggagcctaagccagtggctggtggaaggggaataacaagctggctccgggctcaaggcaggactcgcgctctgatgcaattcactctcctcctgtcctcacttctctcagtaagtcgcccacaggaagctccctgtctcagcctctgcttgaagagaacccaacctaaaacggtctcccagagcagcccaccccagccccgggcagcacgccccctccccaccgcacctgaggtcccagatcctggctgtgcagtcctcgccgcccgtgtacatccagcggccgtcttcgtggaagcccacagacgcgatgttcttgttgacgccgtcgtagctgatgatggggttagggttattggagttgagatcatacatgcggatgtgctggtaacctagggacacaggctgaactgaagcttggctgtgctgaggtcgacccaccagagctcaggagtttagagatcaaggatcacagatacctgcagcagcaatcatgctgcggtccggtgtgacctccaaggcattcacctgctgggactgttaaggaggatgacgggaaggtagccctgaggccagggccccccaggcctccaccatctggccttcacacaggctgtggtccccacacgaggcatccccccagcgccgccctgcccgccccgggtggaggatacggagtcctggtgctgcaccgtccgggtgcagatgccgctgtgggcctgccagaagcgcacggtgtggtcgtagcctgcagtggccaggatgaccgggtcactgcccaccgtgcctggggaggtgttcatggtgtggcctgcacgggccctagagctgaacggcaggggtcaaaggtcagagcatctgcagagaaggatgtgaagtacttagaagacactctctgtgctaagtagattatagacccacaaggcgctgccgaatggcgcttatcattcccattttagagttgggacaagaagcgcaggtaggttcagggacacgcgtcacacgcgtgatacctggctccggggctccagggcgcgtgctccatccccgccccacgcacacggcgggggcgccgtcccccccccacctccgcagccggcaggggggagtcacgcgcgggcgccactctgccgcaggggcgggctgcgcgtgcgcaaggcggcggatgggccggggaaagccgagcgctgcggctgcgcatgcgtagcaggccagcggcaggccctgatgggaaagggcgcagtctggctggacccccgagctcccctttcctccggtgaccgcccttgctccgtcctgctggccggcttcccctggccgtgctctcccagccacccagcagccggttcccggcccctggctcgcggcctccgtaccttacgggcggctccgcactccgccgtgtccaggacggcgaggggagccggagcgagtcgatcgaggccgagcgtagagttatcgatggctccctagggcgagaccatggcgcgggcgggggtgggtgggacgagaccaaagttctggggcggggggttcccgccgggaggaactcggagcggtccccgtgcgcggccgcgggcccggcgcgaggtggaaggaagctgcggctttctctccggcctcctgcccactggcacctgcccttctgacacggctgtccgtttcccgggctgtcgggtcgcgctgttccggtgccctccctgacccactactgcgccacgctgggctaggattggctgaaaattacaggacttgaattcagacaagtaacgaataattttttttttagtgtaagtatatccaggacattgcatgggaaatacttatgctaaaaaaattttattgggtatcctgtagttttacttgctagatctggcaccccagccccagcctgaccctcaggacatcccactgagcccagggtccccctcaaaaccacaggccctcattccagctctgtgagctccacgccggtgccctcacccttgagacaggctgtcgcatggttttttcctgctgctcttacagacctggctgcaccccttcctctggccgcagagggggtgcatcttgtcccttgaccaggccatagttcccatggagccttccttcctataccttcacctcctctccttcctgccggttagcctttaaaaaaacaccataaaacaatcccaaattatcttcttcaaagagcggtcctcaccatttttctagttccacgtcctcacctcccactcattccgcaaccccagtcatctgccttttacccccagctctctagctctccagtggaaattcctcaaggtcactgacaatctcactttgctaaatccagtggatacttttccttcttcccaccttttttttttttttctctcgagacagagtctcgctttctcgcccaggctggagtgcagtggtgcaatctcgactcactgcaaaacctctgcctcccaggttcaagcgattttcctgcctcagcctcccgagtagctgggattacaggcacgcaccaccacacctggctgatttttgtatttttagtggagacgggatttcaccatgttcgcaaggctggtctcaaactcctgacctcaagtgatccgcctacctcagcctcccaaagtgctgggattacaggcgtgagccactgcgcccggcctcttcccacttcttctttctttttttttttttttttattgagacggagtctcgctttgttgccaggctggagtgcagtggtgcgatctcggctctccacaatctccacctcccgggttcaagctattctcctgcctcagcctcccgggtagctgggattacaggtgcatgccaccacacccagttaatttttctatttttagtagagacagacttttcaccatgttggccaggatggtggatggtcttgatctcgtgacctcgtgatccgcccccctcagcctcccaaagtgctgggattacaggcgtgagccactgcgcccggccccctcccacttcttgacgcatctgagccatggttgacggcaccatgcctgaaaggctgccttctcctagctcctgtccccgacatttagtctctttccctgcctgcccgcaaggactcaggcccttcagcattcactctgtgcaccccacgagataccagggggctgatgactgctagctctggagcttccaatgctgtccctgtcctgggccccttccaccctgtctccagctctgatggcctcagctccctgttaagacactgtcccttgaatgccccgcagggtccaccatattccagggccaagacaacccatccctgagtagctccccttctgtgggcagtgcccaccttgtattacagctgggcaagatccgacacctcccctccctcacccttcccttcccttcagccaccgattttacctgtgatataccttcctgtcctttccactgccctggttctagctcaccacccccatcccccataaaagcctccttccttgccccagccactctggcccccttccaaactgtccaccacagtgcagaatggccttttatttatttatttatttatttatttatttatttatttatttttgagacggattttcactcttgttgcccaggctggagtgcaatggcgcgatctcgactcgctgcaacctccacctcctgggttcctcagtctcctgagtagctgggattacaggcatgc

SEQ ID NO: 1243077 - DNA, 4001 bp, Homo sapiens
atactgaccaggcaccactagaagcatccaagagagaacgtgtcaggggccaggggaggtcagggagggggaaaggaagcctcagagagtgtgtcagccgtcaccagaaacaagggtgactgggaccaggaggcaacagagtgaaaagagggaagtggatcgacttgggagagactccagaaagcggagtgaccgacctgcagacaggactaagccatcgggagcgacactaaggcttctggctttgctggcaaggtgggtgttagtgcccgggatggggaaagcaggagggggccgctaagggacatccaggaataagcccacctgcagaggctgagggctgagtgccaagctgcccgcacccagcacctgccaccaggactcacggtgctattgacagctgccatgtagctggcgtcgggatcgatgtgggcggacgtgatggagacctcgggctcagggatcagctgctcgttgtggtctgttttcaagtcccagatgtggatagccccgctctggtcacccacgatgagctctgcctggggtgcaggggtggtgaggcagggcccaagcccagccctccaaagtcccagggtgcctggccccatgagcacccctcacctggttggggtgcaggcacacgcagttaatgggtgcgttcacctggaagatccgctggcactgcaggttccgggacctgcgggccgggccggggcacatgctgtccatctgggcttgttggtgccctacccagatggcctcggcctggccattcctcccctccctctgctgaaggacctgcctcttgggaaatacttgggacgcagggccctctgctccagcagggagcctaagccagtggctggtggaaggggaataacaagctggctccgggctcaaggcaggactcgcgctctgatgcaattcactctcctcctgtcctcacttctctcagtaagtcgcccacaggaagctccctgtctcagcctctgcttgaagagaacccaacctaaaacggtctcccagagcagcccaccccagccccgggcagcacgccccctccccaccgcacctgaggtcccagatcctggctgtgcagtcctcgccgcccgtgtacatccagcggccgtcttcgtggaagcccacagacgcgatgttcttgttgacgccgtcgtagctgatgatggggttagggttattggagttgagatcatacatgcggatgtgctggtaacctagggacacaggctgaactgaagcttggctgtgctgaggtcgacccaccagagctcaggagtttagagatcaaggatcacagatacctgcagcagcaatcatgctgcggtccggtgtgacctccaaggcattcacctgctgggactgttaaggaggatgacgggaaggtagccctgaggccagggccccccaggcctccaccatctggccttcacacaggctgtggtccccacacgaggcatccccccagcgccgccctgcccgccccgggtggaggatacggagtcctggtgctgcaccgtccgggtgcagatgccgctgtgggcctgccagaagcgcacggtgtggtcgtagcctgcagtggccaggatgaccgggtcactgcccaccgtgcctggggaggtgttcatggtgtggcctgcacgggccctagagctgaacggcaggggtcaaaggtcagagcatctgcagagaaggatgtgaagtacttagaagacactctctgtgctaagtagattatagacccacaaggcgctgccgaatggcgcttatcattcccattttagagttgggacaagaagcgcaggtaggttcagggacacgcgtcacacgcgtgatacctggctccggggctccagggcgcgtgctccatccccgccccacgcacacggcgggggcgccgtcccccccccacctccgcagccggcaggggggagtcacgcgcgggcgccactctgccgcaggggcgggctgcgcgtgcgcaaggcggcggatgggccggggaaagccgagcgctgcggctgcgcatgcgtagcaggccagcggcaggccctgatgggaaagggcgcagtctggctggacccccgagctcccctttcctccggtgaccgcccttgctccgtcctgctggccggcttcccctggccgtgctctcccagccacccagcagccggttcccggcccctggctcgcggcctccgtaccttacgggcggctccgcactccgccgtgtccaggacggcgaggggagccggagcgagtcgatcgaggccgagcgtagagttatcgatggctccctagggcgagaccatggcgcgggcgggggtgggtgggacgagaccaaagttctggggcggggggttcccgccgggaggaactcggagcggtccccgtgcgcggccgcgggcccggcgcgaggtggaaggaagctgcggctttctctccggcctcctgcccactggcacctgcccttctgacacggctgtccgtttcccgggctgtcgggtcgcgctgttccggtgccctccctgacccactactgcgccacgctgggctaggattggctgaaaattacaggacttgaattcagacaagtaacgaataattttttttttagtgtaagtatatccaggacattgcatgggaaatacttatgctaaaaaaattttattgggtatcctgtagttttacttgctagatctggcaccccagccccagcctgaccctcaggacatcccactgagcccagggtccccctcaaaaccacaggccctcattccagctctgtgagctccacgccggtgccctcacccttgagacaggctgtcgcatggttttttcctgctgctcttacagacctggctgcaccccttcctctggccgcagagggggtgcatcttgtcccttgaccaggccatagttcccatggagccttccttcctataccttcacctcctctccttcctgccggttagcctttaaaaaaacaccataaaacaatcccaaattatcttcttcaaagagcggtcctcaccatttttctagttccacgtcctcacctcccactcattccgcaaccccagtcatctgccttttacccccagctctctagctctccagtggaaattcctcaaggtcactgacaatctcactttgctaaatccagtggatacttttccttcttcccaccttttttttttttttctctcgagacagagtctcgctttctcgcccaggctggagtgcagtggtgcaatctcgactcactgcaaaacctctgcctcccaggttcaagcgattttcctgcctcagcctcccgagtagctgggattacaggcacgcaccaccacacctggctgatttttgtatttttagtggagacgggatttcaccatgttcgcaaggctggtctcaaactcctgacctcaagtgatccgcctacctcagcctcccaaagtgctgggattacaggcgtgagccactgcgcccggcctcttcccacttcttctttctttttttttttttttttattgagacggagtctcgctttgttgccaggctggagtgcagtggtgcgatctcggctctccacaatctccacctcccgggttcaagctattctcctgcctcagcctcccgggtagctgggattacaggtgcatgccaccacacccagttaatttttctatttttagtagagacagacttttcaccatgttggccaggatggtggatggtcttgatctcgtgacctcgtgatccgcccccctcagcctcccaaagtgctgggattacaggcgtgagccactgcgcccggccccctcccacttcttgacgcatctgagccatggttgacggcaccatgcctgaaaggctgccttctcctagctcctgtccccgacatttagtctctttccctgcctgcccgcaaggactcaggcccttcagcattcactctgtgcaccccacgagataccagggggctg

SEQ ID NO: 1243078 - DNA, 4001 bp, Homo sapiens
ctggccctcagtaacacttagcgctgtaaattaaccagctatcacggggaatcaaatcatggccactgttgtcactcttgacattaatcccatacttaattatgcccaattttatgcatctaagtagccaaaaaagaaagtttctaataaacatctgattaacggtaagacagtgatataaagcgtagtgcaaataaccctggattagggtgggtgatcagcaagagcttttcgctctgaatttcaggacaagtaacacaacctcagcatgttctcctttactgtaaaagggatacgtgttatcacccacgtaagactgaaggaatgtaaactattaaaccagtattagagttcttaaatgggtcaagtcataatcattcaagtgttcaatttttttttaacaccaactgcacataacaaacttctgaatgtccaaaacttcctgaaacatttacgtcatttttcgttcattaaaagggcaggttaagcctgggccacatggtgaaacgccctctctacaaaaaaaaaaaaaaaaaaaaaaaattagccgggcatggtggcctgcacctgtagtcccagctactcaggaggctgaggtgggaagattgcttgagcctggggaagtcgaggctgcagtgagccgtgataacaccactgtactccagtctgggcaacaaaaataaaaataaaaaaagggcaggttagtttttcgccgtatttaatactaacagtataaaagaagagtatatgttgctctaggccttctttcgggtcataatcatttaaatctcaaagtatgtgtctgcatttaacatgaatgaactgtgctaatgcctgattacctcaagtcaactcagaatcatcacattaagtactgaacgcagggagttaaatgccctcccaaaagtcatggagcacagacaaggccagaagccatggagactcctgggtggtggtggtgaccttgagtcctatttacctttgtgcatttcacaggacttctcaggacaatgtctcacacatagcgggtgcccagtgaacttctgaaacaccatccagggtctcagaaggctgcctgatgctctagttcaggtataccatatagatgaaacacttctcagctacaataatttcaaaagactgtagagcacacactaatcaggtacgagaggtgacagctaccttaaagaccaccaagtgctgagtatttagtaaacactatacaagtgaggacttcaaggacagactggaggaaggcgggggtgtgctctgacgaggccaggactcagacagcgtgggaaggggacacagttggcaggcggtaactgcgggcgaagtgagcgtgctatcgggcagggaaggcggggtgtgtgggacttggagggggcaagtgaggactactcgaggagggcggccagtccgcgctgccgggggatcgacggcggccccttacccggacgtccggcccctccaccagcttgagggcctgcgcctccagcaggtcggcccgcagctgcaccaggaagcgcacgccgccgtccagcttgctgatgtggtggaagaggccgcgatagcgcggcaccagcgcgtagcgcagccggtcctcggcctgcagcagcaccgccgcctcccgctgctgctggcgcagatggagcacgccggcgctctgctccgccacctggccgtggtccacgccgaagccccgcgccaggcggcccagcagttcggcccgctgggccgtctcggccagcccaccgtagaagctcacgaagtccgcgcactgaccctcggcgggcgccggtgtcttctcgcgcagctcgtaggccggcgtcggcggcaccgcgcggcgcagcagctcgtccatggcccgctccagggcgccggccgcctgcccgctcgccagccggggcccgggcggccgcgggggcaaccgcagcgggaggagacgcctggccgtcaagcctggcccgaagcctcgcatggtgccccacaacagctgccgagggggagcgccgccgccgctgccgcgcttccggcttccggcgcgcgccggccccattggccgaggccgcgagcccggctggggacgcggccaataggagggcggggcggtgggggcgaggcggcgggggcggagcggctctggcggcggccggaggccaagtgtggctaaaggttactgccccgcggctgggctgcctcggggcctgctcccgcgcggctggcggcttgtactccggtcctaacacctgaccgcctaaaggcaccggcccagcccctcctctctttcccgactgcactgcacaagtgccgcctcctctctagatccgagcgcctccagcctcccggtgcatcagagtcacctgggaactcctgcaccggaggattcctgggctccgaaatcagaatcctagagattcagattcagtgtgtctgggaggagccaaggaatatgcttgcttaagaggtgtttgtggcaatcctctggcatggtaggtagcctttgtttgacccctgcctaggcactcaccattcgcgtcagtgtcttacacacatgacgctcagagccacagaggttggaggggtgtgtgagtgtgtgtggagagagagagaatatgtctatatgtatggatgtatgtacacatacgcacgcatatacacatacatatgtatgtaaaagagacatggagacagagagactgatggaaagccatacccttgagcaaatgccagaatgagacaaagagttttctttgaaatagttttcagataattgcagttatcaaggcatatttattttgtcctctagaaagataggcctgaactctagttccccctccttccccaatccattacaatctgtagaagagaatgtcacataccagccatgtctcccacatgcaaaattgcaggaggcattaggaacacagtgggattttgttccactctgatggaaatatggcatctttggttggagggtgagggagccatgtacttggttgactatgtctaggtgctaggatttctataggtagaaccctttggtgcaggtcttgcagtataaaagacacctggaggtagttctgtatgaggacagcctttgctgggtgtgtctcatcttatggggcacgaagaaagtacgtttggctcattctgccaagacacagacacacaaaacattctgaaagcctagtggtggcttttgaggacacctctccattcctcttttctaagaagtggtgaaaccatattgccagctggctaagggagttggtggggtccaaactctggtgtttgtctctttgccttgtcgagtgagcttttgtctgtcctaggatactcctgccttgctttaggaatcttgtcttgaaagcttgactttgcttaagcatttgctaagtgtagtactcccacaaccctgttctttctcatctttcccggtgccttcctttttatgtaatttctggcttctgttttttttttctctgtgtttatacttttttctctaggcgtcaacagccatcctctgctttttcccactcatgtccttatttcaaaagactgccccaatccaaaaatgaaattaaagaaacaattctatttacaacaacatctgaagggataaaagaaacatgtttaaccaaggaagtgtgagactggtagatggaaaaccacagaacagtattgaaggaaattaaagaagacctaaacaaatggaatggtccatgcatggttcatggattggaagatgtaatattgttaatatagctcatatggtttggatctgtgtccaaccaaatctcatgtctagttgtaatcctcagtgttggaggtggcgcctggtaagaaatgattggatcataggggcagagttctcataaatgggttagcaccatccccgcttggtaccctacagtgagttctcaggagatccggttgtttagaagtgtgcatcaccaccccctctctcctgctctggctatgtgaagctcctcactccc

SEQ ID NO: 1243079 - DNA, 4001 bp, Homo sapiens
tcggtgtcctcgctcgggagacaccatggagctggggcgctggctggactcggctctacgccgggatgtcgcgcctggtcacccgcgggacccatccagagcggggccccgggagggacgccaagcgggctcctagcgaagagaggcgcggggtccaccctctcgaatccagggcttcgacgtaggggcgctgttgggaggaagcgctgtgggaggcagggtccgtccttaggaccccgcccgggcgtgcctaggcttcctcgcaaaagcgcagaaagtcgccaaagcgcccccgcaacccgagtccgctgcctcagccgtttgcacccatccccccgcctccatcctggcccgccgtgcgcggctcggtatcacccagacgggaggccacctgggcaggagcgcagttgcccagccgcccagctcttgctccgcctgtggctgtccccgagagcagccccctccccactcgcaaagagcgccactgcgcgccagccgggctctcgaggaatcggctgccctggagggaaggaaggaggggaggcaagggctgggggcggcggaagcggctcccgggacacaggctgaatgtaagggggtcggggtgggggctcagtgcccagaacagggctgtaggagtagcggggaggagagcgaggccctgcgccctcaagggtttgcgaagaggtgcgctgcagagggcgagctggggaggggcagactgccaagtccgcttgcttccccgccacggcccagaacagggggcgcgtctccgctccctccacctccaagtcccagcctgcggacgtggcgcctctccctccaagcccccagcccgcagccaaagggcagggcgggggtcttacctcggcatggacctccgcgtcttcggccgctacgccaaggcccaggcagcccagaagcaccaggagcagcggcagcagtcgcggccgcgccgcctcctcccggtcgccgaggaggctgcccgtccagcccggccgtccgggcgcgctcgggtcgctgcccatgctctcggcgcccagcccagctcggaacactgcacgccggatcctcgcacgcgccttggaaacttgcgacgctccctggctcctggcccggcaggcgcgccgcggacctcgggctcccggtccccgccggagccgcctaggtcgcctcggcaaattcccaagcccgaggagaagcgggcagggcaggtccgggagctcggaaccagccggcgggaaagggggccgaccggagctgcccccggcgaggttccgcagcctcggcgcccagcgcctggggcccggctcccgagagcaagcgcaactccggagcctttgtctggctcagcgctccggccgcccggtcccgcggcgctccctgcgcgcccagctccctctgtccatgcccggggccgggcgctgcccggagcgcgcgcctcctgcacggggattctgctcgccgccgcgcccgaccgggcccgggtccccaagcagtcccgggaggaggcgcagggagccgacccgagagagcgagcgagagagcaagcgagccagccaaggagcgggcgcccgacgtccccggcgagttcagcgcggctccgggcgctcccagccctcctccccgcgcgccgcggccgccgcgctcttaaagggccagtgtgctcccaatgcgcggacccgggcggggaccgggggcggtgccccagccgcaggcttctcacaagcaggtgcgggcggccgaggcccgacaggtgggcggtccgtttacgcttcccagacggcaggaaacctctccagcccaccccgcgtcactcccaacccagcgcctagggggcgggggtgacctccaacgcgaccccccgcggagggaggaggcagggaaggcgtggtctccccgcctgggaagaatgaagactcctccttctcatacctggtgggggataccgaggcctaggcggacgggaaggaggtcttaggggagggatcaaagagtcgttttaggcttaaatataaatatatatgtatatatggatatttgtcagcctgaaacctcttttcaaaagccgcagggtgtctctggccattgaataactttcctcagtagcaaagtgagggttttgtgcgcgtcgagggcgcgttgcggcggacaaggggcaggtttaggagggacacggttcaagttccgcgtccgccccttagctgccgcttgcacgtgggcaaattaatctctccgagcctccatgttcttatcgggaacgtggggcaaagagttggggtgagggcgaggtaagacttccggctcctggcctggcgcaataggtgcccaagcactttggccactggctggtgcgagtgaagtgcgacagtgcggccggagtcggcgcggggcgggtggacacacctccccgcgaagcttaacgagctggatttcattctattccggaagcagcttgaggtcggggcggggtggatgcaggaggccagagctgggaggcccgggtcgaaggtccaccgagacccggggaccaggccaagggcagccctggcgcggcggactggccggcgtggtcagtgggtgagggttgcaggcaggagggcggagaccgaagataagctgttccttatcttcagacccggaaatggaagccgtcctcacctgagggcggttttctctagagcaggccctcggggcaccctagccggcctcacctcccggaaactggaaatcaggagacctggcagagtgccttagagagggcgcgtttgaaccctcctgggatgtccttggggaaaggaagtcggagtttagagaaaggaaccgggcgattctatcatttccacggactcacttctctgtgggatccttcatctgggaagttggtttctaaattctccacttcgaaatttgcttttgggaaatgtgcagtggtcttcagacacggacaacggggttgtccttgtttaaccgaccacgtcgcactctttcatgatatttagtcccgattagccaattttaaaaagtttggggctaggtaaagtggctcaagcctgtaatcccagcactttgggagaccgaagtgggaggattgctttagcccaggagttcaagaccagcctgggcaacatgacaagaccccatctgtacaaagaatacaaaaattagccaggtgtggtggtgtacgtctgtaggcccagctacttgggaggctgagttgggaggatcacttgaacccaggaggttgaggatgcagtgagctatgatcatgccgctgcccttcaacccggctgtcagagcgagacactgtctcagaaaaaaagaaaaaaaaagttggggtttaaggggctagctgttagtgagaggagcccaggaatgagtggagcaacgttctttgaggcctgggtcggtcaagtctggtgattttctctctgttggaggttcctctcttggggtccaatcctgccttaaggaaatgacatcccctgtgaccagatcttgaagctcccaattattggttctggctcctataggtactttgggagtccaaggtggatttgcatctacatccaacccaagatagctgggtttctactgggtctggacagcacccaaagcccgaaaggactagtcagtgggactgagatgtgtgaactgcagcccttccatcaagtagctttaaaccttatccatattttgccaataccgtttcatctatgccctgacacccccgcccaccaccacacaccttttttttcttggtcttttgaatgaaagcccagacatggtgtttcagagcagtttcatttagaggtcccgatgtggtgtgagggattgtaaaaagctctggatcagaagccaggtccctgggtttttgcctcagctgtaatttactgggcaatccgagcaagttattcccctctttgggtttgtttcctcatttgcaaaaggagagttctgaggtcgtaggggaggtctcctgttcagtgaaggaaagtagc

SEQ ID NO: 1243080 - DNA, 4001 bp, Homo sapiens
aattagctaccaatcatcacgttccttctgcccatcccaatgacctcatctaaaaacaataacaatgactagcattactacactcttgctctgtgtcaaaaatcatagaagccgtttgtattagttcagcctagcttagttccccaacataccatataagggcattttttaagccccattttgtagattggaaagccaacattcacagcactgaaaagtaacccaatgtctcatggccagcaagtatgaaactcaagtctgtctgacttcattttctaagaactgtgtattgaaactccctaagatgtcaagccttcacaaaagacacctcatggatcccctgagtggagagaatgcatgggtcaaggagactcgtgtccctcagccccatggccctgcctccccaagccctgccccggcacctgtatgtgatctggttcttgtcccacttgggcttgcgagggaagaagttgtagttggccacatctgggttgccgcagcgtggcttccgcatggtctcgatggtattctggtcaagatcacctgtctggggcagtccaaagaacttctgcatcttctttagtgtgtccttcagcacaaacaggttgcagctctccttggggcagccatagaaggtgttcaggtattgctgaaagaaatgcacacccccaaggcaattagccacattaggatggcacagtactgaccaaagcaggctgtagcaatcagccccccaacccagtgccatagtccagacaggaaataagccaggggtcccagagcactgggtggagtactgggttcccaaaccagcacggtcacccattagttgagcgacaggacatacagctatagagagcatggctaccacttgttggtgctgggtgctgactatatgtccaggcactaaagtcagaatatgttaactcatttaatgctcaaaactctgtaatgtagatatactaaccctattatacagaggaggaaactgaagcacagagaggttaagaaacttgcttacgatcacacagttcacaaatggtagatctggatttgggacaaagcaatctggctccagaggctgtgatatggaatcattatactccagcatccttcctttacctctatcaactcatttatctaccttgcggctggtgacttggggacttttttcctcctgttttcttctaaagagattcaaggactatgtgcatgggctctggcagtagacagacctgggtttaaatcctgaatcagccatttgcaaaaagaaagtagtcctgtccttcatgagtcatacaactggccctgcccaaactgaggcccaaactgagcaggtccctgcagaggttcagggagcaaccgactcatttatttattcaacaaatactttttaatacctaccatgtaccaagcccagtgctactgctgaggaaaaacaggtgaaaaagatagacaattctgtctctaaggttcaaatcctagcagggaggctgatagatcccaaataaaacaaaatgaagtatgtgataagtactgtgttagaatgttgaaaggagccaggagatcttctgacaacggtcctagccttgttggaagtagttaggaaaggggaaatggaggacataacaataataataatataatagaataatggctagtgcttattgagtacttaccatgtgctaggtaagcacctaagattacctctcttttaaccctgagataggaaatttcccagtttgcagatgaagaaactgagaagtcacttgcctaacatcatcactaggccagctggttggttcatgcactctttgatttgaagccaagcggtctaagtccagagttatcttcttaagcccccactgcattgcctctggacaacacagacttccatttgtcagaggtgttcaaaccaggcacctccatcttgagtggggggctgggtaagatgaggctgagacctgctgtgcttcattcccaggagggcaggcatgcattcttagtcacagaatgagacaggaggttggtaggactgatttcaccatatacagttcgggtcacaaagacccctatgataaaacaggatgcagtaaagaagctggagaaagcccacccaaaccaagactgcaatgaaagtgacctctagtcgtcctcactgctcattatatgctaattataatgtattagcatgttaaatacattagacactcccaccagcgctgtgacagtttataaatgccatagcaacattgagaagttaccctatatggtctaaaagggagagaaaccctcggttccaggaactccccaccctttttctggaaaactcttaaataatccaccccttgtttagcatataatcaagaaataaccatatgtatactcagtccagcagcccattccctgctctgtctatggaataatcacccttttattcctttaccttcttaataaatttgttttcactttactctgttggctcgctcttgaattccttcctgtgcaagccaagaacccatgtggcccccaggctgaaccccaatttaggggttcatcctgtgacccattggctggaaaaggtgtaggaaaccaagtagctttgtcattgtcccaaagctccactctcacccccacccaacagccacatcattatgccagccagctccagatccttgaaaaaagtagccctctaaaaatgtatggaggtttcccaacccatctatccagagggggctgagacctagctgtttggaagggtgagagttgggagagggtagttgtcacctcctgaaggagttcctagggtgaccagagggcatgggcgtcttctcccggacaggttgagggggaggctggagggcagggtggctgaagcaacaagggagcagatatcccctggactggaaaggacatcttgatgggtccctggcctgcctctctcctcaggccctacttacgcaacactgcggccaggctcagtgcccctccagccaggcgcgcgcacgctcacaagacaacatctgaaccgcggtttgggagcccagccaggaaggagggctctctggccgctctccgacccgagcggagcgcagtccgcccccgccccacgcgccgggccctccagcgcctgccccactcctcctccctcctgccgggccagctctctccttcttttctccgaccctttggagaagttcgaggaaactttccgaggcccagcccttgaccaatttgtccattaagccaggagaaaaaagatgcgctctctgcttccctcctgccccaatcacttcccaaatggccccctcgagctgtttgtttaaaggtccctctccggatctgtgccgaaggttcctagaaatttgccaagccccgctttgaccaagctccctcccatccttatgcgcgcataagtttacccaaattgtgtgccagagcaccgttcccaaagtcctacattagcaaaaacgacccctgtagctgtttgccaaaggcttacctagacgcttggcaagagcccttagcaactgcccagatgtgtccaaaagttgtttacaaagaccgccccccccccccgccaaatgtcccagatactagaggatgtccccgctatttacataagagtccctttccagtagtttgccaggtcacccctctcccactctctggcttgtttttcgccccactgctgtatgctgaaggttgccaaattgtttatcaaaggttttctttgcttacaaaagatcccccaccgtttgcaagagatcactccaatagcttgccaaagaccccccaagctgtttaccgaagcccctcccccacgctgtgtgcccaccgccgagggcagggggagagacacccccatcctttgcctccgaagtttgtctaaacgtggttccttgaggccagcgcagcaactcaccactgccaactctttgtccgttttgggggcgacatcgccggggaacttgatgatgggcgacggcgcggcggcggcg

SEQ ID NO: 1243081 - DNA, 4001 bp, Homo sapiens
cagagggggctgagacctagctgtttggaagggtgagagttgggagagggtagttgtcacctcctgaaggagttcctagggtgaccagagggcatgggcgtcttctcccggacaggttgagggggaggctggagggcagggtggctgaagcaacaagggagcagatatcccctggactggaaaggacatcttgatgggtccctggcctgcctctctcctcaggccctacttacgcaacactgcggccaggctcagtgcccctccagccaggcgcgcgcacgctcacaagacaacatctgaaccgcggtttgggagcccagccaggaaggagggctctctggccgctctccgacccgagcggagcgcagtccgcccccgccccacgcgccgggccctccagcgcctgccccactcctcctccctcctgccgggccagctctctccttcttttctccgaccctttggagaagttcgaggaaactttccgaggcccagcccttgaccaatttgtccattaagccaggagaaaaaagatgcgctctctgcttccctcctgccccaatcacttcccaaatggccccctcgagctgtttgtttaaaggtccctctccggatctgtgccgaaggttcctagaaatttgccaagccccgctttgaccaagctccctcccatccttatgcgcgcataagtttacccaaattgtgtgccagagcaccgttcccaaagtcctacattagcaaaaacgacccctgtagctgtttgccaaaggcttacctagacgcttggcaagagcccttagcaactgcccagatgtgtccaaaagttgtttacaaagaccgccccccccccccgccaaatgtcccagatactagaggatgtccccgctatttacataagagtccctttccagtagtttgccaggtcacccctctcccactctctggcttgtttttcgccccactgctgtatgctgaaggttgccaaattgtttatcaaaggttttctttgcttacaaaagatcccccaccgtttgcaagagatcactccaatagcttgccaaagaccccccaagctgtttaccgaagcccctcccccacgctgtgtgcccaccgccgagggcagggggagagacacccccatcctttgcctccgaagtttgtctaaacgtggttccttgaggccagcgcagcaactcaccactgccaactctttgtccgttttgggggcgacatcgccggggaacttgatgatgggcgacggcgcggcggcggcgtggctcagcaggcagcccaggagacagagcgccctcaggggacccgtgagcgcgccccgggccattagcgcctccatcgtagcgctccctggccccgcgcgtcgcccgggggtcgctggctcggtgcgtgtggccgcctcgccgcctggttggagcctgctccgcggcgcagggctgcgctccgagggtccgctggctcggtggcctggggtttgcccggctcagcggctcatggtccggcccccgcgccccagcccccgccgccgccgccgccgccgcaggtcctggcaatccctttgtatgtttaaagccccagatgcgcagcctccagccaccgcctgaggaagtctggatgcagcggaaacaagggagggcagccgccagatgtagccggctgggctgggagggagctggcagagcggggctgggggcggggggcgcactcgggcccgcccctctctgccccacccccctactcgccctcctccacttttctcctcttttttcctttctccacctcttttccccggccgcctgctactcctggcctctacgtccaccctcagtgcacgacctcgtcaccccacttgcctctctcgcgatctgggcgcacagcctcagaaccccctgctgggaaacatctgtcgctctaggcccttgacgtcctgaggttagagagcagcggtactactaggagggacgccggcttggctaggacaccctgcactccctggggtcaggaacgggaaggaatggtcagaaacagatgatcagccacaatgatagatggtcagagacagaaattttcgatatttagggatagggacagagagattctgggatgaacagagatggaaagagagagatggaaacagagacagtggaaggtcccaggttgcttccttacctctttccttctgcaaatgtgtaagccttaacttggcctcgtatagtgcgagatgctagatacaccttgggaaatagagcagtcaggggccccgcgttagagacgttggaaccagagcgactccatcttgaacagggggctgggtaaaatgaggctgagacctgctgggctgcactcccaggagggtccgcattctcggtcacaggatgagatagaaattgggcaagactggtttaataagatagaggtcacaaagaccccactgataaaacagtatgcagtgaagaagccagccaaaaccaagatggcaaagaaagcgacctctggtcatcctcactgctcattttacgctaattataatgcattagcatgttaaaggaagcacccaccagtgccatggcagtttataaatgccatggcaatgtggggaggtttaccctatatggtctaaaaaggggaggagccctcagttccacgaattccccactcactcttgaatcctttcctgcgccaagccaagaatccatgtggcctctcaggtcgaatcccaattttgaagttctccctgtgacaaccgtctctgaggaatgtcttctccctctctcaggaaagacagttgagagataagctgtgatggggaactccagcaggctgttgggaacgcctgacttcagcccctaaactagtaaagacaatcaaggaaggcttcctggaagaagtgacttctgagctgagacctgaagagctaaagaggtggagtgctgggtggggaatatggggaatgttttagggaacattgacaatggcccagagatgaaaaacagcaagaggcactggagaagaaagttttttctatctgaaaaaggtggggcacagggtgaggggatggagctggaggggtcagtaaggaccagcctaggaagggggcagataggactgggggtcagcagggaacagtttgagaagtaaggtcaggggctgaaagaatcaggagcaatatacttgtggggggcattggaggtcacgattatgtcttgatcatcacagctagaaaagtctctgcggcttgggtctcagtgggcttcagacaagttcaggcttgtctggtgggtgtgtgctctgactttccagagtcagttttaaaggaccctcttgggagggaccttgccccgcaggagggagccaggcccttcagcctgacccagtgacaaaccttggctgttttggagagggcgagactgaggtcagttgggaagggggattgcctcctggcccagccccactgggctcatgtccacgtcctgtggatagccagagagccaagttggagagctgagagctgagagtgaaaatggaaaaagttatctcactaaagcaggggctgcaaactcgtggcctgtgggctaaatccagcctgaacagcattttgaaatttgggaaacttcatgtaaaaatctgactttctggttttctttttttaaaaaaatttcccaaaaatctggcaatactggatgccagtttccatatggcaataatttgctgaagttgagtagtgactgctccctttagatgaggcacatactttggtttgccacagtcctcaccactctctattgtattgccttgtatgtgactcccttcactaggtgttgttcatttacacttgcccaatttgagttttaaccttttcagaaagtctctggagtctgcataacatgctttggagctcctctggcagagggcagctttgactgtacctcttcacagcctctgtggttttggcattccaagggtatcggtttccagtgtggggcttggtg

SEQ ID NO: 1243082 - DNA, 4001 bp, Homo sapiens
cacacagttcacaaatggtagatctggatttgggacaaagcaatctggctccagaggctgtgatatggaatcattatactccagcatccttcctttacctctatcaactcatttatctaccttgcggctggtgacttggggacttttttcctcctgttttcttctaaagagattcaaggactatgtgcatgggctctggcagtagacagacctgggtttaaatcctgaatcagccatttgcaaaaagaaagtagtcctgtccttcatgagtcatacaactggccctgcccaaactgaggcccaaactgagcaggtccctgcagaggttcagggagcaaccgactcatttatttattcaacaaatactttttaatacctaccatgtaccaagcccagtgctactgctgaggaaaaacaggtgaaaaagatagacaattctgtctctaaggttcaaatcctagcagggaggctgatagatcccaaataaaacaaaatgaagtatgtgataagtactgtgttagaatgttgaaaggagccaggagatcttctgacaacggtcctagccttgttggaagtagttaggaaaggggaaatggaggacataacaataataataatataatagaataatggctagtgcttattgagtacttaccatgtgctaggtaagcacctaagattacctctcttttaaccctgagataggaaatttcccagtttgcagatgaagaaactgagaagtcacttgcctaacatcatcactaggccagctggttggttcatgcactctttgatttgaagccaagcggtctaagtccagagttatcttcttaagcccccactgcattgcctctggacaacacagacttccatttgtcagaggtgttcaaaccaggcacctccatcttgagtggggggctgggtaagatgaggctgagacctgctgtgcttcattcccaggagggcaggcatgcattcttagtcacagaatgagacaggaggttggtaggactgatttcaccatatacagttcgggtcacaaagacccctatgataaaacaggatgcagtaaagaagctggagaaagcccacccaaaccaagactgcaatgaaagtgacctctagtcgtcctcactgctcattatatgctaattataatgtattagcatgttaaatacattagacactcccaccagcgctgtgacagtttataaatgccatagcaacattgagaagttaccctatatggtctaaaagggagagaaaccctcggttccaggaactccccaccctttttctggaaaactcttaaataatccaccccttgtttagcatataatcaagaaataaccatatgtatactcagtccagcagcccattccctgctctgtctatggaataatcacccttttattcctttaccttcttaataaatttgttttcactttactctgttggctcgctcttgaattccttcctgtgcaagccaagaacccatgtggcccccaggctgaaccccaatttaggggttcatcctgtgacccattggctggaaaaggtgtaggaaaccaagtagctttgtcattgtcccaaagctccactctcacccccacccaacagccacatcattatgccagccagctccagatccttgaaaaaagtagccctctaaaaatgtatggaggtttcccaacccatctatccagagggggctgagacctagctgtttggaagggtgagagttgggagagggtagttgtcacctcctgaaggagttcctagggtgaccagagggcatgggcgtcttctcccggacaggttgagggggaggctggagggcagggtggctgaagcaacaagggagcagatatcccctggactggaaaggacatcttgatgggtccctggcctgcctctctcctcaggccctacttacgcaacactgcggccaggctcagtgcccctccagccaggcgcgcgcacgctcacaagacaacatctgaaccgcggtttgggagcccagccaggaaggagggctctctggccgctctccgacccgagcggagcgcagtccgcccccgccccacgcgccgggccctccagcgcctgccccactcctcctccctcctgccgggccagctctctccttcttttctccgaccctttggagaagttcgaggaaactttccgaggcccagcccttgaccaatttgtccattaagccaggagaaaaaagatgcgctctctgcttccctcctgccccaatcacttcccaaatggccccctcgagctgtttgtttaaaggtccctctccggatctgtgccgaaggttcctagaaatttgccaagccccgctttgaccaagctccctcccatccttatgcgcgcataagtttacccaaattgtgtgccagagcaccgttcccaaagtcctacattagcaaaaacgacccctgtagctgtttgccaaaggcttacctagacgcttggcaagagcccttagcaactgcccagatgtgtccaaaagttgtttacaaagaccgccccccccccccgccaaatgtcccagatactagaggatgtccccgctatttacataagagtccctttccagtagtttgccaggtcacccctctcccactctctggcttgtttttcgccccactgctgtatgctgaaggttgccaaattgtttatcaaaggttttctttgcttacaaaagatcccccaccgtttgcaagagatcactccaatagcttgccaaagaccccccaagctgtttaccgaagcccctcccccacgctgtgtgcccaccgccgagggcagggggagagacacccccatcctttgcctccgaagtttgtctaaacgtggttccttgaggccagcgcagcaactcaccactgccaactctttgtccgttttgggggcgacatcgccggggaacttgatgatgggcgacggcgcggcggcggcgtggctcagcaggcagcccaggagacagagcgccctcaggggacccgtgagcgcgccccgggccattagcgcctccatcgtagcgctccctggccccgcgcgtcgcccgggggtcgctggctcggtgcgtgtggccgcctcgccgcctggttggagcctgctccgcggcgcagggctgcgctccgagggtccgctggctcggtggcctggggtttgcccggctcagcggctcatggtccggcccccgcgccccagcccccgccgccgccgccgccgccgcaggtcctggcaatccctttgtatgtttaaagccccagatgcgcagcctccagccaccgcctgaggaagtctggatgcagcggaaacaagggagggcagccgccagatgtagccggctgggctgggagggagctggcagagcggggctgggggcggggggcgcactcgggcccgcccctctctgccccacccccctactcgccctcctccacttttctcctcttttttcctttctccacctcttttccccggccgcctgctactcctggcctctacgtccaccctcagtgcacgacctcgtcaccccacttgcctctctcgcgatctgggcgcacagcctcagaaccccctgctgggaaacatctgtcgctctaggcccttgacgtcctgaggttagagagcagcggtactactaggagggacgccggcttggctaggacaccctgcactccctggggtcaggaacgggaaggaatggtcagaaacagatgatcagccacaatgatagatggtcagagacagaaattttcgatatttagggatagggacagagagattctgggatgaacagagatggaaagagagagatggaaacagagacagtggaaggtcccaggttgcttccttacctctttccttctgcaaatgtgtaagccttaacttggcctcgtatagtgcgagatgctagatacaccttgggaaatagagcagtcaggggccccgcgttagagacgttggaaccagag

SEQ ID NO: 1243083 - DNA, 4001 bp, Homo sapiens
ccaggagatcttctgacaacggtcctagccttgttggaagtagttaggaaaggggaaatggaggacataacaataataataatataatagaataatggctagtgcttattgagtacttaccatgtgctaggtaagcacctaagattacctctcttttaaccctgagataggaaatttcccagtttgcagatgaagaaactgagaagtcacttgcctaacatcatcactaggccagctggttggttcatgcactctttgatttgaagccaagcggtctaagtccagagttatcttcttaagcccccactgcattgcctctggacaacacagacttccatttgtcagaggtgttcaaaccaggcacctccatcttgagtggggggctgggtaagatgaggctgagacctgctgtgcttcattcccaggagggcaggcatgcattcttagtcacagaatgagacaggaggttggtaggactgatttcaccatatacagttcgggtcacaaagacccctatgataaaacaggatgcagtaaagaagctggagaaagcccacccaaaccaagactgcaatgaaagtgacctctagtcgtcctcactgctcattatatgctaattataatgtattagcatgttaaatacattagacactcccaccagcgctgtgacagtttataaatgccatagcaacattgagaagttaccctatatggtctaaaagggagagaaaccctcggttccaggaactccccaccctttttctggaaaactcttaaataatccaccccttgtttagcatataatcaagaaataaccatatgtatactcagtccagcagcccattccctgctctgtctatggaataatcacccttttattcctttaccttcttaataaatttgttttcactttactctgttggctcgctcttgaattccttcctgtgcaagccaagaacccatgtggcccccaggctgaaccccaatttaggggttcatcctgtgacccattggctggaaaaggtgtaggaaaccaagtagctttgtcattgtcccaaagctccactctcacccccacccaacagccacatcattatgccagccagctccagatccttgaaaaaagtagccctctaaaaatgtatggaggtttcccaacccatctatccagagggggctgagacctagctgtttggaagggtgagagttgggagagggtagttgtcacctcctgaaggagttcctagggtgaccagagggcatgggcgtcttctcccggacaggttgagggggaggctggagggcagggtggctgaagcaacaagggagcagatatcccctggactggaaaggacatcttgatgggtccctggcctgcctctctcctcaggccctacttacgcaacactgcggccaggctcagtgcccctccagccaggcgcgcgcacgctcacaagacaacatctgaaccgcggtttgggagcccagccaggaaggagggctctctggccgctctccgacccgagcggagcgcagtccgcccccgccccacgcgccgggccctccagcgcctgccccactcctcctccctcctgccgggccagctctctccttcttttctccgaccctttggagaagttcgaggaaactttccgaggcccagcccttgaccaatttgtccattaagccaggagaaaaaagatgcgctctctgcttccctcctgccccaatcacttcccaaatggccccctcgagctgtttgtttaaaggtccctctccggatctgtgccgaaggttcctagaaatttgccaagccccgctttgaccaagctccctcccatccttatgcgcgcataagtttacccaaattgtgtgccagagcaccgttcccaaagtcctacattagcaaaaacgacccctgtagctgtttgccaaaggcttacctagacgcttggcaagagcccttagcaactgcccagatgtgtccaaaagttgtttacaaagaccgccccccccccccgccaaatgtcccagatactagaggatgtccccgctatttacataagagtccctttccagtagtttgccaggtcacccctctcccactctctggcttgtttttcgccccactgctgtatgctgaaggttgccaaattgtttatcaaaggttttctttgcttacaaaagatcccccaccgtttgcaagagatcactccaatagcttgccaaagaccccccaagctgtttaccgaagcccctcccccacgctgtgtgcccaccgccgagggcagggggagagacacccccatcctttgcctccgaagtttgtctaaacgtggttccttgaggccagcgcagcaactcaccactgccaactctttgtccgttttgggggcgacatcgccggggaacttgatgatgggcgacggcgcggcggcggcgtggctcagcaggcagcccaggagacagagcgccctcaggggacccgtgagcgcgccccgggccattagcgcctccatcgtagcgctccctggccccgcgcgtcgcccgggggtcgctggctcggtgcgtgtggccgcctcgccgcctggttggagcctgctccgcggcgcagggctgcgctccgagggtccgctggctcggtggcctggggtttgcccggctcagcggctcatggtccggcccccgcgccccagcccccgccgccgccgccgccgccgcaggtcctggcaatccctttgtatgtttaaagccccagatgcgcagcctccagccaccgcctgaggaagtctggatgcagcggaaacaagggagggcagccgccagatgtagccggctgggctgggagggagctggcagagcggggctgggggcggggggcgcactcgggcccgcccctctctgccccacccccctactcgccctcctccacttttctcctcttttttcctttctccacctcttttccccggccgcctgctactcctggcctctacgtccaccctcagtgcacgacctcgtcaccccacttgcctctctcgcgatctgggcgcacagcctcagaaccccctgctgggaaacatctgtcgctctaggcccttgacgtcctgaggttagagagcagcggtactactaggagggacgccggcttggctaggacaccctgcactccctggggtcaggaacgggaaggaatggtcagaaacagatgatcagccacaatgatagatggtcagagacagaaattttcgatatttagggatagggacagagagattctgggatgaacagagatggaaagagagagatggaaacagagacagtggaaggtcccaggttgcttccttacctctttccttctgcaaatgtgtaagccttaacttggcctcgtatagtgcgagatgctagatacaccttgggaaatagagcagtcaggggccccgcgttagagacgttggaaccagagcgactccatcttgaacagggggctgggtaaaatgaggctgagacctgctgggctgcactcccaggagggtccgcattctcggtcacaggatgagatagaaattgggcaagactggtttaataagatagaggtcacaaagaccccactgataaaacagtatgcagtgaagaagccagccaaaaccaagatggcaaagaaagcgacctctggtcatcctcactgctcattttacgctaattataatgcattagcatgttaaaggaagcacccaccagtgccatggcagtttataaatgccatggcaatgtggggaggtttaccctatatggtctaaaaaggggaggagccctcagttccacgaattccccactcactcttgaatcctttcctgcgccaagccaagaatccatgtggcctctcaggtcgaatcccaattttgaagttctccctgtgacaaccgtctctgaggaatgtcttctccctctctcaggaaagacagttgagagataagctgtgatggggaactccagcaggc

SEQ ID NO: 1243084 - DNA, 4001 bp, Homo sapiens
agtccagcagcccattccctgctctgtctatggaataatcacccttttattcctttaccttcttaataaatttgttttcactttactctgttggctcgctcttgaattccttcctgtgcaagccaagaacccatgtggcccccaggctgaaccccaatttaggggttcatcctgtgacccattggctggaaaaggtgtaggaaaccaagtagctttgtcattgtcccaaagctccactctcacccccacccaacagccacatcattatgccagccagctccagatccttgaaaaaagtagccctctaaaaatgtatggaggtttcccaacccatctatccagagggggctgagacctagctgtttggaagggtgagagttgggagagggtagttgtcacctcctgaaggagttcctagggtgaccagagggcatgggcgtcttctcccggacaggttgagggggaggctggagggcagggtggctgaagcaacaagggagcagatatcccctggactggaaaggacatcttgatgggtccctggcctgcctctctcctcaggccctacttacgcaacactgcggccaggctcagtgcccctccagccaggcgcgcgcacgctcacaagacaacatctgaaccgcggtttgggagcccagccaggaaggagggctctctggccgctctccgacccgagcggagcgcagtccgcccccgccccacgcgccgggccctccagcgcctgccccactcctcctccctcctgccgggccagctctctccttcttttctccgaccctttggagaagttcgaggaaactttccgaggcccagcccttgaccaatttgtccattaagccaggagaaaaaagatgcgctctctgcttccctcctgccccaatcacttcccaaatggccccctcgagctgtttgtttaaaggtccctctccggatctgtgccgaaggttcctagaaatttgccaagccccgctttgaccaagctccctcccatccttatgcgcgcataagtttacccaaattgtgtgccagagcaccgttcccaaagtcctacattagcaaaaacgacccctgtagctgtttgccaaaggcttacctagacgcttggcaagagcccttagcaactgcccagatgtgtccaaaagttgtttacaaagaccgccccccccccccgccaaatgtcccagatactagaggatgtccccgctatttacataagagtccctttccagtagtttgccaggtcacccctctcccactctctggcttgtttttcgccccactgctgtatgctgaaggttgccaaattgtttatcaaaggttttctttgcttacaaaagatcccccaccgtttgcaagagatcactccaatagcttgccaaagaccccccaagctgtttaccgaagcccctcccccacgctgtgtgcccaccgccgagggcagggggagagacacccccatcctttgcctccgaagtttgtctaaacgtggttccttgaggccagcgcagcaactcaccactgccaactctttgtccgttttgggggcgacatcgccggggaacttgatgatgggcgacggcgcggcggcggcgtggctcagcaggcagcccaggagacagagcgccctcaggggacccgtgagcgcgccccgggccattagcgcctccatcgtagcgctccctggccccgcgcgtcgcccgggggtcgctggctcggtgcgtgtggccgcctcgccgcctggttggagcctgctccgcggcgcagggctgcgctccgagggtccgctggctcggtggcctggggtttgcccggctcagcggctcatggtccggcccccgcgccccagcccccgccgccgccgccgccgccgcaggtcctggcaatccctttgtatgtttaaagccccagatgcgcagcctccagccaccgcctgaggaagtctggatgcagcggaaacaagggagggcagccgccagatgtagccggctgggctgggagggagctggcagagcggggctgggggcggggggcgcactcgggcccgcccctctctgccccacccccctactcgccctcctccacttttctcctcttttttcctttctccacctcttttccccggccgcctgctactcctggcctctacgtccaccctcagtgcacgacctcgtcaccccacttgcctctctcgcgatctgggcgcacagcctcagaaccccctgctgggaaacatctgtcgctctaggcccttgacgtcctgaggttagagagcagcggtactactaggagggacgccggcttggctaggacaccctgcactccctggggtcaggaacgggaaggaatggtcagaaacagatgatcagccacaatgatagatggtcagagacagaaattttcgatatttagggatagggacagagagattctgggatgaacagagatggaaagagagagatggaaacagagacagtggaaggtcccaggttgcttccttacctctttccttctgcaaatgtgtaagccttaacttggcctcgtatagtgcgagatgctagatacaccttgggaaatagagcagtcaggggccccgcgttagagacgttggaaccagagcgactccatcttgaacagggggctgggtaaaatgaggctgagacctgctgggctgcactcccaggagggtccgcattctcggtcacaggatgagatagaaattgggcaagactggtttaataagatagaggtcacaaagaccccactgataaaacagtatgcagtgaagaagccagccaaaaccaagatggcaaagaaagcgacctctggtcatcctcactgctcattttacgctaattataatgcattagcatgttaaaggaagcacccaccagtgccatggcagtttataaatgccatggcaatgtggggaggtttaccctatatggtctaaaaaggggaggagccctcagttccacgaattccccactcactcttgaatcctttcctgcgccaagccaagaatccatgtggcctctcaggtcgaatcccaattttgaagttctccctgtgacaaccgtctctgaggaatgtcttctccctctctcaggaaagacagttgagagataagctgtgatggggaactccagcaggctgttgggaacgcctgacttcagcccctaaactagtaaagacaatcaaggaaggcttcctggaagaagtgacttctgagctgagacctgaagagctaaagaggtggagtgctgggtggggaatatggggaatgttttagggaacattgacaatggcccagagatgaaaaacagcaagaggcactggagaagaaagttttttctatctgaaaaaggtggggcacagggtgaggggatggagctggaggggtcagtaaggaccagcctaggaagggggcagataggactgggggtcagcagggaacagtttgagaagtaaggtcaggggctgaaagaatcaggagcaatatacttgtggggggcattggaggtcacgattatgtcttgatcatcacagctagaaaagtctctgcggcttgggtctcagtgggcttcagacaagttcaggcttgtctggtgggtgtgtgctctgactttccagagtcagttttaaaggaccctcttgggagggaccttgccccgcaggagggagccaggcccttcagcctgacccagtgacaaaccttggctgttttggagagggcgagactgaggtcagttgggaagggggattgcctcctggcccagccccactgggctcatgtccacgtcctgtggatagccagagagccaagttggagagctgagagctgagagtgaaaatggaaaaagttatctcactaaagcaggggctgcaaactcgtggcctgtgggctaaatccagcctgaacagcattttgaaatttgggaaacttcatgtaaaaatctgactttctggttttctttttttaa

SEQ ID NO: 1243085 - DNA, 4001 bp, Homo sapiens
ttcaatgctccttttgctccaggcacacaagcttctgcgtgccgtggggtctttgcacttgcccgggacactcttcttccacatcttcccatggctggttcctcctctttgtggtctcagctcatatgacacttttcagagggacctgccctaaccagaccagcccctcaatgccaatagcattttatttttttctaaacactcaccgccatctgaaattatctttcatatttatgttcttgatctgtctctctctctctccctcgagaaagttagctccatgagagcaggaaccttacctactttatttatcactataccattggagctgaaagggcgtggcatctaagagatgctcaaagtatatttggttagagactgggtctccatctgttgcccaggttggagtgcaacggtgcaatcatagctcactgcagccttgaacttctgggcttaagcaattttcccatctcagcgttctgagtagctgggaccacaggcctatgccactacactcagctaaatttaaaaaaatccttagaggactgggcacggtggctcacacctgtaatcccaggactttgggaggccaaggccggcgggttacctgaggccaggagttcgaaaccagcctgatcagcatggagaaaccccgtctctactaaaaatacaaaattagcctggtgtgatggtgcgtgcctgtaatcccagctactcaggaggctgaggcaggagaatcacttgaacctgggaggcagaggttgcggtgagccgagatggtaccattgcactccagcctgggcaaaaagagggatactccgtctcaaaaaaaaaaaaaaaaaatccttggagagtgggggggtctcactttgttggccaagctggtctcaaactcctggcctgaagcaatccttgagtctccgcctcccaaaaccctgggattaccggcatgagccaccaggttcttgataaatgcttatggaaagatgaacgcctgaggccctctgggtttggggcctgagatcagcatcttcacagctccgtgttccaggagcacactgaggtctaaaggctgttgggcggtggacaggctgggtgcagaggcagggctggggaggggtgggggccacctacccatgcggccggtctccggcagccccgcgaacctctgcatgactttgatggcatcgcgcaacttctcagggctctgcagctgggcctgggcagggtggggtggcggcaggtaaccatagcgagtcagccagtcctagggcatcggagggggcaggtgaagcgggctgggtgaaaagtatgggctctctctgcccaccaccatcctggcagccctgcccctcccaggcacccagagcccagggccccagccccggatgcctgcctgctcccctccataggtccccgcttcagtcccgggtttgccagtcttgtctggacttcagctccgcacctcagctcctttccagagctccaaatcccagccccaaacttcccgacagacccaagaagccgggagcacagaccccatcctcagtcactctttggatattggaatctggcccctgcctcctccggacccaggagtccgggcccggcttccctctcccaatctctctgcagaccccaggagcctgcggaccccgcgctcaccacgcccaggctcacgtcctgcgccgagggcttcggggcgcgcgcgggcggtgccagcagcagaagcagcagcgccagaagccggagccgcagccgcatggtgcgccccagcccgggccgccggcggggttcgaagggggcctggctggggccgccccggggacctgggggaggagatccgggcctggagagggcggggggcacccggcaccgagtagggagggatcggccggagggctgggatgtgtgtgggggtcccgggaagtgcgcggtggagtcagcggagggtcccggagggccagggtcgcgccgctgggtcgggtgggcccgggaatcccaggatggttgagagggcgcgggagcggcggaggtctggatgtgccgcggcggcctctcggggtcccggggcgctgcgccagcggcccctcctctccgggcgcgagcggagggctgggtggggcgggccgggccgggccgggcgcaccccgatatgcggtaagggcgcggcaagggaaatggcccaatcttcggacgtccagcgacaaggggcgggccaagaggtggcccctgcccgacccagagaccctcctccgacgcaggacgcccgggcgggggccgggggtccacggctctaactccctcgtccgcaagtttctcttcccagatccccgctcctgtgggactccccggggcagggctcgcttctgctttctcgaagccgcgcggcctgggggagggcggcccgggccttcggctcagccagccctccccatccctgtatcccgcccctctccttccccccaggaccccgtggggcaggttgtctgagagccggggggatttccgggcagcaggaggctgggaaggaagcctccttccccgcggggtcccggcccgccctccgccccgccagctccagctgtgcgcggttgcagctgcccgagggccaatactcagtccctcagcccacgtgggctgcgcgcggggctcggcctgggcacgcgggggtttgggcccctctagatgccgggagcagcggctgctccgcgactgcacccctctccctaagtgccggacatttaaatgctgcagccactgcgcggaagccacagcgcctgccagtgccgggagccggggaccggggagtgagtaggcgggggagatccgggaagccgagacctgggggtctgcgagccgcctcctcccgcgccgagagcaccgggctaggaggccggacaggtggggaaggaactggaggaagcgggcgggaggcttcctggggagggcgggtgggcgagtgtgagttaaactgctcagtctcggagcagttcaggggcagccgccggagctgctcacaaaataaacagcgagcaggatgcggagctggagatgcaaaggcaaacactgcgatcccgcgcccgctcgctggggccgccagaacaaaacaccaaggactgggaggctcaaccagaagtttacgttctcacagttctggaaactggaaggccaagatcaaggtgcctgaggggctagtttctccggatgcctcctcctgggcaggcagatgggcgtcctcttgctgtttccccacacggccgtccccctgcgcttgcacaccccagaagtatcgtcctcttttgttttgttttgttttgttttgttttgctttttttgagacggagtctcgctctgtcgcccaggctggagtgcagtggcgcgatctcggctcactgcaaactccgcctccctggttcacgccattctcctgcctcagcctcccgagtagctgggactacaggcgcccgccaccacgcccggctaatttttttgtattttagtagagacggggtttcaccgtgttagccaggatggtctccatctcctgacctcgtgatctgccggcctcggcctcccaaagttctgggattacaggcgtgagccaccgcgcctggtcattgacctcttgtaagaagtcaatcatcggggccaccctaaaagcctcattttaagttagtcacttttttatcagctctatctctaactataatcacattctgaggtactgggggttagggctttaacatacaaattcttcttctctctctggtttgttttttttgtttgtttggttggttttggtttttttgtttgtttgtttgttttgagccagggtctcgctctgtctcccaggctggagtgcagcagtagcatgatcatagctcaccgcagcctggaactcctaggctcaagcaatcctcctgtctcagcctgtcaagtagctgggacaactggcccaagccaccatgcccatgttttttctttctttcttttttttt

SEQ ID NO: 1243086 - DNA, 4001 bp, Homo sapiens
ttatattcttggtaatgtccactatttctcccaatgactgtcgttaatatccactaacacccagatatttaggactcccctaatccactattcactcccactgtggttcacaaacaccccaatgaccccacattaacaatcattaacacctggtttttcaatgaccctccatgactgccctgatccacaagttattctactccatgtctactcccccctacccccaacaatgaccatcattaacctccactaacacccagcacttcagagaccttcagtcactcccctgaccaccttcaatctcattggtatccactcccctccctacagtaaccatcataatatccactaacacacaagactttaatgacttccattgcccctacccatgaccatcattaacattcactaaaacccacaacttcaacagcccctactgacacatccatttattcccattgatttccattcatcccccaatgacaaccattattatccatgtgcaactatgtctcaataattttcccataaaatcccaataattgcatattctgtcactgacattcactgacactcccatgtccccaaatatctttactccctcctaataactgctcttacctgctattaattcccaagtcctcaacctccccatccacatttattctcagtgaggtccactgatccttcccaatgactccatttacatccactaattccaaagtgatcaatggcacagacttctcagtgacttccattaaatctcaaatgaacaactttacacatccactaacatttggtcccttaaagacttccccaacagtctacaagtgacttcaatgatgtaaatactctgagtgcccatcgaactccactgattccccttcccacttctattatttaataaataacaccctactcctcaaaaacactaacttctcaacagtcctcctctgttgagtctattgactttcttcagcgcattctttgatctaaacactctaaatcctcagtgaccctctttggtcctaacagccccctttttgattcctcaatgacctaaactcacaccaaacccccagtgaacatccgttgacagccaatgacttcctcaatgatgtaaactacaccatgtgtccacagtgacctcctcctgacccggcgatggtttaagccacttctcttaagtcccaagactccctactggtcacccactgacccttcccccgtccaacaatgacaacccctaaggattccttttaagaccccactaagtggagtcatacctgtttcctccaggccctcgtcttcgggatccggcgggaccgcgtgaacccctccaccttctctagcttcctcactggggaactgcgtgtcctccaagtcctccgcgcccccgggggccggggcagcagtgtctcctccgacctccatctgcacatccctgagtgggaggggaatcgagggtgacgggcggtgaaagaaacttctgaaaagcctttatagagtcaggcccccttggacacactcctactgctcatttccccacggatttcaataggacgagacatccaaaatcatgcccaaatacgtcccccctccaacactttccgaaaagaggagactctactgggcctcaggaaatagagatatacaaacacctgttttaactccgaatctcaattggccggataccattacttccccgtagcggcggtggcatcacacttccgggtgcggcccgggaggtgccacacttccgggtacgacccctcccagaagacacttccggttgcggagctttattggctcctcgcggcgtccctctcccgccgcctacgggtgtcccctcatagttgagatggcgcgggccacttcggatctacgtcaggtctgttcgggagcgcaatgagacctctctgcactcctttcaacggatctggctacggctgctaacccgggagagcgaggcccacttcgcttaccagtggttggcgtgaggggggacgcggctcgctctagccaatcccggagtacatagggcgcgaccgtcttctttctgggccaatcgagatgagccgcctcatttccccgctgtctactccccccgccaaatcctaaccaatactgtgcgttgtgttgcgtttgcacacgcccatccattgattgacgtctccctcgacccaatcgaagactcgagcctattccttgtttcacaagaggacttttgcagcgtcagtcccgatggatacctgtgccggacccacaaacgggctctcccagaactgaggcaactccactttctcttatcccttaaccctgccaagaaagtcaagggaggggagaggcgcgaatgcttgacgggcagtcgccgcttctaatcagcgtgccgcgccagcagctccgtaccctgccgggttcccacgtctacctgcagctgggggaagaactctgccagcccagggcaggggcgggcactcacttggaccaggacctgcccgacgcccccggtccgccgggcgaacgggtcgtcactttctgtgatcagtttgggaaaaggcttgggggccctgccacgggccagtgtgggaacccagggttcgaattcccgccccgacgctgcttccggaccgaaagccccctgaacgccttgccccaagtgccctgggccttggtttctccatcagtgaaacaatgatgggaatcgcttgacgtgaagtgagtggaggtgctggcacacttcgagtgattgctaaggggaagcctttggtactagttaggataattattttaattacagtatagttagggtaatgaattccaaataccagtgtagcatcatgtgctttatatacaataggtaatcgataagtaataaatattaaatttatataacagaaacaatggataaatttatgtgcatacaaaatatatttacctaatacatttagaagtatataatatataataaacatgtaaaaaagtacaataaaataacatctcataagcaaacttatttattaatctcgctgtgttacccaggctggagtgcaatggcaaaatgttattgactcattgcagcctccgtctcccgggttcaagcaattctcctgcctcagcctctggagtagctgggattacaggtgcccgccaccacgtccggctaatttttgtatttttagtagacatggggtttcgccatgttggccaggctggtcttgaactcccgacctcaggtgattcacccgcctcagcttcccaaattgctgggattacaggagtgagccatcatgcccagcccagggctacacactttaaacaaccagatctcgcaataactccctcagtcactgtcaccaagaggatgatgctaaaccattcatgaaggattcacccccaagatccgatcaactcccaccagaccccaccttcaataatggggattaccattcgacatcagatttcggtgggaacatagatccaaaccttatcaggggagtagaggaatagttacgccttcatctagctttgtcaatctgcatttttacctcagaggaagcaatcagatatgcatttgtttcaggtgagcagagggatgacttggggttcgctcctttgtctcgcacctgtgaagataaactatcaatttacgttgtcagggtaaaattcaacagaaccgttttagggtaaagatcttgcagcccacaaggaatccctagagggcaaattatgagggaagtatgtagctttatctttgtaaatatcttatttagggataaactgggaggcaggtttgcctgatgcagttcccagcttgacttttacctttggcttagtaattttggagtcctgagatttattttccttttacacctgccttgtatttcaacaaaaccatatcacaattaggctccttttaaaaattcttgctgatgtgctctgtgaactttaaagattgttttccagggaaaatggcagaactaagaacaattgtcacacag

SEQ ID NO: 1243087 - DNA, 4001 bp, Homo sapiens
agtccctgcttcttactccaagtctgattggcagagcccagatccttgacctacattaagctgcaggggccctgggaagccagcactgcactgtgagccactacagcgggaaggggcagcccgacactggccacagccacagttcccacgtgtggaaaaactgaggtggattgccggtgaggaaggctaacggtgcaagtgctcctgccctagatgcccagagccgggggcagacagtggcacccctgctccaccctgggcaagcagcactgacaatctctacattcttcccagatgacctcaggcaactgagatgaagctaagcagggaccagtgtgagcaaagccgctaaatgcatgaggacaaggaggactaactgagggccaatccagcaggcagcggacaggggttcagggacaactgcagtgacaggcacttcaggagggccctcgctgctatgttcacattacctgtcccagaaatgcccgggccagggggactgccggctggtcgaagaactccaaccccagtcgggtaaggtggccctttgggcttgagaaatagatgctgcggtatgggcccggagtggtgggcggtcccaagcagcgctccctggggcaaggtgcctgggctgcatcggacgagctgtgtggctgctctgcaggtgcctgggctgcgtcggacgagctgtgtggctgccctgctctagctggtcgctgcttcttttgccccatccgtcggcaaaactgtaatgggaaaaaaaataaataagcatccgaataggagacagctgtgtggtaaggtcaggctcaggaagtgcaaggactggatctgaccacctgctttggtttcttcatctgcaaagcgggggtgaccatcctgtgggttgttatgaggcacaaacaccctgacacactcgaggcctcaggaaatgatcacgtctgacgatggacggctgctgctgggggcagggtggctgctctgccccacatatgtgcgagctgcacggcatgggggcccaggctgcatgacctggggagcagatgggggcctgagcctgggacagcagggctggtgccctccgattcccactcatcatgcaggtcccaagcaaacgtctgagctggtttctggagccctgccctttcatccaacccttgccagaattcaaaacacaggatcttagcagggccaaggtcggacacacagggaggggtgagcaccggggtgaccaccgcgtgctcagggtccctaactgtcctctgcttcatggcccaggctggataacgagcaagtggggcaaaggcaaggtctcctgagggactaggagggtctgctgagaccgagcaggccgccagcctcccacctctggcctccccatgggtagggggaacctaaccacacatcctcggctgtcctggggcaaaggagaagggaagatgaaggtggcgggtgagcgccggcctggcagcacccggagggctggtctttagcagcacctaagtcctcctggcatgggagagatgcattatttttaacgggagtgctgacgttaatgtagaacggagactgccagtcggcctggaacggacgctgacgtgaccgtctccgcagctcggcccgcgctgccagcgcgccgtgggttcagcccccgggcgctgcggccactgctctcggcccgagcttggcccttggcctatgctctggctctgccccgaaccctcggggcggtgggcgctacgcccgtccccggcactcccgctcccgcggccgcgctcgctgctgcgcctgggggtgggcgcgtctgttccgcggggcggccgaggcgcgcgctcacctgggccccgctgcgcgcgggcatccggcggctcgggccggggcttcgtgggactcggaccccggcgcggagcccagcagccgccgaccacggaagcacccctaggaccggggcggagcggcgcctgcgcagaaggggacggaagccgggagaaggggggcagtgagcgccgggaactggctgcgcccccggggcggggcgggccacgtggaggtggatcctcttcccagcgcccaccgccaggtccggaccgattcccgggcccgatgcggtgcctgcgaggcgagagcggggaaggggcacctgggggtggggcgagccccgcactgtgccccggcgcccctcccaatgagctgtccgcccccgcctgcgccctggtcgcctggcggccccagagcccactccaccagccggtggtcagaccaccgagaggacgggcccgtcgtgaacctgagtggatcctcgaggggcccgggcggagtggtcgtgctttgggggagggggcgggccgcagacgtgttttccggtggggtgccagcggagtgagcgcctgggaggccgccccagccctggtccggagtgggccggggagtccttatccaggaagtggacgccaggcttgtgcggaggcccccgcccctggccggggttgtcacaggctggtcgggggaaggaaggagggagcggcgcggattctgcctctgcagcagagcccccatccctctttccgcccagggatgctgaagggagctcgcccacgttctgggttgggcctgctggagcgcaggcagcctcctctagaggccgaggccagaccagggctgaacacggcccggcagtgcgcagccgtcctacgcttctgaggcctccccgacggcccagcgcctgtaagctctcacaacctctcaagtcagatccatgcccctagggaggggcagggacggtgcttggcccagtggacggaagggcctaggggacgggccctgagggagctgggcacactgctggctcccacggcccatggcagccccagcacccagcagagccatcccccgcttctggccacttgaaggtttatctgggtctgcagggcccctccactgtggcaggcacaatcccaccccacaacccacctctgccgcacaaaaaccctcgaggggcttttcctgagctttgacttctgtgaccctggtcctggaaaggagcacctgaaaaggccttgaagagcaactgggcacctggccgcgtcaggtgggagacgctgggcaggacagacgcacaggccatgtgtctggagccctcagatgagtgtgacacctggtcctacagaaaggctaacagggcaggacctggtctccaactgcctctcctcctctgaccagccgtcccacccccatgggccccagccaggacttcctggggagggaggggccatcagccggctggaagccaccagctgtttgtagcactgtgtgccgcttcccggggtgggggcataatgtgtcatcaatccgtgtttataaagcagccctggatgtgattccacaccctccctgcttatctgcagccatgcctcccaaacaatgagtctctccttcctgtgggaacagccccccatccccccgagtgctccccctcagtctagtagggaaactgaggccccagttgagcctttgtcctcttgatgggcagggagaggatgggtgttactttgtacttatatttattctgatgttacaagtgatacatggtccttgcagaactcacggggagtccagaggctcccagaggggtgtttttatccccacctttcttatgaggaaagagaatcacttggagagcagattggcccctgccccaggaggtggagaggccggcaccggggcgccagcaaccaacttctccagatgttctggactgagtgctgggggttgcgcaatctctgggcactccccccccccacttcctggtttgtggtctcatgctcccaccacaggctggaagcggtgggatgagagttccaactgtggcctgcagagtgggctggcgggctggtccaggacaagagaaagtggtgccaggtgagaggagggggcctggggcttcctctgtccccagtttgtcccactgctgggctggaacaggcttgttggaggaggcaagg

SEQ ID NO: 1243088 - DNA, 4001 bp, Homo sapiens
caacccttgccagaattcaaaacacaggatcttagcagggccaaggtcggacacacagggaggggtgagcaccggggtgaccaccgcgtgctcagggtccctaactgtcctctgcttcatggcccaggctggataacgagcaagtggggcaaaggcaaggtctcctgagggactaggagggtctgctgagaccgagcaggccgccagcctcccacctctggcctccccatgggtagggggaacctaaccacacatcctcggctgtcctggggcaaaggagaagggaagatgaaggtggcgggtgagcgccggcctggcagcacccggagggctggtctttagcagcacctaagtcctcctggcatgggagagatgcattatttttaacgggagtgctgacgttaatgtagaacggagactgccagtcggcctggaacggacgctgacgtgaccgtctccgcagctcggcccgcgctgccagcgcgccgtgggttcagcccccgggcgctgcggccactgctctcggcccgagcttggcccttggcctatgctctggctctgccccgaaccctcggggcggtgggcgctacgcccgtccccggcactcccgctcccgcggccgcgctcgctgctgcgcctgggggtgggcgcgtctgttccgcggggcggccgaggcgcgcgctcacctgggccccgctgcgcgcgggcatccggcggctcgggccggggcttcgtgggactcggaccccggcgcggagcccagcagccgccgaccacggaagcacccctaggaccggggcggagcggcgcctgcgcagaaggggacggaagccgggagaaggggggcagtgagcgccgggaactggctgcgcccccggggcggggcgggccacgtggaggtggatcctcttcccagcgcccaccgccaggtccggaccgattcccgggcccgatgcggtgcctgcgaggcgagagcggggaaggggcacctgggggtggggcgagccccgcactgtgccccggcgcccctcccaatgagctgtccgcccccgcctgcgccctggtcgcctggcggccccagagcccactccaccagccggtggtcagaccaccgagaggacgggcccgtcgtgaacctgagtggatcctcgaggggcccgggcggagtggtcgtgctttgggggagggggcgggccgcagacgtgttttccggtggggtgccagcggagtgagcgcctgggaggccgccccagccctggtccggagtgggccggggagtccttatccaggaagtggacgccaggcttgtgcggaggcccccgcccctggccggggttgtcacaggctggtcgggggaaggaaggagggagcggcgcggattctgcctctgcagcagagcccccatccctctttccgcccagggatgctgaagggagctcgcccacgttctgggttgggcctgctggagcgcaggcagcctcctctagaggccgaggccagaccagggctgaacacggcccggcagtgcgcagccgtcctacgcttctgaggcctccccgacggcccagcgcctgtaagctctcacaacctctcaagtcagatccatgcccctagggaggggcagggacggtgcttggcccagtggacggaagggcctaggggacgggccctgagggagctgggcacactgctggctcccacggcccatggcagccccagcacccagcagagccatcccccgcttctggccacttgaaggtttatctgggtctgcagggcccctccactgtggcaggcacaatcccaccccacaacccacctctgccgcacaaaaaccctcgaggggcttttcctgagctttgacttctgtgaccctggtcctggaaaggagcacctgaaaaggccttgaagagcaactgggcacctggccgcgtcaggtgggagacgctgggcaggacagacgcacaggccatgtgtctggagccctcagatgagtgtgacacctggtcctacagaaaggctaacagggcaggacctggtctccaactgcctctcctcctctgaccagccgtcccacccccatgggccccagccaggacttcctggggagggaggggccatcagccggctggaagccaccagctgtttgtagcactgtgtgccgcttcccggggtgggggcataatgtgtcatcaatccgtgtttataaagcagccctggatgtgattccacaccctccctgcttatctgcagccatgcctcccaaacaatgagtctctccttcctgtgggaacagccccccatccccccgagtgctccccctcagtctagtagggaaactgaggccccagttgagcctttgtcctcttgatgggcagggagaggatgggtgttactttgtacttatatttattctgatgttacaagtgatacatggtccttgcagaactcacggggagtccagaggctcccagaggggtgtttttatccccacctttcttatgaggaaagagaatcacttggagagcagattggcccctgccccaggaggtggagaggccggcaccggggcgccagcaaccaacttctccagatgttctggactgagtgctgggggttgcgcaatctctgggcactccccccccccacttcctggtttgtggtctcatgctcccaccacaggctggaagcggtgggatgagagttccaactgtggcctgcagagtgggctggcgggctggtccaggacaagagaaagtggtgccaggtgagaggagggggcctggggcttcctctgtccccagtttgtcccactgctgggctggaacaggcttgttggaggaggcaaggatatcagtggaagatggagatgagaacacccttgaggctttgaaaggagtgaaggctagtattggtgctggggtgagcagccctgacccccgacctccacaataggccacaggctgtggaggggctggagctgcctccagctgtaggaggtgtggccatcagtcgctggagcctttataaacaagtctttgagagatgtggctgtattggctacaggggccagggttctagtatcagccttatgaccccagggtgcccagcacactggctccgtcttctctctgatggaggggggtgctgacagctgttgaggtgggtgtcaggtcagagcccatggactcctctacacagctttgagctggcagcttcccagcagggtggctgctggcctcttgactggtctctgcggccatctgtgtctgatgagccctggagggccaaagcttccttgggcagagaaggcagccactgggcaggccgaggttgggtgtgtgtgagctacatcctccctgcctggggctgtgctgccaggccctgggcccaggtgcttatgggaaccccttgccaaaccctgggatatggggagggggcagctgcctcagaaatagcctatgacttcaggccactggctggcctggcccccttctgcctcttccccaaatagccaggagctggtcatgggcccatccctggagccctgctccccgggcggtttcttctgatccttccagggactccccaaagcccagggtctgaccccttgggtgattacttgtggcctagaagctgagctgaggattctggggtagcagaggattctggggtagctgttgggaacactcctcttactggtcagggctcccattccctcgtgtcctggtgtgagggccacaaaccctgggtttggtctagaccctaaccctaacccattctcagacgcctgcccaccagccccgggagtgctgggcaactgcagctgatttccatttctccagggtgcatgacgcgggaagagaggggccgggagctgggtttccgtatagggggctcctccaccaggacagagagtagtagggcaggcaggaggcagagcacacatatgtgcacacacttgtctatgtggactgggtacaatcctgagtttcgtgcgc

SEQ ID NO: 1243089 - DNA, 4001 bp, Homo sapiens
aactgctaaaatctttccaatatctgcttggccaattcactccacttctctgaagttaatgttattaccaaccataaaatcaaactctgttcagtaaagattcaaattttgctaatatgcatgaaagtgcttgacaaactctaagttatgctgcaatttgtcctccaccctcattcacccattcatccctaactccatcctagctcaactccattcaaatcttgcccatataatgtttactctctctcttttttttttttttttgagacagggtctccctgtgtcaccaaggctggagtgcagtggcgccatctcagctcactgcagccttgatctcccaagctcaagtgatcctcccacctcagcctcccaagtagctgggactaaaggtgcgtgccactaggcctggctaatattttgtattttttgtagagatggggtttcaccatgttgcccaggatggtctcaaacacctgggcttaagcgatttgtctacctcagcctctcaaagtgctgggactacaggcatgagccactgcgaatggcctatctttcaaaacattatgaatgcttccttccctcttttggaaattccacctctttaaacatgacatgtaacagtttgctactctctagaagtagtgcttagtgacaggcatcacagagtacagagtagtaataaagagccagggttctggagccagactgcctgaattcccgtcctgtctacactacttattagctgtgtaactttgggtaaattacttatttctgtttcagttgccttagctgtaagaagagagttactgcctgtagtcacctcaaagtgtcattatgtgaattgcataggttaatatacgcaaaccacttcaatcattgtctagtactataaatatttgccattttcttgatactgttccccgtttcaatagctttccattgctcacaaaataaaggaaaatatctttaatctggcctcaaattccctgcacgttgtgaccattgcctactctgcaaccccatttcttagtacttgccttccagacatactgaattgtctctaattcttggaaatttccatggttttctttttctttcttgcctctcagacttctgaactcagtttctcctagtttaggacgctgtgccttccaccctcccagtaacctagagactaccctgcgagactcaccctcttctccctggaagaagagggagttctgccagcagactgtctttggacttggactgagtacttctctgggtctccagcctactggcccaccctgcagattttagacttgcatctccacagtcgtgtgatccagttttaaaaataccccctctctccatacacatatatacacatatacatcttgttgattctgtttctctgaagaactctactaaaagaagtattatcaaaattaaaaaggagcttgaactcatgtagcctaatgctcttctttttaaagatgaggaaaagagatattcagagaaagaagtgaatttacctaaattacccagctaaggagttacacttcccatatatcatatttattgcatatataagtaagcaacaacttctcgagaagctcggtgagtccccaaggtccccagcgcttctaccctcactgcactgggtaagctgtaccctgactgcttctgtgtactcaagctcccatccgcccgcgggcctcctgagagagtcggcctaattcgtaagctggttcccagtaaacagtgcagagcaggcgctaagtgaatgaatgagcacgagagctggaagccctctgaggcctctctggtgtcccttgtccgcccgccgcctcggccccggccaggttggaaggaccgggtgcccctaccgcccggagtggcgctctcagcgtccccgcaccttcatgcgcagtagattcttggacaaccttgtctttcgctcggccgccatggtagcttccgcccagcgccgcactccggccgcgagcctcaccgcacatgcgcggagccgcgtgcgcagctgcgtccctcgcgtagtgcgcgccgccccgccccgcccctcccctgtgtcttgcgcgcgggcgcggccactcagcgggcgctctgctgactgagaggctcgggtaagctcgcggggtggcgggcgcggggatgagcgcggcagaccgcaaaaaagccgaagtcagaggacgacccagaacttggcttccccgagccgcgggtcgccttcccgggacgtcggcctggccccctcggaggcccatcctccctcggggactcccttcctcagggaccccctccacactcagtagtcctcgccagcctcagagaggtttccgccacgcctgccacccgcctgggccgtgttacccacgtgttttgtcttcataacgtgggtggcgggctccctttgttctgggtcgctttgcagggtccaggtcgttttctcttcaccaggaccccacgagttgctgctttcctcacagcagcccggagtcccgggggagcgcggcgggggccgccccaggcaggctggcttcattcccaggctgctgccgatgcgtgtctggccgagtgatctctgctaaacagaagaatctcaagaaatggcaagggatggaggcagggatgggtgccaaagacacatgaatgagaacaaagcctggttttgatccaaagaattgaaaagaccatagcgaggggcaacatagggagaccccacctctacaaaaaaaaaaaaaaaaaaaaaaaaaaaaaaaatatatatatatatatatatatatatacacaaaaaatatacaaaatatacatacaaaaaatatatacaaaatatacaaaaaatgtacaaaagatacaacaaaaatagctgggtgtggtggcacggatctgtggtctccactacttgggaggctgaggctggagaatcactggaacccgggacgtcgaggctgcagtgagctgacatcccgccactggactccagtctgggctacagagtgaggctttgtctcaaaaacaaaacaacaaaacaaaaaagaatttaaaaaaccactgaaaatagggtagcgttcctaccctggtgtttaatgctctgggtaccacctaaacacgttttcgaaaaccattcccaggtccgacgctttggaacaccctcaagctaatagcatctcggctgataccatgagttctacgtcagattgttgacctggtcaccttagggctaattagttcacttaatccccataagaaccggaaagaaggtattgtcatcgtgttgttaaggattctgagacacagagtgggtaacgcacttggtgttcacacagctaatccatgttagagctgaaattcaaacaccgatttggatgttaaaagccctttaggttttcccaggggtaaataaaatcattgtaatgtaccaagtggctacagaatctcattcacttgtgactgtgtgtgagatgccgggggtataatagcgtgtaaaaacacatatccccacctttcctgaagctgatattctggacgtaagtaagtggcgactgctatgaaagagagaaaacagtgatgtgacagagtaacgcttagggttactttagaccaggtggtttggaacggcccttgtcagatgatggtgctaaggcttgaaagttgagaaaaacgtgttttatgaagagttggaggtagagtgtgctcagaagacagcatcaactgtaaaggtcctcagatatgaacaagacaaagtccgtgttaaaagttttacaagtggaaacagtagaggttaatcataagccacattgcatcccccaaaattcatatgttgaagttccaactcccagtgcctcagaatgtgaatgtatttggagacagtcctttttaaagaggtgattaaaacaagacccttagggtgagccctaatccagtctgactgatgtcgtcataagaagaggaaatttggacacagacaccaaggttgtgtttgcataaaggaaagactatct

SEQ ID NO: 1243090 - DNA, 4001 bp, Homo sapiens
atccaactcttaaaaataaggcacacggggcagggtaggtttcttcaagatggtggcttgtctgacttcaacctggtttagaaagcaccaacagcccttaggagaagttccctcccatttggggggagatctgtgatccccaatcccaaggtcaggcttgagacccgtagagattttctccccagttacccaccccatccccttcaaggctctagaaatcgcaatgatgctagaggccacagggcccctcctgtgagcagacgggggatctccaaagatgacaagaatttaaccaacttgagcgatcagcctgttttacagcctcctgacctcaacctgttcttccccaaccctgggcggaatgaggtcaccctgtttgtttaaatcagctcctaagtgaccccaggttacttgtagatgaacccaagttaactctcctcattaccatgctaaagtcttcaccccgggagaagctatagcttcacgactataacctatgcaacctatgcagcctatgtgctagcatcatgactcactgggacccctactctacatgcagtcatgcaccctctcctttctccatcaccttataaaaccctcctgtctctttctctgggggacacactacttgggagaatacgcccagtgtcttcctttcttgtgccaagtaaaactcccattgatcaaaatccgcctcttggtggagtcctttgtgactcgttaagggaatgaaccccggtatttttcaggtaccatttccattgttcttattgtatgcagtagagaaggtttccacagtcaagcccctgtcccccacaccccaggcccgggtcggattttctaaggagagggttccctgaaccctcacaggtatatagtcctccatggcaaggatccaaggtcccttgatgttttccgtgagaccccaggggaaaatcttgttaccaaaccaggactaggcccctgggcatgaatttgctgaagatccaggcccaacctcagattccacctgctctgcccctcagggtcactgatccccttgcattttgttcctgtgttggccccggggccccaggcgtggattttctgaacagcaggtcggttccttccctgtcccacgactggttcacggtcattgcagctgctacggccttgaactgggatctcctttattttcccgtgggcctttttcagggggcaaagacctccgcagccctgcctacctccagccttggtctacacccaaccccagagtctgagccccgaccctagtcctctaaattcctgacctggtggacctctggctccccaatttctcggctccccagccagtgcctcctgcaaattttcgcaatcaaacaccccagcctctagcctttgccctggcccttcaggcctctgaagcagctccggtctcagagccccggctcctgcccgggtccccaggctcctgcagcgccctccctccagccgcttgatccccgagtcccagcctccagtcccccaatactgggtcccaccccccaggtcccctcccggcccctcaccgacatagaaggccgagaccgcgatgggcgcaccgaccacctggtcgcacagcaacttggccagcagggcgtgcggcgctcggcccgggagcgcgcgctccagcaggcgcagccacacgtagttgaagttggcgtggaaggtcaccaccaacgtggccacgcgccgcgtctggcgccagttggcctcgcggccctgcagccgctgttgcagcgcgtccccggccgagacgagcgagccgtaaagcagcacgttggtgggccacgggtggcgccgggccgcgcgcgacaacgccggccaccagcccgccatgtccgcgctgtgggcgcccgcgatcaggagcccgcgtggtcggcgtcttcctgcaccgggtccgggcctccccagcctccagcagctactgcactgcagcagccggcacctgcatctgccccctccagaagctccggagcgattgagcgacccacacacacccagctcgcgccgtccaatccggaggccacgggccgtcctgggggctgaacgtttgaaaggtgcccggcccacccccatgcatgggtccattgacacaaaataccgagaacaggcaaagccacagaggcagaaggcatggggttatttatttatttattttatttttattaattaattagatatttttgagacggagtctcgctctgtcgcccaggctggagtgcagtggggcgatctgggctcactgcaacctccgcctcccgggttcaagcgattctcctgcctcagcctcccgagcagctgggactacacgcgtgcgccatcacgcccgactaatttttgtatctttagtggagacggggtttcaatatgttggccaggctggtctcgagtgacctgcccgcctcggcctcccatatggggttattttttggagtgatgaaaacattttgaaattagataggtgtgatggttccatgactttgtgaatctattaaaaaccattgaattgtacacttaaaaaaagggggtgcatttggccaggcgcggtggcacatgcctgtaatcccagcactttgggagaattagacaggaggatcctttgagggcaggagttccagatcagcctggacaaaataggaagaccccatctctacggaaaatcaagaaaaggaaaaagaaaaaagtattgtaattactcaggcttggtggtgcgcactgatagtctcagctactgctactcgggaggctgaggtgggaggatctcttgagcccaggaattcaaggttgcagtgagccacgatagggccactgcactccagcctgcaaaaaaaaaaaaaaaaaagaaagaaagaaaggaagaaagagaaaagagagagaaaataaaatggtaagttttatggtatgtgaatttatcttaaaaaatgatgggacggccaggcacggtggctcacgcctgtaataccagcactttgggaggccaaggcgggcggatcacgaggtcaggagatccagaccatcctggctaacacggtgaaatcccgtctctactaaaaatacaaaaaattagccgggcgtggtggcgggcacctgtagtcccagctactcgggaggctgaggcaggagaatggcctgaacccaggaggtggagcttgaagtgagccaagatcgccccactgcactccaccctggctgacagagggagactctttctcaaaaaaagaaaagaaaagaaatgctaagcaaagtgttctggtgtgttttgcctgttttggtagtggaagggaagaaaatcagtctttttctttcttctcccccttaaaactatttaagaagggaactgggcgcggtggctcatgcctgtaatcccaacaatttgggaggtcaaggtgggaggatcacttaggtccaggaattcaagaccagcctgggccacatagtaagacctcatctctaccaaaaaataaaacattaggtctgggtgcggtggcttacacctgtaatcccagcactgtggcaggctgagggagctggatcacctgaggtcaggagtttaagaccaatctggccaacatggcaaaaccctgtctctactaaatatacaaaaatcagccgggcatggtggtgtgcacctgtaatcccagctactccggaggctgaggcaggagaattgcttgaactgggtaggtagaggttgcagtgagccaaaatggtgccactgcactccagcttgggggacagagtgagactctgtctcaaaataaataaataaatattatttaaaaaaaaaagatcccctgggcatacaataagtaataccatactacttaggcaaataaagcacaattctattatttgggaatcttaagatcggttctaccactttgtggatcttcagactcaatctctattttagagatactaacattgattgatcctgctatgtgccaggtactgtctttcacaacttcacatatatgatc

SEQ ID NO: 1243091 - DNA, 4001 bp, Homo sapiens
aagccgcagcagcatccctcgcttcaggtccatcccaaacttggagcacaggtcctccttcggggtctggcagaaggctcacatggggccaggtgctggtggcagggccccacctacccttccagccaacccacctggctcctctctagccgctggtggtcccaggacaggacagagaaggcccgggtggggccgcctcagcaccccagcctggggggtgggatcagcacagaagcaagtccaagtgcagggaaaggggcggctgtgctcgctcaggccccacgggcaagtcagccacccacagagcgacagcctctcctgaaggcaggaaaccccactggtgctggccagaaaggggcatggccccactcacgctttcccagtgaccctcctgtgcagatgtcagcgtgccccggtgtgatgctgacctggggctcccgtgagtctgactggcccatcccagaccctgtgtgcactgactcgccccaccccgcttgccttgaggatgtaaaagtcgagcccataagcctcatcgatgaggtccagggtccgcatggtcacagtcactgtgaacttcttgtccaggatctcactgtagaactctcgctcaaacagctgtggcttccacactttcttcagcctcttggagagctgagggtgcaacagagcctccatgagtactgctgctttctcttacataccaaggggggcccaggcaactgccctcacctcccccccggaggctccatcacagaaccactgctgtcagactggggacctagagctaactgggccggcccccagcccagtgccgccccagcccgacccgggtcctgactgtgtacccagaagtcagctgctccccaacaagctgggcgttcccgccctggtcacatggttgctgcatgtgtttcagaaacatgtgcgaccccacagtttacaggttgtcacattccaacctggaggtgacacaagtctccccacaggcttcagcagtcccgccaggaagtccaccacaagcagcctcgaagctctgctcgcctcccccacctgctctgctcgcctctcccacctgctctgctcatcacacaggcctcctccccatcctaactttaccccgactccccacggcctctggttgctcccccggcctgagtcaccccacctcacccctactttatcagtcctgtttgccagaactgcggttcttcactcagcgtgctcctttgccggagatgtgtcgcctccaggctgtaatccccagggcccacccaggtctctccaggtaccccgggcgtccggcacagagccggcacagccaagccctgagaggagcccctgaaggccgcctgcggacccaccttgtcgttgttggcatatatttggcccaggatccagccctcgccgccccacaacccccgctgggattcggggggaaagtagatgggaatgggcacgtcctccacacgctcccgctgcccgttcttggggttgatcttgaacttggccccatgaggcctatagtgcacgggagtgggcgtccgctcctcctccagggagcgcaggtagtggccgggcaggcgggaacagatgccctcccgcagctgcagccgcttccagagccacacgggatacttgtgtagaggcatcgcgagcctggcgggaggtgggggctcgcagtcagtcgcagcctggccaggcccccggcactcaccccctaccccggcccccgactctcacccgctaccccggcccccggctctcacccgctaccccggcccccggctctcacccgctaccccggcccccggctctcacccgctaccccctaccccggcccccggttctcactccggcccctgtcccgcacccacctgcccctccccttctgccccggcgcccccccacaccccacctgcccgcgcccacctttcagggttcagagcccaccggaaccggaagccgatctgccgcgcctggccctcctcccaccgctgactggctgtaaaagccatccgtctaccccctcgtcccgccccgcttccgtctttagggaccgtaaaaaacaccccacatacagcagcagcagctcaaggcaccgttagctacgtgcggccccggcgtttccgcgaagggcggcacgggcggggcggtgcttgttctcccgggccccacttaccctacccgggaaggagcacagaaaaaatgtaaaaactcgtttagtttgaaaaatcaatgtagaatattaaattcaccaaacacagatagatcagatctacataaaaatatgtcttaatatcttagaattttcctttactccaaaaaaccccatatatatatgtttctcctttataagcttagagattgctttggtggtcaagtgcagggcggctgggggaggtaagaccttcaggaaggccatatcccggacaagacccagaagggaagcccccagagccaagggtaggagggccccacccgggtctcagccactcacttctccagggcggatccgagacactcacaggcctcagggaggggccaggtgctgctcctggtcattgcttcccccacaaggtttgcatgaggagcagagacagtccagtctcctgaacacccacagggcacagagcccagtgcagggggcagacaccaccgcagctcctgggaccaagaggaagctcccagaggggggcccaggaacgctggggtgggtggacagggctgggtaggggttccttctgggccaaacccccagagcagcagagcaccccagtccaaggaagctcttctcagggacccaaggctccagagccaggaaaaagggaggggcggggcgggagcctgcatccccagtgcccatcagctctgggggaaacctccgtctcccgtccctatggtgaccacagcagcagagggggatcctccatgccccaggcaggctggcatcagggccacacaggggccaggagcaggggtctcggagtccacagctcccggccccagtggtgggctcagggctcctgggcgccatgggtctcaccacagcctcgccagggaacaggaccatagggagtccttctccccatctctagccacccacaggccagcagagcacacagccccaccctcgcacaggcacctgtggtctccaagtaaccaagcccaggccccaggggccactgcagacagcagctgggatctgcagagggatctcagcagcgagcaggcagctggcgaggagaggtgcgtgtgagggaggggtggccctctcctcagtaggaggaagtaagagggtatctaggccaatttattcagctggaaatcaatctgtccagggctggaccaggcgcctccccctcgatacagctcctggctgaagaggtcatcagagcagcagctgtccccaggccagtgtcacgtcactgcgtacagttcctcccgatcgttcttgcagatctgatagtggcaggggaatttctgcgagcaggcccagggctcggcgggctggtcaggtggcggcagcagcaaggctgcgctcccggccagcaggatgtgccagatgctgtgggtgtagtagtagttgtcgctagtcatcatggaggtgtagatggcgatgcccacagaggccatagagacgccgggcaggaggtagaaggcccagcgctgccacgaggtggggtagcactggcgccggtgcccgcagcggtaagcctggagaaaacagccacgcaggtatcagtgcaggtggggccgcggctgcagctcccagggcccagatacggtggttactgggggcctgcccaggtctgggcagcagaacgacaagggtgggctgcttcgagggggctcaaggccactggtcctcaggcccaggcctcagggacacagccatgctgggcctctgtgggtgccatggcaacccccagcagatatgggcattcactggttggagcaggaccaggaacgtggctagagcaaggggccaggctctcttctcc

SEQ ID NO: 1243092 - DNA, 4001 bp, Homo sapiens
gcgtagtgctcacgcagcagctcctcggaggcctgcggaagggtcaggccgcctgcgcccgcacccggcacctaggcgtccccaggtccccgctccccttccccccacaccgcgcccccgctcgctcaccgcgcccccacctgcaccagcttcagcgccaccaacttgaagcccttcctctcgaagcgccgcacaatctcgcccaccagccgccgctgcacgccgtccggcttcacggccaggaaggtgcgttcgtgtgcgccggtgcaggctgcggggcaggcggggacgggccgtcaggccggcccagcaccggccacccgcccccggcccgcgccgcgcggctcacccgcggggaagaggttagcgaagatggtcagcaccaggcagatcatgatggcggtgcgggagcgggatccgcggggcggggcggtggcgcccggggcggggcctgcgcttaaagaggcctggtcggggcgctgcggcctccgcggggaggctgcttcacttgcaccccggaacccggcagccgtggggggccggagggcagctgcggaggccaagtctcctccagcagctcggacactaactgtatcccccacaacccgcccaggtggttccacccacgcggcgccctgctccgcaccgcccgaaccccgccccccccgcgcccccccggccagggccacgaccacagcgtcagcccttctctccccggtcctaaagacagagcgcaaagacaccacgaccctgggtacttcttttctctttattccctttcatagcttctgccgggatccaggcagagagagcactaatgggggaaagggagcgagcgcttcccgctttccccagcgtgggccctcggagttgggtgtgggggcagcagggccagaggaaaggcacaggtggcgatttgccccagccctcccccctaagatgcagaccctcagaacacgtcgcggaaggtgagctccctgctccgagaggcagactcgggtgtaacgcaaagacggtttctttcatcaataaggtccccactgcctcacagcccctaaggccacccgctggttctggcattctagacgggggtgcccttggcccttcctttgtcttcctgttttgcagggtaatcccagggttccatgcgtatcctctgcacattcagcatgggctcctcggtgcttgtgtctccatttttctgtcgttctgcgataatcatggcccggaggagaggcgggtacggcacggaggccaggctgtcttccggcgccggcgtgaacgcggtgaaggcctcctcctcgtgcttgggcaccagccgccagtcatggtacatgacgtgttcgatctcccgcgcctcgctctcagtcttccctgatgaagaaaaagaggcgtctgcacacacttgctgtgccgtcggcggtcggcatcgaactgccgggcacccgctctcccgagccttacctttgaaggtcaggatgccccaggccttcccgtggtccaagttctgcaaagccagaaggaagcggggtcagctcgcaaagctctcggcccccgaggtcaggaggtgggagcctcagccacgcaaacctgcagggaggaggggaggcggggagaccaggcggctgcaggggcggggtgcggacggggtgcacgcacctgcgccgtgtagtcgggccgcacccgcgtgaggcgccagtagcacggctcgtcgtgctgccacagccaggacttgcgcgtgaccaggcggcccaggccgaagagcgggaggcggccgagcagctgcaagaggcggctctcgcggcgcacgtcggcccaggcccggaccggcagccggcgtccagagaacggccgcgtcaaggtctcgtagtccaccgcgtagagctgggagtcgcgcggcctgttcagttgctcccgcagggcgcgcacgcggcgggccagctccgcgatcagccgcggacgcaccttcttccgcgccatggcgggtccgcgtcctcagcggtccggccggaagtcaccggaagaggccggtgtcccaggctaaagtgttcggtcgcggccggaagcgaggaagaggtcggtccggccatggcgcgggttggacccgggagggcgggggtctcttgccagggccggggccggggacggggcgggagcggtcagcggcgacctccaacctgggagatctcagactccgacgctgaggactccgccggctcggaggccgccgcgagagcccgggacccagcgggtgagcgcagggcggctgccgaggcgttgcggctgctgcggccggagcaggtcctgaagcgcctcgcggtgtgcgtggacacaggtgcggcggagggcacgggcgatactcggggtaggaaaggcctttctccgccaggcggcgccctctgtccgactgggcggggcgcgcgtgccgaggggcctggggccgggcccgcctcccagtcgggggtttgtgccgaatggagactccccggtccggccacccgcccaggtagggcgctcgcgagggtggaaggaagcagtgaccgcgctcctctcccccggtcccagccatcctggaagacgccggtgccgacgtcctgatggaggccctggaggccctgggctgcgagtgccgcatcgagccccagcgcccggcccgcagcctgcggtggacccgagcgagtcccgacccctgcccccgcagcgtgagtggtcgcgggttcccgagggccagccgcgagttggctgttttgcttccatgatttcagccctggagctgtccctgaggcagctgccctgggccgtgcgcgtctcgcggatgggtaaagcaaggatggagaacgggaagtggaggtgcccaagccgttctgctggtatagagccgagctggctggagaaggttccgtctcgattcaggctgtggtctggattcctgccagccacagagacctggcctgagcttggccttggcaggaaagggaacactgggcttctgtagagcaggcctgtcagggcctgggcttggctggggccacgaaccgctttgctgctggactgcccaggcagggcccctggggcacccggggttgagacaggcagcagcgcgtccccatgtccccacagctgcctcctgaagtgtgggctgcaggtgaacaggaattgctgctgctgctggagcccgaggagtttctgcagggcgtcgccacactgacccaggtgctcgggtggtggcagtagtccctctctaatcaggaggggtgggttcccagccgggaggcgcctgctccgccggtccctgcccctgtagacggggctggagggggcatggggcaggccaggactcctctctgatccaaagccgtagaggtttctagggtgagatggagaaagctcctgggcacctgcggaggctacagctgctcctagaggatcctgagaagtgtcaggaggccggggtccgggcagtaggctgcaggcttcgtcctctgacagcagacagcctggcccctgcctgcggggagcagtgctcaggtgctgtggtgccaggtagcgtggggttaggctagaccccctgccaggtccctgtgtcccaggatcagtgtctctcaagctgctgctttgtgctaggtcaaagctaggctggagtacagaggtggaccaggatgaggggctcaatggaactgacatgtgcccgagcagccactccagggtctccttagcctctttggcctcgtgggaggcacagagctggttttctcagaaggggtaacggaacagaggctcctctcggcaccactggctctttttcaggcttgctgttctgcaaaccagctgtggcctggtggcccatggccataggccgcagcctcctgtgaacaactgtgccacacgttctcatcttcagatctctggcccaacccactgggtgccctggatctcccccgagaccaccgcccggccccacctggctgtcatcgggctggatgcctacctgtggtaccgct

SEQ ID NO: 1243093 - DNA, 4001 bp, Homo sapiens
ccgaggctgaagagcaggaacaggaggctgccgagggcgggggtcccacaggaccccaacaggggtcgagccgttggcaaggccatggtctgtgtctgtggagggcagtgactcaggatgggaccccctgctcccaccccacgcctctgtcctgggccagcctggggccacatgggcccaggaggggctcccagagcaaacttctgtggtacctgcagcttgtgtccgcaccctggccctgccctccagccactgagccctctgtcccctggactggctcctcctgtccaggggaggggctgggtctgagatcccggtccccagcccagacagcccaggagtcagttggcgcccacccctctcccagaagggcagggcagtgtgagcagagcttagatcaagcaaccggggccgccgcccacttgggctggcctgagtctccccactctcgcacaggaggacgagcagccccgtcgcctggatgtggctcccttccctctcccctgccctcagctgcaggtgcctgggctttgtgaacaccccaggctctgccaggcagacaacacccttgaggcaggaggggcactgcgggcacagaggccaccgccccttcccacccagcagcgtctttttgggccacttggcctctctgagcccattttcaggtgcagtccaggtggggcggggctgggccagtgagcagcctggggagccccttgtactctctagggtggggcctgtgggccactgtggggtggggaagtgggtggggagaccctccctgaacaagaattgtcctcctggggtaggggtggggctcgcagaagagggaactggcttctacactcacccctttcagggaggccaccatggcggagtagaatagagctgcctcctgaaaaccttggcccaggcccggtgggtccacccacagctcagaaatgggggtcacacgctcatgctcagcagccccatccacaggcagagcctgcctggtcggcccggccactggggaatgtcgcggggaggcacacagcctccgggtgacagactctactcccccaggccccagaggaagtggggaggcccctgaggctctgaacaccttgagaaggtggaagaaaacagaccccccccacagccagaaaatgggcagtgagtgggacccccagcccttggggtgcgtgaagccaggagggaaacgtggccatcggatcacaggggacctgggcactccccaccccagctccatgtgacccaaggacctcagcacctgggatgggggctccccgagagcccggcccttcctgctctgaggggcctctgcaggccatggggggccctggaatctgcatcctttacacctgcaggagagctgggctggggccgtggaggcacctgcactgccttaggactgccgcttccaaacaaatgggtctgcgtgtgccctgcggggtgaaatctgcgtccagctgaagcctgaccatcgctctggtgctggaagcccggcctggggcggccccagttctccagatggaaggtgcagattccatccacaccacaacaggaagagctcaaaggttgttacttacagatcccagggagggaggcaccgtgggtccaccggtagctctctgtccgcgcgtcacagcagacgggagtggccggccaggcagaaagaggagtgcgtggcgctggcagcgcccatgaggaacaggacagcccctttcagatcgcgggccaatgcccacacgtgggcctctaaagggcgatgtgaaaggggaagcccagcccccaggcctctgaggccttctgcgcagttgggtagggagctttacccctaacgcccgggcagcccccagccctccaggtcccgagtggcccctcccaggtctcagtgggccctgcccagggtaactctgatgtgcagggtgattggccacacctgagcctcctctgcctcggtttcctcaattgggaagtgggggtggagagcctggcagcctcccgggccgtcaaagggaacaaatgacggctttgcccggggcagcagggagtggtggcgcctcacgccccaggaatgtgtgggtggagaccccgcacaggagccttggacaggcagcgggccaggcctgggggaggagggatgcccaggaaggcaaagctgccctcggtgggcgagggtgggagcccgggcccaggtttcacggctgccctgggtgggtgtggggcatgtgtaggagcccgggcccaggtttcatggcttccctgggtgggtgtggggcgtgggtgggagcctgggcccaggtttcacgggatcccactctgattctcaggtgctgaaacccagggagcactggcccccccagtcgcaggtcagcaggctctggatggtggccacgcagcccagacaggactcccgggagcacaagcctgacccccagtgcagtgtgggcctcgcaaggctgtgagccgtccgtctcagggctgtgggagcacacaggtcagggaggcaggacggggcccagctccaggcacacgcacacccctttctcgcagggtcgactggaacagagctgcccccgggcgctctctggcctggcgaagtgggagctgtcttccctacgcatctgggctggctgcctgctgctgatggaagagctgctcctcctgacctggggccacagaagccccctccctgcccctgaaacccctcccagcatgtcgtgagctcttatccccagtacggaatctgcctccgctatgaacacctgcaaaggtttgtgtgctgaacggaggtgtgcgcggcggtcatctctggtctctccacagagtgggttttctatcgtgactcgcggtggaatcggaccttcacgcacacagaattcagcaaggctgccaggtgtaagcgtcaacttacaaatgtcaagaagggattaagggccttttaaaaactcccttccgcagagaacaactgaaaaattccagacactcttgtagcaaaccagttacccaagggctctggggaggggacagaaggcagccggcttgggcgggaactcacaggtaaagggagaggccagctccgagtggcgttccctttgtgtccacacagctttgctctgaaggagccgcaggttggctgcggggctgtgaagtggcccaggctgccacggacacccacaactttcccggccaaaggccaaaggaaaccaaggaaggagcccagaatactcagggcccagagctcgaggagaggcctgagccggaggagccaaggaggcgcccacgtgcccagctgagccctgaactgaaggagccgaggagggtccaggaagagctcggagggccccgtagacacggctgagccctgaacaggagcctcagaggggcccatgtgcccggctaagctctgaaccagccgactgcaagctgcggacaatgatgaaaacgcgctgtggccagcctgggctcacccttcagccagcaccgtgggaggccgatgcgggagggtccgttgaggccagaagttcaagaccagcctgggcaacgtagtgacacctcatctctataaagaatctttaaatgaggccctgtgtggtggcgcacgcctgtcatcccagcactttggtaggccgaggtgggcggatcacctgaggtcaggagttcgagaccagcctggccaacatggaggaaccccgtttctactaaaaatatgaaaattaactgggcgtggtggcacatgcctgtaatcctagttactcaggaggctgaggcagaagaatcacttgaacccaggaggtaggggttgcagtgagtcgagatcacgccactgcactccagcctgggcaacagagcaagaccctgtctcaaaaaaaaaaaaaaaaaaaaaaaaaatgccgggcgcagtgactcacgcctgtaatcccagcacttttggaggccgaggcaggcagatcatgaggtcaggagatcgagaccatcttggctaacacggtgaa

SEQ ID NO: 1243094 - DNA, 4001 bp, Homo sapiens
cgaggctgaagagcaggaacaggaggctgccgagggcgggggtcccacaggaccccaacaggggtcgagccgttggcaaggccatggtctgtgtctgtggagggcagtgactcaggatgggaccccctgctcccaccccacgcctctgtcctgggccagcctggggccacatgggcccaggaggggctcccagagcaaacttctgtggtacctgcagcttgtgtccgcaccctggccctgccctccagccactgagccctctgtcccctggactggctcctcctgtccaggggaggggctgggtctgagatcccggtccccagcccagacagcccaggagtcagttggcgcccacccctctcccagaagggcagggcagtgtgagcagagcttagatcaagcaaccggggccgccgcccacttgggctggcctgagtctccccactctcgcacaggaggacgagcagccccgtcgcctggatgtggctcccttccctctcccctgccctcagctgcaggtgcctgggctttgtgaacaccccaggctctgccaggcagacaacacccttgaggcaggaggggcactgcgggcacagaggccaccgccccttcccacccagcagcgtctttttgggccacttggcctctctgagcccattttcaggtgcagtccaggtggggcggggctgggccagtgagcagcctggggagccccttgtactctctagggtggggcctgtgggccactgtggggtggggaagtgggtggggagaccctccctgaacaagaattgtcctcctggggtaggggtggggctcgcagaagagggaactggcttctacactcacccctttcagggaggccaccatggcggagtagaatagagctgcctcctgaaaaccttggcccaggcccggtgggtccacccacagctcagaaatgggggtcacacgctcatgctcagcagccccatccacaggcagagcctgcctggtcggcccggccactggggaatgtcgcggggaggcacacagcctccgggtgacagactctactcccccaggccccagaggaagtggggaggcccctgaggctctgaacaccttgagaaggtggaagaaaacagaccccccccacagccagaaaatgggcagtgagtgggacccccagcccttggggtgcgtgaagccaggagggaaacgtggccatcggatcacaggggacctgggcactccccaccccagctccatgtgacccaaggacctcagcacctgggatgggggctccccgagagcccggcccttcctgctctgaggggcctctgcaggccatggggggccctggaatctgcatcctttacacctgcaggagagctgggctggggccgtggaggcacctgcactgccttaggactgccgcttccaaacaaatgggtctgcgtgtgccctgcggggtgaaatctgcgtccagctgaagcctgaccatcgctctggtgctggaagcccggcctggggcggccccagttctccagatggaaggtgcagattccatccacaccacaacaggaagagctcaaaggttgttacttacagatcccagggagggaggcaccgtgggtccaccggtagctctctgtccgcgcgtcacagcagacgggagtggccggccaggcagaaagaggagtgcgtggcgctggcagcgcccatgaggaacaggacagcccctttcagatcgcgggccaatgcccacacgtgggcctctaaagggcgatgtgaaaggggaagcccagcccccaggcctctgaggccttctgcgcagttgggtagggagctttacccctaacgcccgggcagcccccagccctccaggtcccgagtggcccctcccaggtctcagtgggccctgcccagggtaactctgatgtgcagggtgattggccacacctgagcctcctctgcctcggtttcctcaattgggaagtgggggtggagagcctggcagcctcccgggccgtcaaagggaacaaatgacggctttgcccggggcagcagggagtggtggcgcctcacgccccaggaatgtgtgggtggagaccccgcacaggagccttggacaggcagcgggccaggcctgggggaggagggatgcccaggaaggcaaagctgccctcggtgggcgagggtgggagcccgggcccaggtttcacggctgccctgggtgggtgtggggcatgtgtaggagcccgggcccaggtttcatggcttccctgggtgggtgtggggcgtgggtgggagcctgggcccaggtttcacgggatcccactctgattctcaggtgctgaaacccagggagcactggcccccccagtcgcaggtcagcaggctctggatggtggccacgcagcccagacaggactcccgggagcacaagcctgacccccagtgcagtgtgggcctcgcaaggctgtgagccgtccgtctcagggctgtgggagcacacaggtcagggaggcaggacggggcccagctccaggcacacgcacacccctttctcgcagggtcgactggaacagagctgcccccgggcgctctctggcctggcgaagtgggagctgtcttccctacgcatctgggctggctgcctgctgctgatggaagagctgctcctcctgacctggggccacagaagccccctccctgcccctgaaacccctcccagcatgtcgtgagctcttatccccagtacggaatctgcctccgctatgaacacctgcaaaggtttgtgtgctgaacggaggtgtgcgcggcggtcatctctggtctctccacagagtgggttttctatcgtgactcgcggtggaatcggaccttcacgcacacagaattcagcaaggctgccaggtgtaagcgtcaacttacaaatgtcaagaagggattaagggccttttaaaaactcccttccgcagagaacaactgaaaaattccagacactcttgtagcaaaccagttacccaagggctctggggaggggacagaaggcagccggcttgggcgggaactcacaggtaaagggagaggccagctccgagtggcgttccctttgtgtccacacagctttgctctgaaggagccgcaggttggctgcggggctgtgaagtggcccaggctgccacggacacccacaactttcccggccaaaggccaaaggaaaccaaggaaggagcccagaatactcagggcccagagctcgaggagaggcctgagccggaggagccaaggaggcgcccacgtgcccagctgagccctgaactgaaggagccgaggagggtccaggaagagctcggagggccccgtagacacggctgagccctgaacaggagcctcagaggggcccatgtgcccggctaagctctgaaccagccgactgcaagctgcggacaatgatgaaaacgcgctgtggccagcctgggctcacccttcagccagcaccgtgggaggccgatgcgggagggtccgttgaggccagaagttcaagaccagcctgggcaacgtagtgacacctcatctctataaagaatctttaaatgaggccctgtgtggtggcgcacgcctgtcatcccagcactttggtaggccgaggtgggcggatcacctgaggtcaggagttcgagaccagcctggccaacatggaggaaccccgtttctactaaaaatatgaaaattaactgggcgtggtggcacatgcctgtaatcctagttactcaggaggctgaggcagaagaatcacttgaacccaggaggtaggggttgcagtgagtcgagatcacgccactgcactccagcctgggcaacagagcaagaccctgtctcaaaaaaaaaaaaaaaaaaaaaaaaaatgccgggcgcagtgactcacgcctgtaatcccagcacttttggaggccgaggcaggcagatcatgaggtcaggagatcgagaccatcttggctaacacggtgaaa

SEQ ID NO: 1243095 - DNA, 4001 bp, Homo sapiens
acagtcccccaggcacaggggtcgggactccaccagggagcccggccttccacatctttccctgagacccggctgcttggccggtcagaccacccatcccacagacatccccactgtgtcctgagccccatcactccctggctggatctccagctccagtcacctctgggggcagagactgctgctgagacgtggccaccacaggcactccagggagaaggcaggggcaggcaaagccttgctgggggcctggcccccaaggcccctgggccgtccccacctcaccagcagccccatcaagtacgcaccgaggctgaagagcaggaacaggaggctgccgagggcgggggtcccacaggaccccaacaggggtcgagccgttggcaaggccatggtctgtgtctgtggagggcagtgactcaggatgggaccccctgctcccaccccacgcctctgtcctgggccagcctggggccacatgggcccaggaggggctcccagagcaaacttctgtggtacctgcagcttgtgtccgcaccctggccctgccctccagccactgagccctctgtcccctggactggctcctcctgtccaggggaggggctgggtctgagatcccggtccccagcccagacagcccaggagtcagttggcgcccacccctctcccagaagggcagggcagtgtgagcagagcttagatcaagcaaccggggccgccgcccacttgggctggcctgagtctccccactctcgcacaggaggacgagcagccccgtcgcctggatgtggctcccttccctctcccctgccctcagctgcaggtgcctgggctttgtgaacaccccaggctctgccaggcagacaacacccttgaggcaggaggggcactgcgggcacagaggccaccgccccttcccacccagcagcgtctttttgggccacttggcctctctgagcccattttcaggtgcagtccaggtggggcggggctgggccagtgagcagcctggggagccccttgtactctctagggtggggcctgtgggccactgtggggtggggaagtgggtggggagaccctccctgaacaagaattgtcctcctggggtaggggtggggctcgcagaagagggaactggcttctacactcacccctttcagggaggccaccatggcggagtagaatagagctgcctcctgaaaaccttggcccaggcccggtgggtccacccacagctcagaaatgggggtcacacgctcatgctcagcagccccatccacaggcagagcctgcctggtcggcccggccactggggaatgtcgcggggaggcacacagcctccgggtgacagactctactcccccaggccccagaggaagtggggaggcccctgaggctctgaacaccttgagaaggtggaagaaaacagaccccccccacagccagaaaatgggcagtgagtgggacccccagcccttggggtgcgtgaagccaggagggaaacgtggccatcggatcacaggggacctgggcactccccaccccagctccatgtgacccaaggacctcagcacctgggatgggggctccccgagagcccggcccttcctgctctgaggggcctctgcaggccatggggggccctggaatctgcatcctttacacctgcaggagagctgggctggggccgtggaggcacctgcactgccttaggactgccgcttccaaacaaatgggtctgcgtgtgccctgcggggtgaaatctgcgtccagctgaagcctgaccatcgctctggtgctggaagcccggcctggggcggccccagttctccagatggaaggtgcagattccatccacaccacaacaggaagagctcaaaggttgttacttacagatcccagggagggaggcaccgtgggtccaccggtagctctctgtccgcgcgtcacagcagacgggagtggccggccaggcagaaagaggagtgcgtggcgctggcagcgcccatgaggaacaggacagcccctttcagatcgcgggccaatgcccacacgtgggcctctaaagggcgatgtgaaaggggaagcccagcccccaggcctctgaggccttctgcgcagttgggtagggagctttacccctaacgcccgggcagcccccagccctccaggtcccgagtggcccctcccaggtctcagtgggccctgcccagggtaactctgatgtgcagggtgattggccacacctgagcctcctctgcctcggtttcctcaattgggaagtgggggtggagagcctggcagcctcccgggccgtcaaagggaacaaatgacggctttgcccggggcagcagggagtggtggcgcctcacgccccaggaatgtgtgggtggagaccccgcacaggagccttggacaggcagcgggccaggcctgggggaggagggatgcccaggaaggcaaagctgccctcggtgggcgagggtgggagcccgggcccaggtttcacggctgccctgggtgggtgtggggcatgtgtaggagcccgggcccaggtttcatggcttccctgggtgggtgtggggcgtgggtgggagcctgggcccaggtttcacgggatcccactctgattctcaggtgctgaaacccagggagcactggcccccccagtcgcaggtcagcaggctctggatggtggccacgcagcccagacaggactcccgggagcacaagcctgacccccagtgcagtgtgggcctcgcaaggctgtgagccgtccgtctcagggctgtgggagcacacaggtcagggaggcaggacggggcccagctccaggcacacgcacacccctttctcgcagggtcgactggaacagagctgcccccgggcgctctctggcctggcgaagtgggagctgtcttccctacgcatctgggctggctgcctgctgctgatggaagagctgctcctcctgacctggggccacagaagccccctccctgcccctgaaacccctcccagcatgtcgtgagctcttatccccagtacggaatctgcctccgctatgaacacctgcaaaggtttgtgtgctgaacggaggtgtgcgcggcggtcatctctggtctctccacagagtgggttttctatcgtgactcgcggtggaatcggaccttcacgcacacagaattcagcaaggctgccaggtgtaagcgtcaacttacaaatgtcaagaagggattaagggccttttaaaaactcccttccgcagagaacaactgaaaaattccagacactcttgtagcaaaccagttacccaagggctctggggaggggacagaaggcagccggcttgggcgggaactcacaggtaaagggagaggccagctccgagtggcgttccctttgtgtccacacagctttgctctgaaggagccgcaggttggctgcggggctgtgaagtggcccaggctgccacggacacccacaactttcccggccaaaggccaaaggaaaccaaggaaggagcccagaatactcagggcccagagctcgaggagaggcctgagccggaggagccaaggaggcgcccacgtgcccagctgagccctgaactgaaggagccgaggagggtccaggaagagctcggagggccccgtagacacggctgagccctgaacaggagcctcagaggggcccatgtgcccggctaagctctgaaccagccgactgcaagctgcggacaatgatgaaaacgcgctgtggccagcctgggctcacccttcagccagcaccgtgggaggccgatgcgggagggtccgttgaggccagaagttcaagaccagcctgggcaacgtagtgacacctcatctctataaagaatctttaaatgaggccctgtgtggtggcgcacgcctgtcatcccagcactttggtaggccgaggtgggcggatcacctgaggtcaggagttcgagaccagcctggccaacatggagg

SEQ ID NO: 1243096 - DNA, 4001 bp, Homo sapiens
gccacgctgtcggcgtgaatggtctcggtgaacgccggccatggagacgagtgtgcatacttcgagcggctggagaacagctcatagccacacttggcacacacgtaaacgcctgtggtggaaggagaggcaaatgtggagtcatcagctcccgcctttccggggtcaagctcccaaatccaccaacccaggcaaagacagcgctgcccccgttccgagggtaggctgtgctccttccccaggcacccgccacgggaggcgctgtgctgagctcacgtttagtagatgtgccagagaccaggggagtcacctttcacaattatctccttgattcttctcatagccccgtgacggggcatatcctaacatttccatctttgcttggtgatgcagacactcagctacaagtgtgtgcagcgtgaaggaacctgggtagtccaatgaggacacggagctccccctcgcccccctagttcccccaggaacatagagggcaggggccctgatgtggcccaaccacctggtccctctcctttctcaagtggtcctccctgctgcccaacgaggccctaagctggatacccaggcactgctctgctctccaggcaggaagagaacagtcccagagaaaaggcctccaggccacacaggagcccaggaagaaagagggctggggacaacagatttcagcctacccacaaaggatccctttggagtggagggggtgggaaagttgcaaaactgacttgcagaactgttttaaggactgaaaacaggaacctccaggggtgctgagtcacctctcacccatcacctggggacagcctcccctggagactgtaaactacccagccttttccaggaactggagaaaaaagcaaagagaagccagcagctgctgtggaagtggagtttctggcttggcagagcagcctgaggacaactgggatctaaagccagagagtcttgctgggggaggctttgccgggatggtcctgtgtcacagcccaacccgctacaggggtgccacccagcagatccgcccaaggagaccagtgcactcagacttgcctgtggatgtgtttttaccaaattagtccactaccaggcgagcccagcccagaagggattcatcagggccagtgtggagggctggccatgccccaaaccaccccatcctgcctgcctggtcaaacttcacgggctgttggcaggtgcctggtggcactcctggttccccaatttggagtccctgggcaggtggggaggcacctgggccggcacattaggatctgaaggggacattctatgcttgccagactcctcccagagatcccggactcgggggaatgggaagggccagggtaacacctgcgggatgacccgcgaaggggcgccccggccacaggagctggccctggacaagaacctggcctctccgaagccccgaccctaacccgaattcccccagcgccatcactttggagtgtagggggtagggaaggggtaccacccccacgtatcccgatcccttagacccacccccgaaacggcacgttcacactcgaggcctgccccctccaggacggtgagccccaaggccccctctcctcgggtaccccactctcctcgcccccaggctccccactcctccgcagtccttttgacccctgttcgcttctccccggcagccacattcgcccccattcccggcttgggagagacatcacccccggacgacggcggcgcccccgctaatgcgcgccccccgccgcgctgccctcccagcgagaggccgcaggaccaaccaggttcaaagtgattctggaaaacctcgcccccgaagaagctgcagaacgacatggcgccaccggaaccgcagcgcgcttgccgctgccaactgaccaaaggctgccgacccgacgaccgccggtacccgcgtccacctccccgcccctcccgaggaccaatcgctccccggagggcgaatcccggcttccgcctccgggaggccccgcccctcctcagggctggtccaatacgatcttcccagctggccccgcccacgttgactccttgggaccactcctgggccacttccccaaggccccgccccccggtgccagtccaatcgcatctccccagcaggccccgcccatggaaactcccagggaccacccctaggccgcttccccaaggccccgcccctgccgcccctcgcgccctggtggctaggggcgcacatggggcctggccaggtgggcgacggcgcgaatccgtagggtcgtgtccccccagtccagtccctggtactaagcccggagctgccggaggtcatgcagcctttccgcgcccaggtgaaaccgcctttgcaaaatgatgactgaaacagtgaaagagatctaactcagccgactctatcttgcttctaacctccaagctgtccttattcatccctgctggtaggttgaaataactttgggagaaactcagtttatagttttttgtttttttctttctttctttctttcttttgagacggagtcttactctgtttccaggctggagtgcagtagcgcgatctcagctcactgcaacctccaactcgctggttcaagcaattctcctgcctcagcctcccgagtagatgggattacaatcatgcgccaccacgcccagctaattttgtatttttaatagagacgaggtttctcgatgttggccaggctggtcttgaactcccgacctcaggtgatccgcccatcttggcctcccaaagtgctgggattacaggcgtgagccaccgcgcccagccagtttatagtttaaaacaaagacagtaacagccctttcccaaagcagaccacctccttgcctggggactagattgcatttttaggactaacattagccacaatattgggaattatggtttaggagtcgtgcatctggaggctacaagattctgaccctccctaagctgcccctaagatcagtgcttgagatattttgccgaccctgcaacttgatggatctgctggcaccaaccagattgataaactggctcatctgatcttgtggccaccacccaggagctgactcagcgcaagaagacagctgactccctgtgatttcctccctgaccaatcggctctcctggctcactggctctccccacccgccaagttatccttaaaaactctgctccccggcactccagcagcctgggcgacaagatcaagactctctcaaaaaaaaaaaaaaaaaaaacctctgctccgcaaatgctcaaagagatcgatttgagtaataataaaacataaaactccggtctcccgcacagccagctctgtgtgaattactctttctctattgcaattcccctgtcttaatgaatcggctttgtctaggcagcaggcaaggtgaaccccttgggcggttacacagcgctctgagacctcgcaggaagagtcgcctccggcctttgttagacattggggcagacagtgcggtgcgcttcagggttcatccaccccacacagcctacaagtctcccgaggtctccggcgtttccttctccagatgcttcttttgggggccctggttgagagggtggtgcaggaggagccttagtcactctggccagaaacacgccctcccccagccaggctctagatcactcagggccggccctactgcccccctaaggctgcttcctcccccaccttctcttctaaagaatcagtgcccagggatagacccttaagagtctctcctgcaggccgggcacggtggctcatgtctgtaatcccagcactttgggaggccgaggcggtcggatcatgaggtcaggagatagagaccatcctggctaatacgatgaaaccccatccctactaaaaatacagaaaattagcctggcgtggtggcacgtgcctgtagtaccaacgactgggtaggctgaatctggagaattgcttgaacccaggaggtggaggtgg

SEQ ID NO: 1243097 - DNA, 4001 bp, Homo sapiens
cagcatgacctagggagaaacttccgaagattcagagacaagtcacaacatggagctctcagagataccaagagtcacatcagtgaccctggacaggccaagactgatggttccatgtggggatgtcctggctggtggtgttgaaggtgtgtgacccacatactggggccagtctgtgaactgtttccagtctgaaatatacatcctagaacaaatgtgtagtgtaattttatttttcctatcttgtcttccatatatttactgaaattgtcctgttcaatataaaaaatggatttggtgttttttttttgtcatactaatagattttatcttaccaaagcttaagtctgtgacagattcctgtggcattatatcatctgtcatcacgctcttacatttttatttaagaaactgacctgaggcaggtgcctgatttgccttaaggcactcagtgtgtaagataataggacaaggtcccagcacccaggtctctggactctcaatgcaatccaccatcccagctctgttgggtatggggtcccttatttccaaggcacacaaagaaaaccagagccagcattaagtcagcaacttttattatcattcacatatttcattaaaaaaaatacagtaaatgggtcagggttgtatggaaaaaaaattccaagtttgtgcaggtcactctttctatatcttcgagcagggctgtccggacatcaggcacagcagctgcacttctctgatgcccctttgcagatgcagccctgggcacacttggcacagctcatggggcagcaggagcagcagcctggggaagaagggagagtgagaggtcagaccagacttgaccggggacttccctgcccccagagaagcctggcccaagctctgtccccagccccagaggacacttagttcaggatggcatgcactgtcggagatgggagataagtggtggatctttcgagtgagggtcttctgtgaaaagcttatctccatctgagccccagacctggcagaaggctggaaaggcagtgactggggttatgaaggacaaaggaaggctggctccccagaaccacacacttaggggaggaaagtccttaggtgtcatgtctgtgcttggcaggctggtgcactcttggcctcagtttgtctattttaagaacgaaacttgggaatccatcacgtctaaagatctggctctgatcctgaatcagttgctggggaaggggatgtgggaaatggatcattggcctactcctccatgcccagctctggtttcctgcctctgacttggctcagccccagattcctggagatggccccacactcactcttcttgcaggaggtgcatttgcactctttgcatttgcaggagccagtgcaggtgcaggagccacctgcaaggaagagaaaaaggcagtgaattttatacagaagataacagcagttggtcaacaaatgctgccagctgagtgcattgccaggcctgatagatagctcctgtccaactcagggcaccatgaagcctaatcttacttctatctgtagaggctaggatgggctttatgtccttaatcccgaaaaaccaataactcctgtctcccatccaccccaggaactgcgcagagtactggggctcagcctagcagtccccgactacctgggtgacatggagcaggagaattatgagcctgagtcctctcgcctctgaaatgggaggcattagaataggaatgttctagggatgatgaaggcgctgagtggaaaagcactagatcaatgaaataaatgactccacttagctagaactcaaaaaacacctctactcctagggacatctatcctgtggcggggaaataggtatcctaaggaccagaaacctagcatcccttaccagtggcgcaggagcagttggggtccatttcgagccgcggtgaggttggagatcccaagcaagaagttgagaggctataaggcgcacgtggaaggcttggtagggcccagcagccagcggctgcttttatggtcaggggaaagagggccggacgcaaaggacccgccctgcgcctgcgcccgccccgctgagtccgcccagccgagtccgccccgcccgaggtgatgacctggactgggctttgcgcagcagaaaggcaaggcgcacagtccactgagctcccctgggtgcggaccacgggaccaccccctccccgctttggggccgctaacgcgggagtgagtttacgcccggggtacggggcgtccccgaggtcccggtcgcctttcccagtttccccgaagttgccttccaccctagtccccgcgcgttccgggaacccagccttggcgtttcggtcgcctccaccccacccctctcacggttttcagctcggcctgtcccgaagtctgagtgcagccacagcctcctgctcctgtccccggatcggcgtagtgcagagcgtggagcgtgcggtagcgagcgagttgtgtgcagagcaaccgccaccgatgtgattttcgtttctcctcgctgtcgccttgcctgtccctgtccacacctaggtccctcggacccactactccgtacacagtaacacgggaacacgggtcggcctctcactctcgtccattctcctcgcctgagaggatgtgggggcacatttgtccaggtcctcctttgcaaataaatctccgtgctccccacagcctagccggccaccccactaccgtctggcagttctggacatgtgggatatccccaaaaaggagatgacttcatgtgatgtgctgaccctgctttaaactaaaaagcaagatgggggaggtggcgggaagctgtagtccaagctacttaggaggctgaggcgggagcatcacttaagcccaggacttccagtcctgcctagtccacatagcaagtcaacttctctaaaaaaataaaattaaaaagcaagacatccagttatttccctaaagtacacctgactaaggcataacattgagtctataccagtccctttctaatcactttcattcacagccaccactggagtgacctaccagaggatgaacacactctttaccatgggatggcaccaagtcattctttagggatgtgtcctcatgaccccaaaagctccctctaggccccacctgcaatagtggaggacacatttcaacatgagatttggcagtgacaaaatatctaaatcatagcacacatgtaggattcaagaaactaagaagttgggttccagcactatagccacttttaagcctaaaatccaatgtggatctcaagttgtggaggaaaatcagaaaataaaaataaggaatgaagtttctgtgccacgtttggcatgagactggaagcgatcatgtatggtccccacccatatggtgtggcaaagtgcagtaccatttcacagaagtgtgaactcagtgaggtaacctgactggcctgaaggtgttcacattattagtgactcacatttccatccagagcctggtctctaagcttgcggtttaacctccaccccagtccattttttccaaggcacacaaagaagaacagagtaagattcaagtcaaaattgttttattgtcactcacatatttaatataaaaagaaatgcagcaaatggctcagtattgtataaaaaaaaaatccaggttgtgcaggttgttctattaacatctgggagaagagctgttcccacatcaggcacagcagctgcacttctccgacgtccctttgcagatgcagccgtgggcacacttggctcagcccatggggcagcagaagcagcagcctggggaagaaggggagagtgagaggtggcagcagacttcaccaggcacctccctgccctaatagcaagcgtggctccagctcagacgccagacccagaggaagcttttttcgtctggcatagctctgttctgaaaccatagatggtacagttggggtttgcatcccaagagaaaaatgctgttct

SEQ ID NO: 1243098 - DNA, 4001 bp, Homo sapiens
aggccaagcctgatggttcctgtggggacgtgctgggcagtgctgctcaaggtgtgtgagccacaccctgggaccagtctgctgattccagtctgcaatgcacataagcaaaatatgggcaaagtttgtgaatctctcattttcctgttatttctgtgtatacttattgaaatgtttcctgttgaatcttaaaatggtttctgtattttgtgtttgatttcattatatctgtaattaatattattttatttacaaaggtttaggcctgggatggattggaattagaaaatgtttcttcactgtggagttcgagaagccccgtgtagagctcaagcaactgaggagttggattccaccccgtcatcactttcaagcctaaaatctgatgagggactgaagctgagcagggaaatcagaaaataaaaatgagaaatggagaagtttctctgccacatttgcacatttgacatgacccgaggcgatcatgcatgtccccccaaccccgtcatgtgatcccacacagtgcagttccattttacagaagatggagctcagggaggtaaccgggcttgcctgaaggtattcagactataggggctcacatttccatccagaaccaggtctttaaattcccagttcaatcccccactccaactgttatttccaagccacagaaaggaaaaggagagtcagaatcaagtcaaaagtgttttattgtctttcacatattgaatagaaaaaagaatgtagcaaaccggtcagggtagttaaaaaaaaaaatccaggttagtactggttgctctatttatgtctgggagcagggctctcccaacatcaggcacagcagcggcacttctctgatgagcctttgcagacacagccctgggcacacttggcacagcccacggggcagcaagagcagcagcctggggaagaaggggagagtgagaggtcacagctgacttgaccaggaacctctctgtcccaacagcaagcctggctgaagttcagcccccacacccagaggatgcatttttaggctggcacagctgtgttctgatggtacatttgaggtttgtgtcccaatagaaaaagtctgccctgacccatctgagctcagagcagaaagcctggagagggaatgacacagccaacaggggcaaaggaagaccagttcccaaaagcatgcactcagggccagccttgtgttcccttccaagcttagccacagccccagattcctggagatgatcccacactcacacttcttgcaggaggtacatttgcactctttgcacttgcaggagccggcgcaggcacaggagccacctgcaaggaagcgaaaaaggcagtgggcagtgagtaagatgcagaaggtacagcagtgagtccatgagtgtccagtgcgccatcctctgtgcagggccagccatcagagctcctttcccactcagagcggaggaacagaagccccatgtcctctccactcaggctgggaagggcaagcacccttctttatataccccatcaggaaggtcccagctccacacacagtccaggaagactggggctggaggccaaaaccttctgtgttgaactctgaagaggctatgtcccccacctctcacccttcccggctgctcagagttagagcagagcactggggcgcagccagcagccccctgactaggtgggtgacatggagcaggacagcctcgatcctcagaatccccaactctgacttacaagcacagaggagggagatgctcacaggagcttgggcaagaggaaagcactggcaaaagtaaacgagttcccttcaactcacatctcataatgcaaccttctctaacccagggacactgtgtacagtggccgggaatgggcatctcaaggcccagagccaggcgtcccttacctgtggtgcaggagcagttgggatccatttggagccaagacaagcctggagttcctaggcaagatatgagaagtcagggcaggaggaaggtgtgatggagcccaggagctggctgctccctttatagtcgggggaggtggtggggtgcagaggccccgccctggcccttgcactcacccctgctgagtctgcactgcccgtggtccatgcctgggccatgagcagtgacctggcctgactcaggactgttatcatcgttaccttccctggataccgtgtgcaaccccagccccgtgttcaactttcaggatcagcagcagcgggagcacagggagagagttgtgtgcaaaggactggtggaggctgtgacctttggatttcccaccttgcctgagtatgtccccacctcggtccctcagtcacatttctcctgtgcacagcaacaggacagagacacagggctctgtctccctcccttccattctccactcttgagaagctgaatggggatatttgtccaggtcctcctttgcataaatctctccagggtctccccacagcctagctggccgccctacgacaggatggccattcggaaaatgtgggatgtccccagaagagggatcattgaaggtgacatgcagatcctggatgaaattagaaagcaatttccttccatattcctattattgtacataacattaatccatgttaggccctgtttaatcactttcaatctttgaaccctcacagcaacccaaaagggacacacattctatttatgaacccatattcctaatctggacaatgacagtacaaggagttcaagccactagcccgtggtcagagggctaggaaatgatactgctgggtctgagtcctgtcagcttcccaagggagagagggcactgatgaagcttccgtctgacctaggtatattcgtctctttactgtttgaaatctttaaacaaaaccaagcatcaaggtcagtcctggaagcaaaacagggatgcagaggggtatgaataaggagaatttcatggcaaccttctatgtctggaagttaaattgattcttttttcagtagcgctaatgagtttgcttttcatataaatatatctaaggaaataggaatcatttaaaagaaaaatgttgagtcacatattggtgcaggtggtagcagaactggcaggcgtctttccatttctgtgatggggacagggactgtcttgctcatggctttatatttctggtgtgaatccttattttgtggcagagtgcaggaccctgtcaggaccacaggtcaatgcttatgtggctgatgagaaagacagaggacacacagggagggacaccaggcctggctcttttgtctggagtaaaaatgtcaactatgctatcgtctgagtccatttgggctgctaccaccagataccttaaactgggtaacttaaaacagcaaaaatatatttctctcagttctggagtcatggaagtccaaggtcaaggcaccagcatatttggagtcttgtgagggccccattcctcatggatgtctctttcttgctggtcctcacatggtggaaagagttaaacaagctccctcaggcctctcttattaaggcactaatcccattcatgagcgctttgcctgcatgccatagtcacttcccaaatgcaccacctcttaaaagcaacagagtgaaagttagatttcaacaaatgaatattggagggacacaagcattcaggccatagcagccgtgaataataataacaaaatagtagttaatattatagaccactggtcatgtacaaggcaccattctgagttctttacatccattaaatcattggcctctacgagtccaaccctattacagtcatgtgtcacttaatgagaggtatgcattctaagaaatatgtctttaggcaatttcgtcattgtgcaaacattgtagaatgtactcacacacacctagctgatactggctgctacacagcttggctgtctgctttagcctattgttcttaggcttcaaacctatacactattatgcaattttaacacaatggtaagtat

SEQ ID NO: 1243099 - DNA, 4001 bp, Homo sapiens
ctatgttggtcagcctggtctcgaactcctgacctcgggtgatccgcccgcctcagcctcccaaagtgctgggattacgggcatgagccaccatgcccggtgtttgttttttttttgagagggagtctcactctgtcacccaggctggagtgccctggcgggatcccagctcactgcaagccccgcctcccaggttcatgccattatcctgactcagcctcctgagtagctgcgcccggcctgtagccgattttaagcctaaaatccaatgtggatctgaagttgagcaggaaaatcagaaaataaaaaggagggaaggagtttctgtgccacattttacatgagactggaagcgatcatatatgcccccccaccaatatggtgtgcacagtggaatgccatcttacagaagtgtaaactcagtgaggtaacctggctggcctgaaagtgttcacattgctagtggctcacatttccatccagagcctggtctctaaaatcccggttcaacccccacccagtccgttttttccaagacacacaaagaagaacagagtaagattaaagtcaaaattgtttttattgtcagtcacatatttagtataaaaagaaatgcagcaaatggctcagtgttgtatttttaaaaaaatccaggttgtgcaggttgttctatttacatctgggagaagagctgttcccacatcaggcacagcagctgcacttctccgatgcccctttgcagacgcagccctgggcacacttggcacagcccacggggcagcaggaacagcagcctggggaagaaggggagagtgagaggtggcagtagacttgaccgggcacctccctgccctaatagcaagcctggctcgagctcagaacccagacccagaggatgctttttttcgtctggcacagctctgttctgaaaccatagggggtacagttggggtttgtgtcccacgagaaaaatgctgtcctgccccatctgaatttagggcagaaagcctggagagggaatgacacgggcaatgagggcaaagaaagcccagttccccagaaggatgcactcagggccagccttgagttccctcccaacctgagccacagccccagattcctggagatggccccgcactcactcttcttgcaggaggtgcatttgcactctttgcacttgcaggagccggcgcacgtgcaggagccacctacaaggaagaggaaaacgcagtgggcagtgagtgagatgcagaaggtacagcagtgggtcagtgagtctccagtgccccctcctctgtgcagggccagccctcagagctcctttcccactcaggacagaggaacagaagccccatgtcctctccactaacgctgggaagggcaaggaccctcctgttttaccgcaccaggaaggtcccacgtgcacatacaacccaggaatattgagactgcgagccagaaccttctgtcctgaactctgaagagtcaatgtttccagcacccccaaccacactgattgctcagagcctggacagagcactggggcccagccagcaggcccatgaccaactgggtgatgtggagcagttcagccttgagcctcagtattcttaactctgacgtagaggcccagggatgagggcaatgctctcaggggcgtgatcaggaagaaagcatctaacgaagtactggagtccccgtcgctcagaacttaaaatgcgacttcctgaaacccagagaccctctgtaatagggctgggaaatggggattccagggcgcagagcttcccttaccagtggcgcaagagcagttggggtccatttcgagcaaaggggatgctggagctcacaccagtgagacgaacaagcagtcaggcagttggaaagcagaatggagccctgcaactggctgctctatttatagacggaggtcgggccgggcgcagaggcccagctccgcgcctgcacccggcccgctgagtccgcaccgcccgcgttcctgggctgggctgtgcgccgcagaagggccgggcgcaccaccccctgagctctgcgcggtgggcaccgcgggacctcccctttggagcccgttcgctcgggtggggctgtgcccccgcaggtacgcggtgttcccgaagtccaggccgcctttcccagtttccccgaggttgccttccaccctcctcccagcgtgttccgggaccccagccttggcgtcgcgggcgtctccaccccacccctagctccgcggttttcagctcgacttgtcccagagtccgtgtgcagcccacctgctgccgtcccgggatccgctgagtgcggagcggggaacgtgcggtagcgagcgagttgtgttcagaacatccgccaccgatgtggctttcatttctcttcgtcccccgccttgcctgtccctgtccacacctaggttcctcggtcccgcacctccttacatagcaacacggggaacacggatcggcctctctctcctgtccattctcctcgcctgagaggatgtgtgggcacatttgtccaggtcctcctttgcacttaagtctccatgctacccctagccttagggccaccacaataccggatggcagttctggacatgcggggtgtccccaaagagagattacttcagatgatatgcagaccctgctttaaattaaaaagcaaggtgggcgaggtggcgcctactgctgtagtcccagctacttgggaggatcacttgagcctaggagttcgagtccagcctgggcaacatagggagtgaacgtctctaaaaaaataaaattaaaaagcaagataggccgggagcggtggctcacacctgttatcccagcactttgggaggccgaggcgggcggatcacgaggtcaggagatggagaccatcctggctaacatggtgaaaccccgcctctactaaaaatacaaaaaattagctggacttggtggcgggtgcctgtagtctcagctactggggaggctgaagcaggagaatggcgtcaacccgggaagtggagcttgcagtgagccaagatcgcgccactgcacgtcaaaaaaaaaaaaaaaaaaaaaaaaacagaaaaagaagaaagagaaaaaaagaaaaagaaagaaaggaaaaaaagaaagcaagataaatggttatttctcttcaatattgctgatctcttcaatattcccggctgaatgcacaacattgagtctgtgccgatctctttttaaccacttgctttgtgatcttaaagaaaaatacgatttatgaacttgtattactaaacagacagctactacagagttaaagtaattggttcaagtcacagagctgaaaaattgtcactgatttgaatccagccaacccctcaagagaaagtgtccatggatcaagccttcctttggcccaggtatgtcatcagcacttctctcttgctggaaatcttctaaacaatggcaagccacaagctcaaccatgggcagtggcaaaagcaatccataagtgtaatatatatatatatatatatatatatatatatatacacacacacacacacacacacacacacacacacatttatagttttcctagctatcttgtatgtatggataggaccgattttcatttttggtgatggaaaagagtttgcttttcatacaaatatatttaagaaaatattaatcatttaaatataaaatgataagtaaagtgtgcaggtggtaacagaaatgccagtcattttatatctgacatgaggcagagaatcttgctcgtagcttaataaccctgtgttgatgatgattttgtgggagcagtgaatgactctctttggaccacatgacacatgttcatgtggcagatgacaatgagagcatacacagctaggcactccaggcctggcttctttgtctgtaagtaaatatcccccatgcgatgtatgattattatttttttttaaaaaaagcaatagctaatattgtagaatgcttgccaagcag

SEQ ID NO: 1243100 - DNA, 4001 bp, Homo sapiens
accacaccttgttaagtgtttatttatttatttagagacaagggtctccctatgttgccaaggctggtctcaaactcctggtgtcaagtgatcctcccttttgagcctctcaaagtatggggattataggtgtgagtcatcctgctcggccagattttgtatattgaatttaatttcatgacttccatcattagtattatttcatttaccaaggtttagatgtggaatggataggaattaaaaacccctccttcaccctggagtttgagaagcccggtgtagaattcaaataactaaggggtttgattccattccgtgtagtcactttctaacctgaaatccaaagaggaattgaagttgggcagagaaatcagagaaggaacaggaggcattgagaagtttctgtgccacatttgagaatgaaggtgatcctgtattctggatccccaccaatgacctgatgaagtgttattccattctacagaagaggaagcacagtgaggcagcctggcttgccttaatgcactctgattgttagggactcagatttccatttagagcccaggagtctgcaaccctagttcgatcccccaccccagtctctgatttctgaagcacataagggaaactgaagtcagaatcaggtctaaagtgtttaattatcactcacatatttcacaggaaaaggaatgtagcaaatgggtcaaggtggtataaaaaaaaaatccaggtttgtacatgtctctctgtttacatctgggagaaaggttgtcctggcatcagtcgcagcagctgcacttctctgacgcccctttgcaaacacagccctgggcacacttgctacagcccacggggcagcaggagcagcagcctggggaagaagaggagcatgagaggtcacagccaacttgcccagggacctccctccccaacagaggcccccaacagagcctccagccacaaaggaccctcagttcaggagggtatggctttgtcaggagacaactgggaaatatctggggtgggtcttcctatgagaaagctgcccaggcgccctgcacagggcagaagactagaaaggcagtgacaacctacggggacaaaggaaggccagttccccagaagcatgcactcagggccagccttgggttccatcccaaccttagccacagccccagaccatggagatggcctcacactcactcttcttgcaggaggtgcatttgcactctttgcacttgcaggaaccagcgcaggtgcaggagacacctgcgagaaagagaaaaaaaagccagtgagcggcgagtgacctgcaggaggtacagcagtgagttaatgagtctccattgccccctcctctgtgcggggccagccctcagagctcctttcccactcagagcagaggaagagaagccccatgtcctctcccttcatgctgggaaggccaagcagcctcctgtttgcactccaaaggaaagtcccaggctccaggcacagcctgggaagacggcgacttcgactttctgtcctgaaccccgaagaggcaatgtcccctgcctcctatctaatcctgctgctcaaagcctggtcagagcactggggctcagccaacagccctgggacaaaccgcatgacgtggagcaggacagccttgagcctcagtaccctcaacgctgacacagaggcacagagaggaaggaaatgctctcaggatcttggccaagaggaaagcactggactaagtcaaggagtcccctacagttgagatctcaaaatacgaccttctcaaacccaggaacactctctatggtgtctgggaatcgagcatccccaggcacggaacccggcgttccttaccagcggcgcaggagcagttggggtccattgcaagccgaggagagactggactttccaagagagaagcgaagaagcagtggggcaggtggaaggcgtggtggaccccaacagccggccgctgctttgatagtcaggggagggggccgggcgcagagaccccgccccgtctttgcacccgccccgcctgtcagcgctgcgggaggtcctgggtgggctgtgtgcagcagaagggccgggcgcaaggtcccctgagcgcagctcgctgcacaccgcggaccgtccctttggagtccgctcaagcgggaggcgctttgtgcctgggtgagcggcttccctgccctcctgcccgcccttcccagtttcgccaagattgcctgctacacccgccccttggggttccgggtacctggagatcctggccttcgccccgccccccggccccgccccggtccttcgtcaacagctaagcctttcctggagtcccagtgcaaccccagtctcttgcgccactgtctagattggcgggagcagggagcctagcaagggagtagtgtgcaaaggacaggccgaggatgtgaccttcggatctctagcattgcctgtccctgtcaccccacctcagtcctttggccatgtttctcctgcgcacagcaacacggaagacacagggctctgcccccctctcttccattcttcactcttgagaggctgaatgggcacatttgtctgggtcctcctttgcataaatctctccggggtctccccacagcctcgacgggcaccccactataggatggcagtttggaaaatatgggatgcccccagaagcgagatcactgaaggcggagtttgcggtgagccgagatcgcaccatttttgcactccatcctgggcaacaagagtgaaactccctctcaaaaaaaaaaaaaaaaaaaaaaaaaaaaaaaaaagaaaagaaaagaaagaaaagaaaaagaaaaagaaaaacttaacataagaagtaagaaagacaagtggttaattcccttcaatattactagcaattgcttaaggttgagtctgtgccagtctccttttaatcattttcattgtttgaacctttacaacaattgtaaagggaaatactaggcatgaacccatattaataaatggacacctacaacaaagaaagttcaagcaacgtgctcatcgtcacagagctaaaaagctgtgcactgatttgaatccagccagcctctcaggagaaattctctgaaataaggcccagctatgtcttctctattgctggacttccctatggcttgaaatcttttaaataataacaagtcaggccgggcaccgtggctcacgcctgtaatcccagcactttgggaggctgaggtgggcagatcactgcaggccagaagttcaagaccagcctggccaacatggcaaaaccccatctctactaaaaatacaaaaattagccaggcgtggtggcacgagcctgtaatcccagctacttgggaggctgaggttgcagtgagccaaaattgtgccactgcactcgagcctgggtgacagagagagactctgtctcaaaatagtaataataataataataatgacaaagtcgccagctcaaccatgggcaatgacaaaagcaatccataagtgtaataagcatatatatatacatacatacacatgcacacatatatacttttctggctatcttctacatatggataagactgattttcatttttggtggtggaagagagtttgctttcataaaaatatatttaagaaagtattaatcatttcaatgtgaaatgataaataaaatgtgcacatggcagcagaaatggctgtcattctatttgtgacatgaggcacagcatcttgctcatagctttttaaccctgtgttgatgacatttttgtgggaacagtgaataactctcaggtccacaggacccgtgtttgagtggtagatgacaatgacagcatacacagctaggcattccaggcctggctgctctgtctgtgaatgaacaaatatcccctatgctatgtgtattgattgttttaaagaagcaatagctaatattgtagactactcaccacttgccaggcatcattccaagtttcttacatgtatta

SEQ ID NO: 1243101 - DNA, 4001 bp, Homo sapiens
agcctgatggttcctcatgagaatgtcctggcctgtgctgctgaaggtgtggtccacagtggggtcagtctgctgtttccagtctccaatgcaactcatccatgaacatatgtgcagagtttgtaaaccttccatttttctgttatttctgtatgtatttattgatttttttgtgtaaaatgtaaaacatgggttctgtattttgtgtttcattatcttcatagttaatattactttatttacaaaggtttaggtctgggatggatagaaaatgaaaactgtcccttcaccgtggagtttgagaagccccgtggaggattcaagtaatttaggcattggaatccacctcctgtggtcactttcaagcctaaaatccgcggaggatctgaacttgggcagggaaacctgagaataaacatgaggaatggagaagtctctgtaccacgtttaatgagtggagctgatcgcgtatgtccccatccccatatcatccagcacagtgcaggtgccttttacagaagatggaggtcagtgatgtaacggggcttgcctgaaggcgctcagactgttcagcactcacatttccatccagagcccagtctaaactcccagttcaatctcccaccccagtccctcattccaaaaacacaacaggaaccagaacgggaatcaagtctaagtgtttaattattattcacatatttcacagaaaaaaaggaatgtagcaaaggggtcaagattgtagcaaaaaacaaaaaatcctggattttacgggtcactctatttgtacttgggagcagggctgtcccgacatcaggcgcagcagctgcacttctccgatgcccctttgcagatgcagccctgggcacacttggcacagcccacagggcagcaggagcagcagcctggggaggaaaggagattgagaggtcagagcagactcgatcagagaactccctgccccaacagaggcctgtctccatccctccagccccagaggacccttagttcatgatggcatggtttttgtcaggagacaactggtggacattggaatgggtcttcctttgagaaagctgccccacctcacataagccctggaaagtgcagaagactagacaggcagtgacaacctacagggacaaaggaaggccggttccccagaagcacgcactcagggacagccttgggttccctcccaaccttagccacagccccagattcctggagatggccccgcactcactcttcttgcaggaggtgcatttgcactctttgcacttgcaggagctggcgcaggtgcaggagacacctgctagaagagaaaaagccagtgaacggtgagtgagatgcagaaggtacagcagtgggtcaatgagtgtccacttcccccttctctgtgcagagccagccctcagagctcctttcccactcagagcagaggaagagaagccccatgtcctctccattcatgctgggaaaaccaagcaccctcctatttctactccaaaggaaagtcccaggctgcagacatggcccaggaagacttcgactttctgtcctgaacctggaagaggcaatgtcccctcctatccaatgtctcctatccaatccggtagctcagagtcaggttagagaattggggctcagccagcagccctgtgaccaaccaggtgacgtggagcaggacagccttgagcctcaggaccctcaactctgacatagaggaacagggaggaggaaaatgccctcaggagcttggccaacaggaaagcactggaccaataaaggagtcccctttacctctgatagcaaaatacgacctcctcaaacccagggacactctctatggtgtctgggaatttggcatcccaaggcacagaacccgggcgtcccttaccagcggcacaggagcagttggggtccattgcaacccgaggcgagactagagttcccaagcgagaagggaagaggcagtgggtgcacgtggaaggcggagtggagcccaacagccagcggctgtttttatagtcaggagacggggccgggcgcagacgccccgccccgcccttgcacccagcccgctgagtccgcaccgcccgcggtcccggcctgggctgtgcgcaggagatgggccaagtgcaaggtcccttgagcgcagctgggcgcacaccgcaggacggcccctttcgcaccggctcgcgagggaggcgctgtgccccccgtgtgcggcttctctcaccctgccaggccttcccagcttccctgaggttgcctgctacacccgccccttggcgttccgcctaccccagtattctggctttcccctcaccttcaccaacgcccaggtctctagtcaatagctaagcctttcctggagtcgagggcaaccccagtcttgtgctccactttctggatctgccaaagcggggagcatagcaagggagtagtgtgcaaagggcaggccaagggtgcgaacttcgcatctctggcagtatccgccctgtccccgttcccacctcagtcctttggtcacgcttctcctgtgctcagtaacacggaagaaacagtgatctgcctctctcttctattctccactcttgaggagctgaatgggcccatttgtccaggtcctcctttgcataaatctctccagggtctccccacagcctagccgggtaccccactacaggatggcagtttggaaagtgtggcaagtccctagaagagggatcattgaaggtgatatgaagatcctgcattaaattagaaagcaagagcgctggttatttttccttccatattcctattactctatgttacacgggtctgtgtttggccctgtttaatcactttctgtctttgaaccctcacagcaaccctaaagggacatgagtccttttcacgaacccgtattcctaatctggacaatgacgaggagttcaagccactagcccagggtcagggagctgggaagtggcactgcttggtgtgaatcctgtcagcttccctaggtagagaggtcagtgatgaagcttctctatggcctaggtatgtttatctcttcactgcttgaaatctttcaacaaaaccaagcattacagtcagtcctggaagcaaaacagagacatagagggatatgaataagtatactttgatgggagggaggcagggtcctgtgtcttccgtgttgctgtgcacaggagaaacgtggccgaagaactgaggtggggacggggacaggaacaggcaatgccagagatctgaaggtcgcatcctcggcatgtcccttgcacactactccctcgctgtgctctctgctcccaccaatccagacaattgaacaagagactggggttgcactgggactccaggaaagccttagctgttgacagggggtgggcaggccccggggtgtggggcgcaggtcaggatctcggggcacgcggaacgccaaagggcgggagtagcaggtaatctcagggaactgggcaggcccggcagggtgaaacaagcagctcacccgggtgcacagcccctcccgcgggagccgctgcgaaagggccgtccccgcggtgtgcaccgacctgcgctcagggtactttgcgcccgacccgtctgctgcgcacagcccagcccaggaccgcgggcggctcggactcagtgggtcgggtgcaagggtggggcagggtctctgcacccggctccctcccctgactagaaaaggagctgccaactgttgcgctccaccacgccctccacgtgttccactgcctcttctcttctcgcttgggaactccagtctcacctcggcttgcaatggaccccaactgctcctgcgaggctggtaaggaacgcccgggttctgtgccttaggatgccaaattcccagacaccatagagagtgtccctgggtttgaggaggtcatattttgcgatctgagctgaagaggacttctttacttcctccgctgctttcctcttggccaagctcctgagag

SEQ ID NO: 1243102 - DNA, 4001 bp, Homo sapiens
gctaggccaagcctgatggttcctcatgagaatgtcctggcctgtgctgctgaaggtgtgtggtccacagtggggtcagtctgctgtttccagtctccaatgcaactcatccatgaacatatgtgcagagtttgtaaatcttccatttttctgttatttctgtatgtatttattgatttttttgtgtaaaatgtaaaacatgggttctatattttgtgcttcattatcttcataattaatattactttatttacaaaggtttaggtctgggatggatagaaaatgaaaactgtcccttcaccgtggagtttgagaagccccatggaggattcaagtaatttaggcattggaatccacctcctgtggccaatttcaagcctaaaatctgctgaggaactgaacttgggcagggaaacctgagaataaacatgaggaatggagaagtctctgtaccacatttaatatgagtggagctgatcgcgtatgtccccatccccatatgagccaggacagtgcaggtgccttttacagaagatggaggtcagtgatgtaatggggctcacctgaaggcgctcagactgttcagcactcacatttccatccagagcccagtctttaaactcccagttcaatctcccaccccagtccctcattccaaaaaacacaacaggaaccagaacgggaatcaagtctaagtgtttaattattattcacatatttcacagaaaaaaaggaatgtagcaaatgagtcggagttgtagaaaaaaaaaatcctggattttacgtgtcattctgttttcatctgacagcagggctgtcccgacatcaggcacagcagctgcacttctctgacgcccctttgcagatgcagccctgggcacacttggcacagcccagggggcaacaggagcagcagcctggggaaaaagggagagagaagtcacagcagacttgaccagggagctccctctcccaacagcaggcctggctcaagctcagactccagccccagaggatccttagttcaggatggcacagctttttcaggagacgactggtggatattggggtgagtcttcctatgagagactgcccagccccacaggagccctggacagagcagaagactggaaaggcagtgacggcctagggggacaaaggaagcaggcactcagggccagccttgggttccctcccaaccttagccacagccccagattcctggagatggccccgcactcactcttcttgcaggaggtgcatttgcactttttgcacttgcaggagccggcgcaggcgcaggagccacctgcaaggaatagaaaaagccagtgtgttgtgagtgagatgcagaagttacagcagtgggtcaatgagtgtccacttcccccttctctgttcagggccagccgtcagagctcctttcccactcagcagaagaagagaagacccatctcctctccattcatgctgggaaaaccaagcaccctccgtttgtattccaaaggtaagtcccaggctccaggcacagcccgggaagactgcgacttcgactttctgtgctgaaccctgaagaggcaatgtccccacctatccaatgcctcccatccaatccggctgctcagagcctggttagagaattggggctcagccagcagcctcgtgaccaacggggtgatgtggagcaggacagccttgagccttaggaccctcaactctgacatagaggcacagggaagagggacatgctctcaggagcttggccaagaggaaagcagcggaggaagtaaagaagtcctcttcagctcagatcgcaaaatatgacctcctcaaacccagggacactctctatggtgtctgggaatttggcatcctaaggcacagaacccgggcgttccttaccagcctcgcaggagcagttggggtccattgcaagccgaggtgagactggagttcccaagcgagaagagaagaggcagtggaacacgtggagggcgtggtggagcgcaacagttggcagctccttttctagtcaggggagggagccgggtgcagagaccctgccccacccttgcacccgacccactgagtccgagccgcccgcggtcctgggctgggctgtgcgcagcagacgggtcgggcgcaaagtaccctgagcgcaggtcggtgcacaccgcggggacggccctttcgcagcggctcccgcgggaggggctgtgcacccgggtgagctgcttgtttcaccctgccgggcctgcccagttccctgagattacctgctactcccgccctttggcgttccgcgtgccccgagatcctgacctgcgccccacaccccggggcctgcccaccccctgtcaacagctaaggctttcctggagtcccagtgcaaccccagtctcttgttcaattgtctggattggtgggagcagagagcacagcgagggagtagtgtgcaagggacatgccgaggatgcgaccttcagatctctggcattgcctgttcctgtccccgtccccacctcagttcttcggccacgtttctcctgtgcacagcaacacggaagacacaggaccctgcctccctcccatcaaagtatacttattcatatccctctatgtctctgttttgcttccaggactgactgtaatgcttggttttgttgaaagatttcaagcagtgaagagataaacatacctaggccatagagaagcttcatcactgacctctctacctagggaagctgacaggattcacaccaagcagtgccacttcccagctccctgaccctgggctagtggcttgaactcctcgtcattgtccagattaggaatacgggttcgtgaaaaggactcatgtccctttagggttgctgtgagggttcaaagacagaaagtgattaaacagggccaaacacagacccgtgtaacatagagtaataggaatatggaaggaaaaataaccagcgctcttgctttctaatttaatgcaggatcttcatatcaccttcaatgatccctcttctagggacttgccacactttccaaactgccatcctgtagtggggtacccggctaggctgtggggagaccctggagagatttatgcaaaggaggacctggacaaatgggcccattcagctcctcaagagtggagaatagaagagagaggcagatcactgtttcttccgtgttactgagcacaggagaagcgtgaccaaaggactgaggtgggaacggggacagggcggatactgccagagatgcgaagttcgcacccttggcctgccctttgcacactactcccttgctatgctccccgctttggcagatccagaaagtggagcacaagactggggttgccctcgactccaggaaaggcttagctattgactagagacctgggcgttggtgaaggtgaggggaaagccagaatactggggtaggcggaacgccaaggggcgggtgtagcaggcaacctcagggaagctgggaaggcctggcagggtgagagaagccgcacacggggggcacagcgcctccctcgcgagccggtgcgaaaggggccgtcctgcggtgtgcgcccagctgcgctcaagggaccttgcacttggcccatctcctgcgcacagcccaggccgggaccgcgggcggtgcggactcagcgggctgggtgcaagggcggggcggggcgtctgcgcccggccccgtctcctgactataaaaacagccgctggctgttgggctccactccgccttccacgtgcacccactgcctcttcccttctcgcttgggaactctagtctcgcctcgggttgcaatggaccccaactgctcctgtgccgctggtaagggacgcccgggttctgtgccttgggatgccaaattcccagacaccatagagagtgtccctgggtttgaggaggtcgtattttgctatcagaggtaaaggggactcctttattggtccagtgctttcctgttggccaagctcctgagg

SEQ ID NO: 1243103 - DNA, 4001 bp, Homo sapiens
aaaataaaattaaaaagcaagacatccagttatttctctgaagtatacctgactaaggcataacattgagtctatacctgtccctttctaatcactttgacagacagctctggagtgacctaccaaaggaaaaactcacccttcaccatgggagggcaccaagccattctttagggatctgtcctcatggccccaaaagctcccactagaccccacctgcaatagtggaggacacatttcaacatgagatttggcagtgacaaaatatctaaatcatagcacccgtgtaggattcaagaaactaagaagttgggttccagcactatagccacttttaagcctaaaatccaatgtggatctcaagttgtggaggaaaatcagaaaataaaaataagggatgaagtttctgtaccacatttggaatcacactaaaagcgatcatgtatggcccgcacccatatggtgtgcacaatgcaataccgttttacagaagggtgaactcagtgagtaacctggctggcctgaaggtgttcacattgttagtgactcacattttcatccagagactggtctctaaactcccagtttaacccccacccagtccattttttccaaggcacacaaagaagaacagagtaagattcaagtcaaaattgttttattgtcactcacatatttaatataaaaagaaatgcagcaaatggctcagtatcgtattgaaaaaaaatccaggttgtgcagcttgttctattaacatctgggagaagagctgttcccacatcaggcacagcagctgcagttctccaacgtccctttgcagacacagccgtgggcacacttggcacagcccacggggcagcaggagcagcagcctggggaagaaggggagagagaggtagcagtagacttgaccgggcaccgccctgccccaatagcaagcctggctggagctcagaacccagacccagaggaagctttttacgtctggcacagctctgttctgaaaccatagatgctacagttgggatttgtgtcccaagagaaaaatgctgtcctgccccatctgaatttagggcagaaagcctggagagggaatgacacgggcaatgagggcaaagaaagcccagttccccagaaggatgcactcagggccagccttgggttccctcccaatctcagccacagccccagattcctggagatggccccgcactcactcttcttgcaggaggtgcatttgcactctttgcacgtgcaggagccggtgcaggcgcaggagacacctgcaaggaagagaaaaacgcagtgggcagtgagtgagatgaagaaggtacagcaatgggtcaatgagtctccagtgccccctcctttgtgcagggccagccctcagagctcctttcccactcagggaaagcccctgtcctctccactaacgctgggaagggcaagcaccctcctgttttaccctaccaggaaggtcccaggggcacacccaacccaggaatactgagattgccagccagaaccttctgtgctgaaccctgaagactcaaatgtctccagcccccagtccaccctgattgctcagagcctggaggagaacactggggcccagccagcaggaccctaaccaactgggtgatgtggagcgggactgccttgaccctcagtatccttaactctgacccagaggcccaggagggagggcagtgctctcagaggggagatcaggaagaaagcacctaaggaagtaaaggaattcccttccgctcagaacttaaatgcgacctcctcaaacccagagaccctcagtactggggctgggaaatgggattcctagggcgcagggtcggcttctcttaccagtggtgcaggagcagttggggtccatttcgagccgcggtaaggctggagatctcaagcgataaatggagcgactgctaggcccacccggacggcgtggtggagcgccacagcctgcggctgcttttctactcaggggagggggccgggcgcagaggccctgccccgcgcttgcacccgcccggctgggttcgcaccgccagcggtcctgggctgggctgggctgagcccagcataagtgccgggcgcaccatcccctgagctccgctccgagtgcgccgctcgaccgcccctttggctcgggtttgcgcgggaggggctgtgcgccgggtggtacgcagtgtccccgaggtcccggccgcctttcccagtttccccgaagttgcctttgccttccaccctcctccccgcgctttccgggaccccagccttggcgtcgcgggcgtctccaccccaccccctcgccccgccgttttcaactgggcctgtcccggagtcccggtgcagccctcctgctccagtccccggatcggtcgtgtgcggagcggggggcgtgtggtagggagcgagtcgtgtgcagagcacccgccaccaatgtggctttcgtttctcctccttccccgccttgcctgtccctgtccacaccgcggtccctcggactggctcctccgtacacagcaacacggggaacactggtcggcctctctctcccgtccattctcttcgcctgagaggatgtgggggaacatttgtccaggtcctcctttgcagataaatctccatgctccccacagcctagccggccaccccactaccgtctggcagttctggacctgtgggatgtccccaaagagagatgacttcagatgatatgcagactctgctttaaattaaaaagcaagatgggtgaggtcgcgggaagctgtagtcccagctacttaggaggctgaggcgggaggatcacctgagcccaggagttcgagttctgcctagtccacatagcaagtcagcatctctaaaataataaaattaaaaaacaagacatgcagttgtttctcttcagtatacctgactattgcatgacattgagtctacaccagtccctttttaatctctttcattctttgaatcctcacagcaatcctaaagggaaatactagttatgaacccgttttgctcatcacaggactacaaaggaaatgtccaagtaactggctggtcgtcacagagctaaaaatttgtgcccttgtttaagtccagccagcctcttaaaggaaagtgtccatgatcaagccttcctttggtccagatatgtcgtcagcacttctctattgctggaaatcttctaaacaacaggggaagggcaccgcggcccacacctgtaatcccagcacttacgaaggccgaggcggatgaatcacctgaggtcaggagttggagaccagcctggctaacatggcgaaaccctgtctccactaaaaatacaaaaattatcctggcatggtggcagttgcctgtaatcccagctactggggaggcttgggcaggaaaatcgtttgaacccgggaggcagaggtggcagattgggccattgtactccagctggctgacaggggtaaaactctgtctcaacaaacaaaaacaaccaaaaaccctcaaataaacaacaggaagctaccagctctctgatgggcagtggcaaaagtaatccataagtgtaatacacacacacacacacacacattaatttgggggctatcttccatgtgtaagacaagattggatttcattttctcaggtggaaaataatttgcttttcataaaaatatgtttaagaagtattgatcatttcaaggtaaaatattaactaagggatggtgcaggtggtaacagaaatggcagtcattcttctgtatctgacatgaagcacagaatcttcctcatagctttataaccctagtgttgataacaattttgtggggacactgaatggctctctttagaccacaggacacatgctcatgcggtagatgaggataacaggatacacagctgagcactccaggcctttatgtgcaaataaataaatatcccctatgctccatagaatgaacaaaataagcaatagctaatattgt

SEQ ID NO: 1243104 - DNA, 4001 bp, Homo sapiens
ccataggtggctggtgagtataggctgtgtcacagctacacaaaaagggcagctactaccagttaaccgttgctagagggtggtagaataaaccccctagtttgccatagttcacaaaggagagccaaggccaggcaggattgcaggaaccttgcacccagacccccactgccatggtcccctctctgaaatgccccacaatctgggtttcctacaatccaactggaaccaagtgccatatacccagtgacaaatgaggtgcccagagccagaatagtctagatgaatttattgccattcacatatttcatagaaaaaaagatgtagcaaacgggtcagggttgtacaaaaaaaaaaaaaaaaaaaatccaggtttatataggttgctctatttacatctgagagcacagctgtcctggcatcaggcacagcagctgcacttgtctgacgtccctttgcagatgcagccctgggcacacttggcacagcccacagggcagcaggagcagcagcctggagaagaaggggagagtgagaggtcagagcagactcaatcaggcacctccctgccccaacagaggcctggctcgagccctgcctccagccccagaggaccatcatttcaggatggcatggctttgtcagaagagaactggtagatctttgggatgagggttttatatgaaaaagctgcccagccccacctgagtctgggacaggacagaagactggacaggtagtgattgggggtacaggaacaaaaggaggccagttccccaaaacctacccttaaatgaggaaagtcttcacagccggacagggggcaaatccctgacacagcagttctggggaaggctagggaagctctgggctacccctgcaggaaaggactggatcattaggtttgaaatcacccggggtcttccagatcctgggccttaagtgcttcaggacccagaagggtgaagaaggctgcatcaggaggcaggagacctaggttcacattccagctttgttcccaacactatctggtaacctctctgggcctcagtttctagtttggtaataagaggctgggactcacccatttttaaggcaatttgaggtctgattctgaatcaggtgttgaaggaggggtttggggaagctggtcattggcctgcccctgcctgcagagctctgggttccctgctctaacttggcccatcccccagattcgcagggaaggccctgcactcactcttcttgcaggaggtgcatttgcactctttgcatttgcaggagccggcacaggcacaggagccaactgcaaggaagagaaaaaggcagtgagcgtggagtgagatgcagaaggtacagcagctggtcaataacgcttcagtgacccctcctctgtgctgaaggaccagcccccagagctcctttcccactcaggggagaggaagagaagccccatctcctctcccttcattttgggaagggcaagtgttctgttgcttttaccccacaagcaaggtcccaggctccagacacagcccaggaaggctaagacaggaggccagaaccttctgtcctgaactccgaagaggcaatggccccccacttcccatccaccctgactgctcagagcctggtcagagcattggggctcagccagcagccccctgaccaactgggtgacatggagcaggacagccttgggcctcagtaccctcaactctaacttagaggcacagggaggcgagaagtggtctcagggacgtgatcgggaagaaagcacctaacgaaataaaggagccccttcagctcagaactttaaatgcgacttcttcaaacccaggaagagtctgtactgtggctgggaaacgggcatcccaaggcgcggagctaggtgtcccttaccaggcgagcaggagcagttggggtccatttcgaggcaaggagaagcaggagttcccgatcaagaggaaaacacgcagcgggacagatgaaaagcgtggtggagcccagaagccggcggctctctttatagtccgggaagagggccgggcgcagaggccccgcctcgtccttgcacccgcccctgctgagtctgcaccgcccgcgatcctgggccgggtgcagcaacccgtgagcccagcgccgggcgcaccgcggggcctgcccctttggctccacctcgttgagaacctggcagtacgtggcgtccctggcgtcttgcctgcccaatttccctgacattgcctgcctctccctctcctaggcgtgccgggaaactcggaatcccggcggtctacacacccccagcccccgctccactgtgtgtagctttgcatttcccagagtccctggatcacgtccctggatcggcgggagcggtgagcatagcgagggagcagtgtgcaaatgagaggcagaggatgtgacactcggatttcctgcattgccggtccctgtccccgtccccacctcggtctgttggccacgtttctcttatgtctagggacagaacagacacagggctctgcccccgtccttgcattctccactcttgagaggctgaatgggcacatttgcccaggtcctcctttgcataaaactctccaggtctccccatagcctagccgggcaccccaccacaggatgacagtttggaaaatgtggaatgctcccagaaaagggatcattttaggtgatatgcggattccggattaaattaaaatgcaagaaacagggttatttttccttccatattcctattactctacataacattaatccgtgttaggccctttttagtcactttgcatcgttgaaccctcacagcaaccctaaagggacatacttctattcatgaacccatattctaatctgaacaacaacaataaaaggagttcaagccaccagcccagggtcagagggctgcgaagtgacactgctgggtctgaatccggtcagcgtcccaaagcaatgatgaagcttccctttggcctagatatattcatctctttactgcttgaaatctttaaacaaaaccaagcatcaaggtcagtcctggaagcaaaacagagatgcagaggggatatgaataagcataatttgatggcaaccttctatgtctggaagttaaactgattcttttttcagtggtgctaatgagtttgcttttcatataaaaatatctaaggaaataggaatcatttgaaagaaaaacgttaagtcacatattggtgcaggtggtagcagaactggcaggtatccttccgtttctgtgatggggacagggactatcttgctcatggctttatatttctggagtgaatccctattttgtgggcagagtgcaggacactgtcaggaccacaggtcaatgctcatgtggctgatgagaaagacagaggacacacagggagggactccaggcctggctcttttgtctggagtaaaaatgtcaactatgctatcgtctgagtccatttgggctgctatcaccagatgccttagactgggtaacttaaaacagcaaaatatatttctctcagttctggaagcatggaagtccaaggtcaaggcaccagcatatttggagtcttgtgagggccccgttcctcacggatgtctctttcttgctgggtcctcacatggtggaaagagttaaacaagctccctcaggcctctctaattaaggcactaatcccattcatgagcactaggtcctcttatttcagtcacctcccaaatgcaccacctcagtaccaacacactgaaaattagatttgcacatatgaatattggaggcatacgagcatttagaccatagcagccatgaataaaaataacaaaataatagttaatattatagatcatttgccatgtgcaaggcaccattctaatttctttatacctattaaatcatttatttctacaagtcagaccccattacagtcatatgctgcttagtgatgggaatacattctaagaaatgcattgttgggtgattt

SEQ ID NO: 1243105 - DNA, 4001 bp, Homo sapiens
gcatagccagggggactaaccgttggctttaattacaagtcactcagagcttcactcctttctaaagagcgccaccacaccctccaaactgctgaatgccatcacccctgcgtgggcagacaggaagaacgtcttctgcaacccatgatcacacacactgcatcttgctgggaacatgctgggcatttccctccacatccccagccactttgacggtttaagtagccaacggctgaaatttgagaggagtaaattcagcctgaccttgggaggaacttacaaagattcagaaccaaggcaaaacagggagctctcaggggtgtgcgagtgagtgtcctgtcagtgacactgggcagcacaagcctgacggttccttgtggggatgtctggatcagtgctgctcagggtgtgccagccacgcactggggccagtctgagaactgtttccaggatgcaatgcacacccttggacaaatgtgtagtgttggtaattcttttatttttcctatgttaatttgttcatatatttattgaaaagttcctgttgaatctaaaaaattgtctttgtattttgtgtcttttaaactttcattttcttattaactccttattttaccagagtttaggtctgtgactaatggagaacaaaacaaaacaaaacaaaactggtcattccccacagggagtttgggaaaccggatgtcagattccagccactggggagttggatttcaccctctgtagtcactttcaagtctaaaatcccacgaagaactgaagttgggcagggaaattgaaagtaaaagtgaggaatggagaagtttctgtgccacatttgacgtgaaactgaaagtgatcatgtatgtgtccctcctgctcccatatgatctggcacagcgccattcagttttacagaagctgaagctcagtgcagtagcctggcttgccagaatgcactctttcttaacggctcacatttccatccacagcccaggtctctgccctcccagttcaatccctcaccccagtccgttatttttaaggcatataaaggaaaccagagacagaatcaagtcaaagctgttttattatcattcacattatttcatagaaaaaggaatatagcaaacggtcacggtcagggttgtacataaaaaatccaggtttgtggaagtcgcgttctttacatctgggagcggggctgtcccagcatcaggcgcagcagctgcacttgtccgacgcccctttgcagatgcagccctgggcacacttggcacagcccacagggcagcaggagcagcagcctgggggcagacaggaggcggcagagatgagtactagcgacaccgggaataaggattcctgctctccctgataaggatcactgaggaggcaacaatttccgcgcaatggggcatccccagactgctttaattcccctgaggatggtggagaggggacaggctggaggacagggaaggggtagaggaaagagaggatcccacttacttttcttgcaggaggtgcatttgcactctttgcatttgcaggagccggcgcaggtgcaggagtcacctgcaaggagaaaagacagaggtgagaaccgtccctggatacctgaacaagggacggcgtactaagagcccggggccgagttcctcagtccacaaccgattcctgggaacttgagcaagccattaactcagatctccttaacggtaaaaagggggctccgaataacctagaatggagagaaagataccccaaaactctttgggaaggagcaactcctgtcctgaaattgagtgaccagagaaagaaagaggggtcagaaattgcttctctagcgctacagtctacactgggcatccccagcctcttaccggcggcgcaggagcagttgggatccatggcgagctgaagaggcggctagagtcgggacaggttgcacgcgggttcgctgggacttggaggaggcgtggtggagtgcagcgcggcaagcagtgtttatagctagaaagagccgggacgagtgcaaaagccccgccccggccgggcgctgcctgcacacgccccgcgctgagtcacttgcggctccaggcgaaacacccggccgcgcgcactgggccgggcgcacccggctctgcacacgggccgcgggcggtcagttccctgaaggcggcccacttgcgcctcggggacgcctcggcgcggaaggggctgggtgcagcgggaggacacagtgtaccgggtgctgggtgcccacgccgtgcgcctccgccgtgtgcacagctcccctccctcctgtcctgtactcgaacctgagccgttagcgcgcgggtgaaagcgggacttgggaatgctgcttgcattcccaaaccggttggaagtgcagacaggttacaactctgtagcagccaaggcttaataattgtgcagcatcacagtaaacccgtggggtggttactgatgacgtatccgttgcatgttgagtacttttagcgtgtaacagggactgtaggaagtgtgttgtgtgtgagatgtcacttaattctgtagcaacccataagataaggactctccagtattctcattgtagagaggagaaactgcaggtccagagaagttaatttgtccagagtcacacagccagtgagtggcagagcagggtgaatgcgaccaggccccagcagatgctaacggccctctaacatagagacaccaaggaggaagagtaaggagaagaagccacaagcttggtcctcaggaagctcaggggctgggggaacagagaggaggagaccccatccagcctgggaggaggtgggccattgccttgggcctgagggtcagaaggtgtttgccaggcagggagtgggaaggatttgtgttctagcctgggagggaggaactagcgggaacactggaatcgccctgagacatttggaagggaaaaaccccacaagaatattcttcccctgtggaggctgaggggaagagcccaggtggcgtccacattcctgtctggagaggcacatcctgcctccctgcctgcgcgtgtctggcgctgtgtaagggccttagatcgtcaaccttggaaggcccgaagtgtgtcatgctaggagtcaggaagtggttactggaagcttcctggcaggcttagggaatgccgattgccacagtgaaagtttagtgaggtggtgggcgggggaggacaggctgtccttgcagcccttactgtaagttcctgtggaaatgtctttctagctcagccgaatcgtcacttcctctggggaccctgtcctgacccccatgaccgtggctgcctgtggaaggtgctggtaaacatcctgttctttcccctcctggcgctttccgtgcctgtggtatgtataaactgcggggactcttggattggtgtctctgcccctcctcaccaacccctgaccactggaaatgccaagggcagtcattgtctgcctctggaattgtgtcttcagcttccagcaccgggccaagtttgcagtagacgcttaataaatatttgtcaaatgaattcatgggggtaatggcctggactgctcttcccttcccagcccccaccttgtatgaaggccgactacaaaatgaaagtaaacacctcttgaccaccctggaacctgcgtgctcactcttgtaaaaacaccgcacagggcaggggggcgagctctcagatggactaaatttcagtggtcactcggccactcacttactcagtgaccttggggcaattacatgcctggactcttctgatccctggtttactcatctgtcaaatgactgggttgtactagaatttatatccaaacatcctctgattttagagccaagatcttttgaaatctcatgatgtctggcagctctgtggatcgagagctctctgggcagtggaccaattttgttgttgttatttatgtatgcacagtattatataccaaatccctggttgctaataactcaga

SEQ ID NO: 1243106 - DNA, 4001 bp, Homo sapiens
gagtagctgggattacaggcacatgccatcatgcccggctaatttttttatttgtagtacagacggggtttcaccatgttggccaggctggtctcgaactcctgacctcaggtgatccacctgcctcggcctcccaaagtgctgggactacaggcgtgagccactgcacccagccagggtttcactcttaactgtgtggctcccttggaataggctcccccactgctccacatccttcccccctttaagaagagaccagtccttggctcatgctgttcatgggatttattgtcattcctccaaggtcagcaggggaaggggacaccagccacacttcaccacaggcataggtggcactgagccacctggcactatctccacgtgctccacacggaggggtgccttctcactggcagcagctgcacttctctgcttctgcctcagctgcctctccgcctttgcacacacagtccttggcacacttctcacactccgcagggcagcaggagcagcagcctgcagataaaatggaagatgaccactctctgatgcacactcccccaattcgtccccatcaaaggggagggaagggtgctgggtggggagtcatcctggttcattcagccagggctagtcgcagcccccttcttagtctcacacctgctttgactcagcatctatgtcgcggcagtggcatcctgcacctccacaggagtgaggtacccaggaaatgaccagagccccttgggtggatgccaggaagtcctgggggctggtgggcttaagcccagcttaggtgggtactaggccttaaggagaaagcatcacagggtaaacgaccttgaaaggggcctcaaaggataaacttgggaggggcagatatggtgcagatgtaaggggcccaggaaagccgtggggaggcggtggggacctgtgcctggtttcatacctagggaagaagggagccttcctcccacctcttactccctatgcatattacactgccgtgagctggggagattttgagatcaaactgagaggatccgtaaggccggagagaggccaagggaccggaactccagagctgagccgcagcctcactaatggcttccccaggttttggggagtttttgagggatgggtcgggaaaggttggaccagtgtggcagtcctcaatcccagctgccattggagtcttctggggatttacaaaaacctctcgtcccacgcctaggccatcaattcctgggtgtggggcaggggcatctgtattttaatgtctgcccgggtggttctattccagcaagagtcagaaaccacgggatcggggcctggctgtctctccacatcctgcgtggtgagacaccgactccgcagagcagagggggcggcggcagaggggaagggtccccgcactcactcttcttgcaggaggtgcatttgcatccctcgcacttgcaggagtccgcgcaggtgcaggagccacctagagagggcgacgccacaggaagggttaatgtggacgaactcgggtccccacgcctgtcacgaggagatggggtgccaagtctccctgttctccgcgacacaggcatgcccgcccttcacgaggtgaagaatagggaatcaggggcccttcccccaagtgtccttgagcgaaggcgcagggcgtgggtttctttgcaggtacaagggcgcgcagtgcgcaggatgcgagcgggggcgggggctcaccagaagggcaggggcaggtctcagggtccatgtcgaggagagcagcagctggaggcggtgaacgggcttctccaagcaactggacgcgcggcttggctagtggcagcaggtggcgatgcttttatagcctcgggcgggggcgcgcatgccaagcccgctgggcgcccgcccctgcgcaccgcgcccgctctttccgtttgtgcgcttgggctccggcgcacgcactgcatctgtcgcccgcccctgccgtgtgtgtgcactgccggggcccgctcgcccacgcccgcgcgtgcgcccccactcccaccccgcatccgcgtgcacgacccactcgccgccgctgtgcgcgcactgccagcccactccccgcgtgggtcccgcaggggacgtgctcgccgcagcagccgccactgcgtggaagcgcgcacgtaccatctccgaaagtggagaaaaaggcgctttgcgtatttcccagctcttccctgcctctcttccccttcattctagaattctccaggacgccagatctgttcagacgggttgctgaactgggggcagaaagaacctgctcacgatgagcccgacactgactcttgcgccctccgagtgtcactggcaaggggcgtgttccatttccccgctgtcctgcctggcatcttcagatccttgactcctaaccctccattatacagataagaaaaagtgaggccagagaagcagaaatgtgcctgggtcccagaataagcctgaggccgagccaggcctagaactcagaactcaggtatctagagggattgtcagtggggggcatgttaaactcaaggcaggtcagtgagatttttctatttataaaaaggaggccggacgtggtggctcacgcctgtaatcccaacactctgggaggccgaggccggcggatcacctgaggtcgggagttcgagaccagcctgaccaacatggagaaaccccatctctactaaagatacaaaattagcccggcatggtagcaggtgcctgtaatcccagcaactcaggtggctgaggcaggagaatcacctgaccctgggaggcggaggttgcagtgagcccagatcgcaccactgcacttcagcctgtgcaacaagagggaaactccatctaaaaaaaaaaaaaaaaaaattatctggatgtggtggcatgcacctgtagtcccagctacttgggaggctgaggcgggaggattgcttaagcccaggaggttgaggaggctgcagtaagtaagccttattgcactactgcactccaatctgggtcacagagcaagaccctgtctcaaaaagaaaagagagcctaggtaaaataagattgatcaatgtttatatgaatataagggatttgggtgcaaaatgaaaggaaaagaggtctaagctgccaaggagaatcatttgtgactgagcagggtagcgtgagtgagaatgagaccccgagaagtggagaggagagaggtcattgctcctcaaaaacgagggccattcaggggtctagatgaagtttggggggcagcaaagaagggaccagagctgggagaagacctctgtaaaaagcattttaaaaaatgttattgtgaagtgtgtgagtgtcactctctctgctgtccctctgagactttctgaaaatcttccttgcttgctaatgctttcacagaaggggttgtgtttcggggtacgtggagctgagcattaagatgactcccaaggccagtggctcatgtctgtaatccctatgctttgggaggtcaaggtgagaatcacttgaagccaggagtttgagaccagcctaggcaacatagtaagaccccatctctacaaaataaataaataaaataaaaatttaaaaaatcagccagtagtggtggggatcacatgtacccctagctacttgggaggccagggtgggaggattgcttgagcccaggagtttgaggctgcagtgagctatgataacaccactgaactgtagcctggatgacagagcaagaccctgtacctcccccgcaaaaaagatggcccccaaatgaaggcagggacagaggaggtgtttgacaaagaactagtcacactggagtaacccaataaggaaattcatcctgagatgagaatttttaaagcaaagcccgcactgtgcagggcgagagcagctgaatgctgtgctaccacgggagaggggtagccaggccagccaaggctaaccaaggtccaaaatagagccttgtatggagagtcagaggc

SEQ ID NO: 1243107 - DNA, 4001 bp, Homo sapiens
tctgccttaaaacaaacaaacaaacaaaaacccctttcacacccgtgtcaccttcacaagtcaagatgaaaactgtgaatggtttaagaaaggtcaaggaacgtcagtgaactcaaaacaagagccacagagccacaccttgttttgtttgtttcttcctttcctttcttccttccttcctctctccctcatttctttctttctttctttctttctttctttctttcttttctttctttctttctttctttctttctttctttctttctttctttctttccttccttccttccttccttccttctttctttctttctttctttctttctttctttctttctttctttctctttctttctttcttttctttttctctttctccctgtctttctctctcttttctctttctctctctctctccccctttctccctttctctttctctctttctctctctctctcttcctttctccctttctccctttctctctccttgtttctttccttctttccttctttccttccgttctttcttcctttcttttgacagggtcttgccctgtcacccaggctggagcaccatggtgggaacacagctcactgtagcctcaagctcttgcctcagcttcctgagtagctgggaccacaggcacgcaccaccacacctggctaattgtttaaagtttttgtagaaacagggccttgttatattgcccaggctggtctcaaattccttgggcataagtgatcatcctgccttggactccccaagtgccaggattacagatgggagccagcaccttgtttttatatcataatgatcatctacacttaaaaaaattatcccatttttcattttgagtttcaaaatgctggaagcttctgcctcttttgcaagtttttggtacagagacatcctgttaaggacaagggagtcttgtgagacttcattttctttctttctttttcttttcttctttttttttgagaaagggtcttgctctattacctaggctggagtgcagtggtgcattcctagtttgctgcagcctcgaactcctgggctcaagtgatcctcccttctcagcgtcctgagtagctgggactaaggtgcaccctactacgcccagctaagtttaaaaaaaatttgtagacatggagtctcgctatgttgcccaggctggtattgaactcctggcctcaagtgattctcctgcctcagcctcaaagtgctgggactacagttgtgagccacaccacccagacttgtgagacttcttcataccatttccatgattgtaaaagcccaggatggctttgaaccctgatttctctccttctggctaacatgctccgtggaattaagcagtttcagagactcaagagtccacataagttaggggagtccacaactcccctgacatctgcaggtgcttaatggttttagcactttcatagcagctctgggatgtggttggctgggaataaggaacctcagtctacaggtgaggaaactgaggaccagaaagaataagcgccagggaggggaccgcagcaatggacccaaaccaggttgccagattctggtttagagctcttctcctcaccctggtgactgcccttaggggccaacgctagaaagaccaaagtttgcaagtccccctctcagccattccctgagctaggatatcgattctagaaaatcaggctgggagccaacagagagtgggagctgccccagaggtggccagtccacctgtcggctcccaggacgaaccccattggtggctcctaattagagggaagagaagttttcatcagggacctgcaggctccctgtaggaagctggtccaaggttcccagaccccagggagggcttctttactcaccagacatgcagacacattccctggggtccatggtccaggtgtccgaaaggctccagtgctgtcacggctggggaagggaggctgagtgagcagcagccagaggctccccatttatagccatgtgggtgtagtctgcagctcaccccacctctccctggggccagacgccctgcacacggcccagccagatgccttgggctgggagttgggaagagcaggcggaggagggcagaggagaggccgagcagtacggtcatttgggtggcttttcaccaggggtgcaggtggctgcacccacctcacctgcccgcctggcaaggtttcagggaaccaggctcaggctgaaatgcacacatggagctcaggttggcagctacgtccaccctgtctccaagtcctatgcattctattatctgccatttctgttccctccttcacaggggctcctcctgcctcggctcggggcctcatcctatctccctggttgactgtaaaagcccttactatgggcaggcaggggcctctatccttggccctgagatttagaagttcccaccaagaacctctactgactgcaccctccccatgagtgagagggtggaaaatcagggagttgtgcccatccagaacatgcaacctttccttctagaccacacacaaagcagaagcagcaagaggggacttgggagagatttaaccacctcttcatctccattataaccccaatctttggtatgggcagctgactacttttcagtttgtttgtttgttttgagttggggttgcattctgttgcccaggctagagtgcagtggcacgatctcggctcactgcaacctctacctcccgggttcaaaggatcctcctacctcagcctcctgaatagctgaaaccacaggcacaagcccccacacctggctaatttttttgtgtattagagatggggttctgccatgttgcccagcctggtcttgaactcctgagctcaagtgatctgcccacctcggccttccaaagtgctgggattacaggcgtgagccattgtgcccggcctatctttcagtcttttgtaaagtgccctgtagaggatgcagctactagcttccctgacaagctgccatccgtacccaatcgccatggagaaattctggagctggtgctgattatacttcctccaggaagctacctctgatcactccctttcttagttgggagaaatctctctctctgtatcccttggctgatgtgtctgtacatttctcatgacatttactacttgctaagctgctgtatgattatttgtcttcatggctcttacctttctcgccccaatctgggagctctcaggtaaaaaaactgtgcctgaagcatctctaaacctgttcaatgttctgcacaatgttggatgaatggatgaattaatcagatgagtaatcaaatgactgaaggcatgagtgagagagtggatatataagtgaacaaatgactaagtgagtgacgagtggacaaatgcatgtatctcctgcatgtggctctactgaggacctctgctgaaatatgccgttgccattcagaaaggcaaaaaaccggcctggccataaacagtggagatcattcctcccagttctcagcttggtggggtctccatcattcacccataaggaccacctgggcctcagtctgacccatggaaccacggattttggactgagagcttctaacgaggagaaagggatttggatccatggtcatcagcaggtcactgtggcaggcactggggaggggaggagggggcaatactgtagtgatccccaagtggtgcctcccttaaaggagttcacagcctagtaggggacatgtattcatttatcaccctccaagggccaggcactgtgctgggcactggggagccaatgatgagtaaaagtagtttatggttcagaagtttgggaggacatctcagtccaggagacccatgaccaggtgtggctgctcccagagtcttgaagctggatccatcttcccgggcttgcacccccagcccagttccggcacatctctcgtggcaggcccagcctcctccacctcttgggctgccctccagcaagtat

SEQ ID NO: 1243108 - DNA, 4001 bp, Homo sapiens
acagaaaacagcaactagcaccaccttgaaaggtgacagcgtgctggcagccctcggtccctctcggcgcctcctcggccttggcgcctactctggccgtgcttgaggagcccttcatcccgcagctgcactgtgggagcccctttctggactggcccaggccggctccctcagcttgctgggcggtgtggagggagaggcgcgggcgggaactgctgctgtgcatggtgcttgtgggccagcgcgagttccatgtaggcgtggggagccccgcactcacagcggctggccctgggcagtgaggggcttagcacctgggccaccagctgctgtgctctatttctcgccgggccttagctgcctccccaagacctgcagcctgccatgcctgagcctccccacccccaccggcgggctcctgtgcagctagagcctccccgaggagcgacgctcctgctccacggtgcctggtgccatccactgcccaacggctgaggagtgcgggtgcactgcacgggactggcaggcagctccacctgcagccccagtgcgggatctgctgggtgaagtcagctgggctcctgaggctggtggggacttggagaatctttatgtctagctaagggattgtaaacacaccaatcagcaccctgtgtctagctcagagtttgtgaatgcaccaatgggcactctgtatgtagctaatctagtggggaggtggagaacttttgtgtctagctcagggattgtaaacgcaccaatcagcatcctgtcaaaacggaccaatcggctctctgtaaaatggaccaatcagcaggatgtgggtggggccagataagagattaaaagcaggctgcctgaaccagcagcaacaaccctctccaatccccttccacattgtggaaggtttgttctttgcaataaatcttgctgctgctcattctttgagtccaccctgcctttgtgagctgcaacactctctgctaaggtctgcagcttcactcctgaagccagcaaagaccgtgaacccaccagaaggaagaaactctgaacacatccaaacatcagaaggaacaaactccagacacgctgcctttaaaaactgtaacactcactgcgaggcttcattcttgaagtcagtgagaccaagaacccaccaattctggacacaacctcacctagagacaaccaaaccaccctgcacagagacgcaagaggccccaggtgaagagtaaatgacgtctctaaatgctaaggacgccctggccaaatggctttgatttcacaccactgctcactgctcgccacattctcatccaccatgacgcagtaagagaattttattactagtgttattcatttaagaatattttgttttccttttctggactccagaaatatgtcagtaccttaaagttgggtatcctgtgatgaacaggtcggggaaagtcagctaaattttgtgattccatgtagccccaaatttgttcacgtatgtcctgtttggagacacctactgcaacaaaagattcccacttaataacatacaaaggaattccagagcccatgctgaaaccgcttaacagtagttaagcgacccccgcgtgtaggtcaaaccggcttccgatcctgttcctgagcctcagtttccccgacctcaaggggcccacgggctcccccacgtgcacggcaggtgtccctcccgcctcgtcttctcgttatctttatttttcctgacatctttctcgggattccgggcgagagagccgctggttcgacccgaacccagcacagaccccctctgacctcctcggccgcttccggtgattctgccccatcctctgccagccccggtggccccgcctcgaccctcaccggtcccggctgtccctccccattcccagccgccccggagccccgccaggccccccacctgccctcggctccatggtgatgcagtcgctgtgcgacgcttcccggcgcaggttctggcgcgtagtgacgtcacccgctccgcgcctgcgcgatggtaggaggggcggaggctgagcgggcgaggcccaggcgcgcatgctcgggcgggtaaaatccgcgccggggacagtcagggatgctcccaggcccttcgctcttgctttcagctagtcattgtcgagcgccgcccgtgacaggcgttttgccaagccctggagttactgaagtgaacaagtccctggtctctcgggacccattgccggttgaaacacatcccgcctcctcttccagtcctagaggccgcctcctccggaaagccggccttgattgctcctcatgtaggacgcggttccctcctctgagatcctgcagactctcaggtgctcacacgtgggtgtgcagcggattcagccggcagctctttaaagcggcaggcagatggaaattcgaggccagcccagccccggcgactgcgctgcggacggccagaggccatcctttgagaaacacccgtggattcttaccctgacctctgcataccctgagaaagaacgaacgtggcagcctgcgtctgcttgtctatgtctttcatgtttgctaacctaagggtcgagaagcggctcgaggagaccaggctgcacagaccgtcacgtccattccctctctggccccagccccgcgggaagaaaacgagggcgttcagcctggcagttcattcacttattaggaagaagacatcccacacccccacccagcacacacacagatgtcagggaccagccactaggaaccactccctgagcgaatgaaggcatccccgtagccacgtgcctggtacatcacaagcactcaaaacgtggctgccacctttcgaaattgcatgcccaaaactttatgagatcctcacaacacacttgggaaacagacaaaagagtttgaatgcccgcctacttaacagatacagaaaatggtgttccgtgtacaagcgacttactcatgtctgctggtaactcataatgtgccgtttgacctccttaggacataattaataatggtaattaacagtgctacgatatgccaggcattgagcttagcgccttaaaagtcatagctaactatgtttcacagcaaaccctcagaggcaaatgtgacccgcctcctacgcaggaggcaacagaggctcagacatgttaaagaagcttggcctgagtctcccagcagagaaagggcagagcgtgtagccctgacaacgtgcttaattgcaactcctgtgggtcccatcacaactctctcttcctatgtggtgtccgcaacattaatacatagagacaccgaggagcctcagttctgcttgtgggcgggcctgtctttcaccaggctggcaaaagcagtgcaaacatcattttggaggtgataaaataaaatctctcacagaggttggatgtcctttccgcctttcatggaagcacagtagatctgcagagtgttttatgcaagtagacttggtgccagtagtggaagtgtgtgcaggattctgttacccagctgtgctcaaaacagagcccaagtctctccgatggtcagcctggcacggcccccagatggtaacgagacgccagggacaatctgccagtggcaattttagaaagcaggtggtgctaggaagggcattctcttcagttccatgttttcaagttagaagtgcctcagagcatttacccccagctccttgagggggtgaggcagaggatcacttgagcccaggagtttgaggctgcagtgaactataatggcaccactgtactccacttgggcgacacagccagaactcctctttgaaaaacataataataaataaaaataataaatagtagtaataagagaccccttagaaaaaatcaactggctcttttatgaaaggaagatgctttcagaatgaatagctaatgcatgtggggtttaatacctaggtgatgggttgacaggagcagcaaaccaccatggcacacatttactacctatgtaac

SEQ ID NO: 1243109 - DNA, 4001 bp, Homo sapiens
ccggccaggataaatattttactttgtatcaaacagaaaacagcaactagcaccaccttgaaaggtgacagcgtgctggcagccctcggtccctctcggcgcctcctcggccttggcgcctactctggccgtgcttgaggagcccttcatcccgcagctgcactgtgggagcccctttctggactggcccaggccggctccctcagcttgctgggcggtgtggagggagaggcgcgggcgggaactgctgctgtgcatggtgcttgtgggccagcgcgagttccatgtaggcgtggggagccccgcactcacagcggctggccctgggcagtgaggggcttagcacctgggccaccagctgctgtgctctatttctcgccgggccttagctgcctccccaagacctgcagcctgccatgcctgagcctccccacccccaccggcgggctcctgtgcagctagagcctccccgaggagcgacgctcctgctccacggtgcctggtgccatccactgcccaacggctgaggagtgcgggtgcactgcacgggactggcaggcagctccacctgcagccccagtgcgggatctgctgggtgaagtcagctgggctcctgaggctggtggggacttggagaatctttatgtctagctaagggattgtaaacacaccaatcagcaccctgtgtctagctcagagtttgtgaatgcaccaatgggcactctgtatgtagctaatctagtggggaggtggagaacttttgtgtctagctcagggattgtaaacgcaccaatcagcatcctgtcaaaacggaccaatcggctctctgtaaaatggaccaatcagcaggatgtgggtggggccagataagagattaaaagcaggctgcctgaaccagcagcaacaaccctctccaatccccttccacattgtggaaggtttgttctttgcaataaatcttgctgctgctcattctttgagtccaccctgcctttgtgagctgcaacactctctgctaaggtctgcagcttcactcctgaagccagcaaagaccgtgaacccaccagaaggaagaaactctgaacacatccaaacatcagaaggaacaaactccagacacgctgcctttaaaaactgtaacactcactgcgaggcttcattcttgaagtcagtgagaccaagaacccaccaattctggacacaacctcacctagagacaaccaaaccaccctgcacagagacgcaagaggccccaggtgaagagtaaatgacgtctctaaatgctaaggacgccctggccaaatggctttgatttcacaccactgctcactgctcgccacattctcatccaccatgacgcagtaagagaattttattactagtgttattcatttaagaatattttgttttccttttctggactccagaaatatgtcagtaccttaaagttgggtatcctgtgatgaacaggtcggggaaagtcagctaaattttgtgattccatgtagccccaaatttgttcacgtatgtcctgtttggagacacctactgcaacaaaagattcccacttaataacatacaaaggaattccagagcccatgctgaaaccgcttaacagtagttaagcgacccccgcgtgtaggtcaaaccggcttccgatcctgttcctgagcctcagtttccccgacctcaaggggcccacgggctcccccacgtgcacggcaggtgtccctcccgcctcgtcttctcgttatctttatttttcctgacatctttctcgggattccgggcgagagagccgctggttcgacccgaacccagcacagaccccctctgacctcctcggccgcttccggtgattctgccccatcctctgccagccccggtggccccgcctcgaccctcaccggtcccggctgtccctccccattcccagccgccccggagccccgccaggccccccacctgccctcggctccatggtgatgcagtcgctgtgcgacgcttcccggcgcaggttctggcgcgtagtgacgtcacccgctccgcgcctgcgcgatggtaggaggggcggaggctgagcgggcgaggcccaggcgcgcatgctcgggcgggtaaaatccgcgccggggacagtcagggatgctcccaggcccttcgctcttgctttcagctagtcattgtcgagcgccgcccgtgacaggcgttttgccaagccctggagttactgaagtgaacaagtccctggtctctcgggacccattgccggttgaaacacatcccgcctcctcttccagtcctagaggccgcctcctccggaaagccggccttgattgctcctcatgtaggacgcggttccctcctctgagatcctgcagactctcaggtgctcacacgtgggtgtgcagcggattcagccggcagctctttaaagcggcaggcagatggaaattcgaggccagcccagccccggcgactgcgctgcggacggccagaggccatcctttgagaaacacccgtggattcttaccctgacctctgcataccctgagaaagaacgaacgtggcagcctgcgtctgcttgtctatgtctttcatgtttgctaacctaagggtcgagaagcggctcgaggagaccaggctgcacagaccgtcacgtccattccctctctggccccagccccgcgggaagaaaacgagggcgttcagcctggcagttcattcacttattaggaagaagacatcccacacccccacccagcacacacacagatgtcagggaccagccactaggaaccactccctgagcgaatgaaggcatccccgtagccacgtgcctggtacatcacaagcactcaaaacgtggctgccacctttcgaaattgcatgcccaaaactttatgagatcctcacaacacacttgggaaacagacaaaagagtttgaatgcccgcctacttaacagatacagaaaatggtgttccgtgtacaagcgacttactcatgtctgctggtaactcataatgtgccgtttgacctccttaggacataattaataatggtaattaacagtgctacgatatgccaggcattgagcttagcgccttaaaagtcatagctaactatgtttcacagcaaaccctcagaggcaaatgtgacccgcctcctacgcaggaggcaacagaggctcagacatgttaaagaagcttggcctgagtctcccagcagagaaagggcagagcgtgtagccctgacaacgtgcttaattgcaactcctgtgggtcccatcacaactctctcttcctatgtggtgtccgcaacattaatacatagagacaccgaggagcctcagttctgcttgtgggcgggcctgtctttcaccaggctggcaaaagcagtgcaaacatcattttggaggtgataaaataaaatctctcacagaggttggatgtcctttccgcctttcatggaagcacagtagatctgcagagtgttttatgcaagtagacttggtgccagtagtggaagtgtgtgcaggattctgttacccagctgtgctcaaaacagagcccaagtctctccgatggtcagcctggcacggcccccagatggtaacgagacgccagggacaatctgccagtggcaattttagaaagcaggtggtgctaggaagggcattctcttcagttccatgttttcaagttagaagtgcctcagagcatttacccccagctccttgagggggtgaggcagaggatcacttgagcccaggagtttgaggctgcagtgaactataatggcaccactgtactccacttgggcgacacagccagaactcctctttgaaaaacataataataaataaaaataataaatagtagtaataagagaccccttagaaaaaatcaactggctcttttatgaaaggaagatgctttcagaatgaatagctaatgcatgtggggtttaatacctaggtgatgggttgacaggagcagcaaa

SEQ ID NO: 1243110 - DNA, 4001 bp, Homo sapiens
ctgactctgattctccttctgttagttcaaaaggggctcggtttgtttctgctagtgtggagataaatcatattatggctaggggttatgatggtagaagcagtcagaggaattcttgcgttgtgataaatgcatgtaagttaaatgagccacttattagtagaactgataaaaggataatggctagagtgacttgatatgaaattgtctgggctacagcttgtaatgtgccgattagtgtgtaatttgaattagatgctcatcctgatcataggatagagtagatggctaggcttgatgtggctagtataaataggaggcctatattaaaattaattagagcatctggtatgcggaggggagttcacaagaggagagcgatcaaaacagctagggttggagcagtagtataaaaggtaatagtagacgctgagggacgtaagggttctttgacgaaaagttttattgcatcagcgaatggttgaagcagtccatggggacctacaatgttaggtcctttgcgtaattgtatgtagcctaagagttttcattcaatgagtgtaaggaatactatagcgattaaagtggtaataataagtaggagaagattgattataggcatattgttaagaagaggagttgaacctctgattttaaagttttaagtcttaggtaattgccggggtctgccatcttaaacactgtttaagatggtagagtgtgtgatgatttgttagattgagacagcatcatttatggtggcaagggtgctttgtgaaatgggccctgcttctcttgtccttttgtactaggagaaatgttaaatagttagaaaccgacctggattactccgatctgaactgagatcacatgggactttaatagttgaaaaaacgaacccttaatagcggctacactattaggatgtcctgatccagcattgaagctgtaaaccctgttgttgatatggaccctagaataggattgtgccgttatccctaggataacttattccgttgatcaaattattgggtcagtgtgtgttaacttgcttagactagtgcggtcttagtttaggtagtttggaggttgaattatgctctgaaataaaagaaaatttttattttttttgttttttatttatttattttttaagacagagtctggctctgttgccaggctggagtgcagtggcacgatcttggctcactgctatctccacctcccgggttaaagccattctcctgcctcagtctcctgagtagctgggattacaggcacataccaccacacccagctaatttttgtatttttagtagagacgggatttcaccatattggccgggatggtctcgatctcctgacctcgtgatctgcctgtctcagcctcccaaagtgctgggattataggcgtgagccaccacgccgggcaccccaaccaaaatttttaatgcaaagatagtaggctagggcctgtaggctttttttgagtttctatttgcattaatgaattaaagctctatagagtcttctcatcttatttgtttatactgcctcttcatggataggtcaatttcactgactgaaagtaagagacagctgaacccttgtgtggccattcatacaagtccctatttagggaacaagtgattatgctacctttacaatgtcaggataccgcagctgttgaacatatgtcactgggcaggcggtgcctctaatactggtgaagccagaggtgatgtttttggtaaacaggtggggtaagatttcccgagttccttatactttttgtaatctttccttagagcatacctgtgttggattaatggtataaataatagggtatttattctttattaatattaggctgttaactatcagtggattctggtttgatataagcttatgcaatggagaatgtcttcgtgttactaatattaacattattgcttctattaagtaatagattagtctaatgtaatgttaggagttcaatagagtgattaggatttaaaataattggatgttgagcttgaaagctttctttttttcttttttcttttttttttgagacggagtttcgcttttgttgtccaggctggagtgcagtgacgcaatcttggctcactgcaacctccgagtcccgggttcaagcgattctcctgcctcagtctcccgagtagctgggatcacaggcatgcaccaccatgcctggctaattttgtatttttagtagagatggagtttctccatgttggtcaggctggtctcaatctgctgacctcagatgatctgcccacctcggtctcccaaagtgctgggattacaggtgtgagccaccgcacctggccttgaatgctttcttaatcggtagctgcttttgggccaactacggtggtaatattttttactctctggaggaaggttatttcctagggtctaaacagctgtcccaaagagggacaatattaaggatgggagatttgtctcctgtaaaatgcatcctttctcctctgcaggttatgttcacctggtcctactctgaatgagaatctgctggtttttgaaaggcctgctctgtgatggagggattgcaatgcccagcaaggtgtgggcactttagttaagtcctcagtgtctgagtcacacctctcccccagacagatcaatacagctggctttctgctcgagagacggccagaggccaggcgcagtggctcacgcctgtaatcccagcactttgggaggcccaggcaggtggatcacgaggtcaggagtttgagaccagcctgaccaacatggtgaaaccccgtctctactgaaaatacaaaaattagccgggtgtgggtggcgcgtgcctgtaatcctagctactcaggagactgaggcaggagaatcgcttgaatccgggaggcggaggttgcagtgagccgagatcgcaccgctatactccagcctgggtgacagagtgagactccatctcaaaaaaaaaaaaaaaaaaaagagagagagggagggggccaaagtgggaccagcttggggctgggtactgtgctgcacggtgtgacagctgtggatctggggtgggagcagccacagaccttcctgcactgccctaagccaacaggaccctgatgtgctctgtgtccctggcagctgtggtgctgagaccttgactgtcgagggggtttggtttacagattattttgtcaccgaggtaatgagcatagtatccaataggtagttttccagtcctcaccctcctcccactctctaccctctagtaggccccagtgtctgctgttcccctctttgtatccatgtgtacttctaagctcccggttacaagtgagaacacgtgttatttgggtttctcttccattgttaattcgcttaaaataatggcctccagctccatccatgttggtgcaaaggacatgatttaattcttttttatggtggtgtagtatcccatggtgtatatgtatgacattttgtttatctacttcaccattgatgggcatctagattgattccatgtctttgctattgtgaatagcgctacaatgaacatatgtgtgcgtgtgtctttttggtagaacgattattcctttggctgtatgcccagtaatgggattgctgggttgaatggtagctctaagttctttgagaaatctccaaactgatttccacagtggctgaactaatgtacattcccaccagcagtgtataagcattcccttttctctgcatcctcaccagcatctgtcattttttgacattttagtaatagccattctgactgctttgagatggtatctcatggggattttgatttgcatttctcttatgattagtgatgagtattttttcacgtgcttcttggccacatgaatatctgactgctcttctaattctgttctgctcagctgcacttgccccgctccacgttcaagtgtttagctctggctttcaggaatctctgttaccatacctct

SEQ ID NO: 1243111 - DNA, 4001 bp, Homo sapiens
atcccaaagttccttgcaaattggctggagagggagagagactgtcctagtccacttccacgagcaaaatctgctgctctctgcagtggttgctatgaggctgccagtggtggtgggtggtggggtgcgggaaggcccatccggagccagctctgggatcggccaggggagggtggtctgtgttgcccagtcccttaacaggatcctggggccagggctgtgatgtccacaggacaggtggggactgctgggggccagcggaggggcccagatgtacagttgcaagagatgggggtcccagggggagtgcaccatgaggggcagggggtggggggcatctacaagccgctaactgggtagtcccaggccaggctggcttcaggcctcttccgggggcagagatctggcagctgtccctggggctgttgtcctggcagcaccgggagcctcgaactccaacctgccagcaacccccacccctcacggggcctgtcctagcagcactgtactgggtggtgtcacccccatccctggcctggtgggattctgtgttgtgcacttggagaatctgcgctgggctgtgggggtgggggcccttgggagatcctgtggggtgcctcgttctttccccttctcccagcccccaaatcctgccccttcatcctaggctaaggaaagggggcacggcaggagggcaggaatactggttcctggcccccaccctatcactggagctgggccctctctgcctagtcagcgtagggcagccctgccaaaccctggcctcatttggggagaggaacccactaattttcccaggaggaaaaatgggggctgaggtcaggggaagggtccaatagtctccttagtgaccttgagccatttccaggcctcagtttccccacctggtggggtgaggaatgaatgggtggttggatccagcctgaccttaagcaatcctgggagacaaggagggctcggagctgagagcccagggtggtaatggggtaggaaaagcgcttccttggggttgctccaccgaccccaaccttcatcccgcctcctcccaaggtgatgatcaaggcctatccttgggatgcagggacattcagcctggagaccttggagtcctggagcttcctggggctgtgggggtggggcggggctgggggacgcagtctcacggtcgggtgcagaggcctaggtcggcggggaaggagttaacggttctccgctttattattttttcctgctttggcggtgacagcattgtctgggctccggggccgtgggggaacatggtggtggaagggggcggaggccggtaagaccccggactcgttaaagggccctagagtcggtcctggatccaaaccccattcatggtttggcggtctggggcgcagggagcctgcgtgtgcacaggctcgggtcaggaccccacggggccaccgcgggcaccgcacggacaccccgacacacgagcacccacacccccagacgggcacccggagacacgggcgcccagcagacgcaggcaggacgcgctcagacaaggacacacagacaccgcggcgcgcggccacacgaggctcggccacccgccgccacgcgtccccggggggtcccgcacccgtcgccgcgcgcccggccccgccgcgccccggttaccttcatgtcgttgactatggcctggaagagcccgcccagggcgccgcactccttctccgccgtctccatgctctggctgggccgggccgcggcggcggctaggcgcacggagcgcggggagcagcgcaagggagggggccaggccgcgcgggcgctcgctccgaggccgggccgggcctcccgcctccaggctgcgctcagcggccggccgcgccgcgctccggggtcgcgggcctccggcgggcggcgcgggccatgtcgcagcggggctggcgggcggcgcggggggcgcggcgcgggcagctcgcggcgcagcctcggcgcggggactgacggcggcggtaatccgagccgccgaggatcgggcgtcacgtgggcgcggcggaggggggaccgcgaggagggagggaaggagggcgggccgcgcgggagggggctgtgggaacggccgcgcgggcgcaggcccattcacggccagaaaccagggctttgaaatccgagcccgggcgctgccagactggtccggcgagcggggccgacgggcgcgggcgccaccgagggtcggggggcggcgctgggcggggcccgccctgcccacgcaggagcgggactggcggttgggcctcggcccccgggcaggggctccacgatatcttctggcctttggtctggggcggggggcttctcgcgcttctaaagacaggcagtgggtacagtggcgggatggggtcggtgcatgggctggatgggtggcatacaccgcacacagcagggcgcggggtatcgtggagccgcccgccttgggacgtttcatcgcaggcacagaccttcctcaagttcggacccttccaagttccttggctccttctccaagtggtgccgatgccacccggatggggtgcccaaggctgggcatttggggggcagtggtagtctcctgggccttgaacaacctccttcttcgcgggtgggggctaatgtcggacctgcagagcagagctggagtgtccttggtctctgctgcctgagtccacggtgggtgcgatgcacacacgtgcatggggtagcaatgtcaatcgcagcctgtcctggagactccaggcagggaaacccaccctggggggcagcacgatgggggagcgcactctggggaagagcaggcacaagctccttctcgcctactccatgggccggagggagccaattacaagctcattaggagaccaagcccagggttcccaaagcctggggacaggtggtaccactcccggtgaggaagggctttcagctgcagcagtggttggggcacctgcccctccctggactgctctgggcttttcctccccttgccccgagatctgcaaagtgttctgcagtgtgcattgccctttcatccaggaactcctggggctcagctcccatgtccccagtggggaactcccattgccccagggagtcaggatgagaaaggcagattggggaaggcagggttcaggattccagggcaggcagtgcatggtgctctccaggagggtgcaggttccagaggtggggacctaggctctaggcccatggctccactcaggtgagtgcagggaccaggccctggggcagccagtactccttggggccatcatgaaacccgatctccaggacagagggtgaggcccccggacagctgcacgtgtcagctgggaaggagcaggccggctcgggttgagggttttctgttatttctttattggggtgggggtggggtgcatcattcagatctttgtgctggtgcctacgtgcatacaagtacacacacacacacacacacacaggcatgtgttcacgtatgtatacatatacacacaaggccagagctctagtgtgctggaggaggggcaagctctttttccaagagggtattagaaagaggttgattccagaggatgagtggtctctgaggctatagccccccactgggtgggcagccagctctgtgagaatgccagggtgcagctgacagcgctggaggcctggggactggactctgagaggagcttgggcagacacagcagcctccggccccaacactgccctgggttggcaggcccagccctggtcctgacaggcaggtccttgagctcctcgggagggcgtgacgacccttagtgtttcatgggaccactcggtgggccctcctccgtgccaggcctgtcagaggacaaccctccggtccaggtggtccccacgcccgctccgctggtgccgcacttccaggtgcttgttctggaccttctcaaagtgctgcagcagctctgcgtagtcgatgctaggggagt

SEQ ID NO: 1243112 - DNA, 4001 bp, Homo sapiens
tttttacaaaagtgcaaaagcaattcaatagaggaaggatagcctttctgggctaactggacaaccttggatcacagacttaaatataaaaggcaatcctgtacaacttggaggaaagcagacaatcttcaggacatagggctaagcaaagaggtcttagacttgacatcaacattgatacactgaacttctttaaaatgaaaaactggctctttgttaagaggacaaaaagattagctagtttgggagacaatacctgcaaaccacatgtccaacaggagactaatatctagaatacatattttattttttttcagtagagacgggggtttcaccatgttggccaagctggtctcaaactcctgacctcaggtgatccgcccacctcagcctccccaagtgctgggattacaggcttgagccagcgtgcccagcctagaatgtgtaatgaactctccaaacttatagtaaaaaagcaaaccatccagttcgagcgtggacacagaatatgaagagagatttcaccaagaaaacccacagatggcaaataagcacaaagaaagatgctccacgtcactggccaacagggaaacgcgaatgaggaccacagcaccctgccagcacatccctaccaggacgcggctaaaatgaaaaacagcaactccaccaaatgctggtgaggatgcggaaaatctgcatcaccgtagggatgcaaaatggcccagccactctgaaaaacaattagacagtttctttaaaaaaaaaaagtatatatataatatatatatgtatatatacacacacatacatctatataggtgtatacatatacacacacatatatctatacaggtgtatatatatatacacacacacaaacatacatatatacatagaaagagagagagagacagagaggcatatatatatatctaccatctgacccagcaaccgcactcctgggcatttatcccagaagaatggaaatgtatgttcacacaaaaacctgtatacaacattttatggcagctttattggtaagggaaacacaaaaaaattagccagtcgtggtggcggcttctggaaagaaaagaaagaaagaaagaaaacgttagatgctctttgcggggtgaggccttggctagagagagggtggtccatggattccacggactggctcagcaacagaggggcaaagcactgatacaatcccggggcacgtccacattctatgctgaatgaaataagccaaactcaaaagatactgggtgggccacataactgcgattccagtttcagaacattttgaaatgacgttacagaaatgagtggtcagtggcggccaggtaaccccggcgcgaggggaggggcggggctgtgaacgcacaggtgcggaccggcctccccggcacggatgtgggcctgcgggccccccattaccgctccttggaggttaccgctgggagaaacggggcgagggagggacacagggtctcgggctgggggagcagtggcgcgatttccgctcactgcagcctcgacctcccgggctctggccatcctcccgcctcagcctcccgagtagctggagccacaaacgcgcaccaccacggcggattcttacgattcatgggaatcgatgattgatgatttcgatagttcggtaatcgctaatgggcaggcgccgggcgaccctgcaggggcggcagccgtcgcgggggaacgggtggcgccgagcttgtcacgcgaaggagcgcgcggccccgcccgaccaccgccgcgcccctccctgagcctcagtttccccgtctgtcgaggccctgggagggcaggacggagcgcgccgccgaatcagcgcgcgacccccgcgtacccggcctcgctcccggccatccccgtcccaggccggcccgcggcactcacagtacttgatgaccgcgatgttgaccggcgctgtacaagtgactgccgccagcggcttctccgaggccatggtcccaccgcgcagtgaccccagctccacagccacttacggcccgcgatcccaccccagaggcctctgcctcctcacgcgctaccacaggattggcccgtgcgagcccggctgctcgcgcgccgaccaatcagcggcgagtcgggcgcacgcattacctctcagccaatggacgggatcggacgatgggttgctgacgtaggtccgccccacccgcagggtgcgctcgccaggcctggggcgtggtgttgtctgcgcaggcgccgtgtgcccaggcgcctggcgtccgcgtcggcgatccggggtctgggcgcggcgaggtgggcgctgttgcctgtgggggctacctgtctgctggtgctgtgcgggcttgtgcggggctgtgcggcagctgtgtggggcccgtgaggagctgtgcggggggctgtgcgaagggctgtgtgaggcgctgtgctgggggctgtgcggagaccttgaggcgctgtgcggggtccgtgaggctctgtgtggggcgccgtgtgggagactctgcgggggccgtaaagggtccgtgaggcgctgtgtgcgggttgtgaggcgctgtgcggggaccatgaaggggccgtggggcgctgtgcgggtgccgtggggcgctgtgtgggagggaggctgtgcggggccgtgggacggtgtgcggggctgaggggagggcgggtcgcgctgtgccctccttgaagctcttggacggccccgctgggtatgggggtgcacacaggcccgagggcaggcgctggaggatgtatcccgggatccactcttaacccggcagccgaaggcaccctgtcccgccgcccacagccttctccgcgccatgtcctgggccaggatcccccgccacggggctcacacgaaagaccccggggcggggaagccccgcagcccggagctgggtccaacctgcattaaggtgggcgtctcaaataccccctgtaaggccctgtaggagcaaagccttggactgggttgcggcgcttgtgtgtgcattgacttctcctgtgaaacgtacaggaacatttaagcgtgccgttccctgccattcattccaatcatgtgccacgcccccactatttctagagttttctcaccccaaacagaaactctgtccccttaaaacaatgacttcccattttccccttccccttttaaaattttacctttagtttttaaatagctcagattggctgggcatggtggctcacacctgtaatcccagcactttgggaggccgaggtgggcggatcacgaggtcaggagtttgagaccagcctggccaacatggtgaaaccctgtctctactaaaaatacaataattaggtgggcgtgtggtgcacgcctgtaatcccagctactggggaggctgaggcaggacaattgcttgaactcaggaggcggaagttgcagtgagccgagatggtgctgctgtactccagccagggtgacagagcaagactccatctcaaaaaaaaaaaaaaaaaaaaaaaaaactcagatttcggaaaataggggagtatgcagtgtgaagtgtccactctgcctagccacctacttctattaccagaaccatcatacttataaattctttatttttttccagaaatagaaaaaaagtctgttttttttctcactctgttgctcaggctggagggcagtggtacgatcaaagctccatgcagcctcgacctcctggctcaagggatcttcccacctcagtttcctcagtagttgggactacaggtacacaccaccatgcccggctaatttttttcttaatttttttgtagagatgtgggggggtcttgctatgttgcccaggctgatttgaagtcctggcctcagggaaccctcccatctcagtcttccaaagtactgggattaggtgtgagccactccacctggcctgtcaattctttgtgtattttttcattgacgtgcatagtacaagcacatagcgtgttctcccaccttgctt

SEQ ID NO: 1243113 - DNA, 4001 bp, Homo sapiens
accaccctggctaacacggtgaaaccccatctctactaaaaacacaaaaagttagccgggtgtggtggtgggcgcctgtagtcccagctactcgggaggctgaggcaggagaattgcgtgaacctgggaggcagagcttccagttagccgagattatgccactgtactccagcctgggcaacagagtgagactccatctcaaaaaaaaaaaaaaaaaaaaaaaggtacaagaatccctatatacttttcacttggattccttaagggttattgtcttaatcattcttcattttctctctacacacacacttcttcccccaaactgtctgcacctaagtggacatgaatgtctctaaaagttccccatgttctgctattatgctttcaggatcaagcagcactggttagtaaagtcagtaagaaaaccattaaatggggctggacacggtggctcatgcctgtaatcccagcactttgggaggccgaggcgggcggatcatgaggtcaggagatcaagaccatcctggctaacacggtgaaaccccgtctctattaaaaacaaacaaacaaacaaacaaaaaacccaaaaccattaaatggccagaaggtaaaggtggaagaacaggtaaaggaatgaaggtgggacacccacctgctcaggcccaggcctgaggccaacggggacaagagcctggctgtaggttcaggcctgtgatggcttctcctagaacaggcacagcctggggcctgggcttgtcactgctgctttggcactgcccaccagtgtctggcaccgggtgaatgaactgcttaaccttggcacatgtcatttaatgccagactggctgggcacttctggtaggctctggagcctgggaaggtgagatgggccaacagttctcagaaaagaggcaggtgtgtttggggcatgtgtggaggatgggggtggctggaggtgagtggaggtacagtgagtcaattccacccttggtgagagccagcaagtgtctctccccacccctcccactgccctggtttgttttccctttagaactcggtacaggccgggaacagtggctcatgcctgtaatcccagcactttgggaggccgaggcaggtggatcacctggggtcgggagtttgagatcagactggccaacatggtgaaaccctgtctctactaaaaatacaaaaattagccgggcgtggtggcgggtgcctgtaatcccagctactgaggaagctgaggcaggaaaatcacttgaacccaggtggagcttccagtgagccgagattatgccactgcactccagcctgggcgacaagagtgaaactctgcctcaaaaaagaaaagaaaaaaagaagaagaaggcagcagtatagagcccaaggcaggtggaggacaggtagggtggggcatagggagtgaggaaaccaggtaccttttccagcacctcccctgggtacagggggaaggggtcctgggccagccggatctcgaggtcagcgtggcgaagccgaacttgccctgtgacatcaaacagcaccaagccctgggcatcccgagacacagggttggccactgtgcagtagtgacgtggggggacggtcaccatgcgcatgggggcaaacagtaccctgcaggaagatgagaagaggtgtgaggacctgggaccaggtctccactaccaaagaggacaccaaatgagagagaaacctctctatcgcccaagcgagggccactcctgcttgggaagagggaggaggataaggaccatcatgccagccaaacaggcccccacatccccaaggatcccccacagcccagcccccacacccacctctcattgtcctgccggatgtaggtctttggcccgacctccacacgggacacgttgctgttctggtccagcacatggatatagtggtatggggggatgcggatgatgaactcttcagttgccatggtgactcctaagcccagggctcacaagaagatgactggtaggtgggggagacgacacaggatgaacctggggagcctggggtggggcaggcatgaatctggtgacagactctgggtgggatacggccctacctcctccagccaggccactgcacccttccctgtccgcatctgcatgcccactgctccctgtcttcaccccacccaagacgacacagcccatcctgaccttacctttgccaagaactgcttgatgcagtgagccacagaggcccagggttccttgccaattcctttccctcactcccatcaactacttccccctacactgccaccggcactgcaaagagcttcagatcaaggtgctcccagtctcttacggtggagagatacagcaagctgggaaactggggagccatggaggtggtgacatggccttgtccagcacgcaatgggcagctgctctgaggagctgcctggctcctccagagggaggcagccctttatttcagagaatcctgaggccccagctgtattcaaatgtcagcccatagccaaagaatatctgtatgcctcaggtagtccagtggctaggattcggccataaacaaaaggaatgtttacatgagctgtgtctatgttccctgcctctttcctatgctttagtaatcctgggctgaatgtgaagacctagtccactgctcataaagggatcccagatggaactgagccttccatagaaccagctgcattactaacactgcaaatcactctggccccctcgtccccagttctctcccatcctcagctcctgcagttgtgagcaagggtagggtggaaaggaaggagaagggggatgattatcatgttccacccacccatcccacctgcttctgaatcctgagtagtttcacccagtgcttggcctgttcaggaatgtcacatgccctacctaagccccacccctgcccccagcactttggactttggacatgtccctttgagtcacacaaatgggaccaagtttactaggtgctccagagcctcatccttaagagactcaggtcagacttttttttttttttttttttttttgagacggagtcttactctgtcacccaggctggagtgcagtggtgcaatcatagctcacaaaagccatgcctcagcctcctgggtagctgagactacaggtacatgccaccatgtctagctaatttttttttttggagagatgaggtctcattatgttgcctaggctggtctcgaattcctggcctcaagcaatcctcttgcctctgcctcccaaagtgctgggattataggcgagccatcacacctggccgatgaggagcctcttttgtctggtggtggcctcaaaaatgtctggccaggacaggtgcagtggctcatgcctgtaatcccagcattatgagaggcagagtgagactccatctcaaaaaaaaaaaaaaaaaagtggttcctcatcaattccaccatctacccagcctccaaccccaggtgaaaaatataagtgaggggaagaagggagtggcctggccgaggaaaaacaggcaggagccacagattacagaatcaaggctggatacagcccaagaggagttatacttgagccccacgatctgtaaaacttcaactttttgtttagaaattgtgagtcttcacaaaatcccaattcctgattcacttgaagaattagaagaccagcaatacagcctacagtcaagcagcagctgccccatttagatggaacacaagctttcccacctaccacagtccccaccaccccctgctgccttacagctatgccattgcactgcccagctcttgtttaaaaaccctttaacttggccgggcgtggtggctcaagcctgtaatcccagcactttgggaggccaaggcaggtggatcacctgaggtcaggagttcgagaccagcctggccaacatggcgaaaccccgtctctactaaaaatacaaaaattagccagttgtggtggcgggtacctataatc

SEQ ID NO: 1243114 - DNA, 4001 bp, Homo sapiens
cctggtttaccccctttaggagatgattaatggaaattgagaatgtgtctcataaattactttttttttttttaaagcagcacagttttaggaacttttcgagacagaacagctcagccagcctagacttccacttgtcctccctcctcccactcctgccaattaacaccagtcaccagaggcaagaaccgcctagatcagaagcgaccccaggaaccaggcttcagcacccctgatcttcatcaatattttctcaacttgcctaatcataggactgagctataattctttaaaaaaaaaaaaaaaacaaaaccccaaccacacacacacaaacagagacagggtctcgctatgttgctcaggctggtctggaactcctggcctcaagccatcctcccattcgggcctcccaaagtactgggattacaggcctgagccaccgcatccagccctaggctggaattcttaaccccactcctgctgctttttgcaggcctcacttctgactcactgggtctaagtttccgggagagagcctctggaccctgtgttctaggcaaacgcccctaagtaacagctcccacttcagatgagcttaatctgtgccaggtagtgttaagtgccctcaattaactcatgttatcctcacaagaacctgcaagttaagaaatttgcccaagagcacacagttatcaaaggacggagccggaagtccaacctggctataactgtagagaccacaaactaggaggcagtggcttctcaggcagaaacacaaagattctaagccgagaacaagaactagaggacctgggtggggctgtgtactgcccagatggtgctaatggcagttcaaaggtgagtgtttcctgtaagttgggccagcgcccagcctctgctcccccagaacctgggagggcagcacccaagataacctgagcaccccgttaccttggagccctgaggctgtctctgggccacccactcaaggtggcccccctacctgctcaaggctacatacagagggctgtcctgcccaaacagccacacccgagggccgacccagtgctctgtgtgccaagggagtttctggcagagccacctgataccccacgtgacagctggcctctcccccatcacccaggggctacccaggcagagagctgagaacacaggggccatcagcctcgctatcacctccacccccaagtgcttggctccccaagggacagctctaaaatccccagaatctcaggctggtgggtccagctgagcatcctagttttcactttctcctcccaaaaaggaaagaaccttggtcactaaattctacgccttctggaaatcactctgctaatgacttcctgaatgatcgactgagaccaacagctggcccagccctgcatggaggagtaagaaaccctcatctgtcagagttaaggggcctgaatgggtacaggtcacattcttggagctcaaggtgacaggccagagcccaggtccccaggacagtgcaggtgagtagagcaagcaccgatctagggctaagatggggtctgaatgaccctgtaaggttccccacctgatttcccaggtgggaccctgaagtcagagagaggcctgagagttgcaggggggtgggggaccggtgttggtgttaatctgcctttacttcaaaacccagaagactcccaactattggaaagtgaaacctccaaaagcaaagccaccacccatcctccttccccactctgattcagacatgttttccctgccccagcagaagcaaggcccttcaaagcaagacaggactaaagagagcctcaagggatacaaagatctgcccctgatttggggtttggggggctagtacaatgtactcacatctagaagtgcaggtagctgcaacaaacgcctcagatggggaactctcaccctgccttggggatcacttcccggcagggcaaggcaggccaagcccaggggtggggcttgggagttaaagggcccgtgtgcagctggttctcattttatcctccgggctgcttctgctgcagctgaaggcacactgctccctgagtgctcatgggtttctaccttggagccagctggctgcactggagtgggactgggaggagttggagggcccgagatgggacaggtgctaactgagggcacctctacccatctggctttcattttccaatctgggtgagtacaattctgcctctcccttcaagtggggcctaactgttgagctacagctacagcccctccttttaagagatgatagctctgcatcttttatttcagactcagaaaattcagtccaggtctctgaataggtgttcaatagaaaacacacactcacacactctctctatatagatgttcaatagaaaacacacacactctctctataggtgttcaatagaaaacacacacacacactctacaggtgttcaatagaaaaaacacacacacacactcacactctctcttcctctttcccgcaacgtgctgtttgggagcttgaggtttctctcttcttcccaagtttctcaatgtctgggctggggaaggagggcccaggctccagcaggtacggacactgcaccctagaggcaggagcagtgggaatcagtatttccgctgccgagggaagagactactcccggaggatcggagtggggggctggcggggctggggtcctccgagtccaggctgaagaggtccctcccggtacgaaggatctgctcctccagcttcttgtgtctcttcatgtccgacagcaccttgtccaggcgggcctcccgtttctggctccgggctgagcttcctggagaagaggaaggtaagatacatggaagggatggaggtggtgtacaccatacctgcctggacctcactcatcacttggggagctggttaaacatgcaggtccccaggcctctgtcttggaggacctgaggttcagggttggacctcagagagggtgagaagcaaagatcttgattgacaggaaggcacaggtaatgtgaagaacagggaggaacatactgggcaggggaatggcaagggtagaggccccaggacaagaacagagttctgttcaaagaagagtgcaggccgggcatggtggttcacgcttgtaatgccagcactttgggaggctgaggtgggcaactcacgaggtcaggagtttgagaccagcctggccaacacaaaaaattagctgggcgtggtggtgggcgcctgtaatcccagctacttgggaggctgaggcagaagaatcgcttgaacccgggaggtggaggttgcaatgagccaagatcgcactactgcactccagcctcggtgacacagctacactccgtctcccctactcgccaaaaacaaaaacaaaaaaaagagtgcagagaactggaggtggcgggaaaagcgcttggattctcctttgacatgctcttccctggcaagatggaatcccttggaaaattttaagtggaaaagtgacacgatttatggctgagtgcagcagctcacgcctgtaattccagcactttgggaagctgaggcaggcactttgggaagctttaggtcaggagttcaagaccagcctcgccaacatggcgaaaccccctctctactagaaaatacaaaaattagctaggcgtggtgacgtgtccttgtaatcccagctactcaggagactgaggtaggagaatcgcttcaacccaggaggtggagattgcagtgagccaagatcatgccactgcactccagcctgagcaagagaaagacttcgtctcaaagaaaaaaaaagtgatatgatttatgttttaaaaggttcatctgaattgcagaagctggaagcagagagcccagttaggagctactacaactatccaggcaagaaagacagtggcttggatggggatgtggtattgaaagtggagactagcagaggtacttggaaatgtacatcttatagctacca

SEQ ID NO: 1243115 - DNA, 4001 bp, Homo sapiens
cctcatggaaaacgcttccataaatgggcatgtttgcctcaatctctgccctcccacggaaaagtaatgataacaaatccataacagataccttgtacggaataacacatctatttcggacatgataataaaaaaacatggtgtttacaaggcaagcctggcggcttctcggaaaagacccagctagttcacgttctggactctcggcatggcagcccacctagggtcactggtttcagctaggtcaccccctcaatcaggggacaaacagtgccttttattttaaatgtgcaaaaagtcagtttatgttttcttcaaaggacacggtgataaacatttactttgttggaagcatttagtcccaccagaaacctgaccccaacaagtttgtgtccatggtaaagaagaaagatagtggggtcaagggtatgaacttggactcaaactgacccgggaatgggttctaccacttgctggctgtgtgacactttacctctctgagcctcagctgccttgtatactaaacaggcatcataaagcctttcttatgaagttgttgcaaagattaaatgagataaattaagttaaatgttgcaacagcatgtggcactgaagtgttccatcaacggtagctatctcaaagggaaaacatcaatttccttcaaacaaaattctctatcttatttcacaccctgccacctaatgactttcagttcagcgtcaagttccgtctctgaacaattctaaaatagtatcgttgagtaaatcaaagaaacaaaaaactatgcaaagcagtttattaatagcctgcattctttttgccaaaccccggacggacagttcaccatttaatctctcagttcttcatactgcaactaaacactcccaccttgggtttctaaatattttcttttacttcttgacaagcatggctttggatggtaccttttctcaagtggcaaaatccctaccagaccctgtgctggaagaaaacttacaacaggcagtagccacactttctctcgttttacccatttggttgggcacgagagtggcattgacacaggtggctctgcgggaaattctagtgtaatcttacctaacgcacctgcagatcgtggaagcaaatggagactttggagcccacctgggtatctgggggccctttggggtcaacctgggtgagttgttttttttttttttaatttggagaagaggaaaaagtgggctgtaacaaactagatcacaaccagccttatctcccaggggttctcaacatagaagaacctcccctaaactgattaaaaaaaaaaaacaacaacactcctttctgctaagcctatgcccatgtgtttttaactgatttaatgcattatcaacacaactgtgcaatacggtcaaatccacaaggagcctcactttgcccttctgtgtgatagcaagtgacttttcagtgaagttcagctgtaaattttttggtgcctagaataaaagtgagatgccttgattgtctgcaccggacctctgagatttccaagggagcatatctcctggattagcctcttaacaagaatcactcgggactaatttttttttttttaaggcagtttttctggggattctagagttgggaaatggagttgggtccaggcattgatatcgttaataagcacccccaaaatggtacttctcactggcaatcttaagaaatgctgtttggggaaagtctaggataatctaagacgataaggcagagagagatccaaatcacaactctgcccccaccatggcccttacgaggttgacaacagggacccctaagtgcaccccagcccctatagaataccctataggacttttaacacccccctgccctgcaatctgcccccagaatgacaactactacttacagatctccaactggggggactagtggagaggaaactggatggcgagctcggatctgacgcacctcccaggccggagcgtccaaatctccctgcgcgtcctcggacgcctctctttatagacccggagctgcccgcggctgggaaaggggaggaggccgaaggggtggagttggggagggtccctcgcggccccctcgccgcgccccctgcagggcgcacccccggcgggagcgcaaggagctggggcgctcgggacaagggtgcacggaacaggtgcgcaccgcacaagggcgcacggaacaggtgcgcacagggacgggagtctcagccccggccccaggcggtcgcagacgctccggatccctagagaaagggggtcgagcaggcagtgtctgtgcgggatgcttgagaacgtcttccctgagtcggttccggccgcaaaggctttaacctcttcctccccgtgtcggggctgtggtggatctgacttgacatctcccaccccacttcccattttattggcatcgcactgtctggaaagagggccggctgtgcagcgtgaagggtagggaaaggggatttcttgaactttgcaaagtgcaagacaggaggcccccacccttgctgggaaccgtgcaggaaggggaagtttttacttttcccaacttgccatctccacctccacccacatcaccacgaccaaaatacaaataaaaattaaaaataagcccactgtgattatttcagctgtccccctcccctgtgcgccactcgccagctgcgtgaccttgggcaagtcacttcacttctctgagacttggtgtccatagctacaaaatgggggaaggcggtggcggtgataattacgttatttacaagatgcaagtgtcaagatccaaggagaaagtgggtgtgcccccagagtctgcgagttcccttcaacaacttcccttccccaaggattcctcgcctaaaattgcattccctgtctctctccatcacaggctctctcgctctgtctctgccactgtctctgcatgtctgtcactctgatcattgctgtctctcgctctatcttttgtctctgtccctctcgcttctctagatctgtcgatgtatctgtctctccctcctgtctcactttgtctctggtctctgtgtctcttgctctccatctctcccgcgtgtctcactcctatctctgcgctttctctctctctcttccccaggctctccgtcttctccccgtccctccctccccgctcctgtccacgcacgcacacacaggccataaaaggaagtcgaggcggtgggctggccccgcgccaggccggggacccgcgggcagcccgggcgctccgctccccgcgcggcaccagctcctccgaggttcccgggccgggccgggccgggccggtccccctccccgggagcggcgggagcggcgggcgggagacaacccaaaaagggcaggcgcggactccttcctgcaggaattcccagcgccgcataccagctctgggctgccggctccccctgactaaatatggtgccgagtggccttcctgctccccggcgtcgggggagggggcccttcacgcagccaccggccgccgttgccccgcggggctagatggggacccctctgcttggggaaggcccggaagggggcagcccccagtcccacgtgggtttctgctgcttcaggctagaggatttggagagagggttaaagttgggcagacccctcctgggttctgtacttgacgcaggcccttagtctacaaccactcctcttgcaaccaggtggaggggctgggggccgggggtgcggggggtggctttattaatacccccattttgcaggtgagaaaattgagtccctgcaggggtaaagggatttgaccaagctctcactgggacagtcattgattggtgctggcactggaacctttctgatgacaccattcacttccagagaggagacattaaagggaaatgcccaggcaaactggccttgaggcccagggcgtgtatctgagagtagatgtctggctttgaatctgccagtgctgctttctacctatatga

SEQ ID NO: 1243116 - DNA, 4001 bp, Homo sapiens
gctcagtacggacacaccatcataggactaagtacattttgatccgagatttgattgaatctgcagatgtagaacccacaaatatggagggctgactataattaaattaaatttctttattttttttaagagacagggcctcactctgtggcccaggctggagtgcactggcacaaacatagctcaccgaagcctccatttccaggactcaaacaattctcccaccttagcctcccgagtagctaggactacaggtttgtgccacaatgcctggtaaatttatttatttattttttgtagagacggggtcttcctatgttgcctaggctggtctcaaactcttggcctcaagcaatcctcccacctcggcctcccaaagcactaggattacaggcatcagccactgcacccagcataattttattttttaaagccgggctttgttagggtcacactgccctgcaggccaagtcctcagaaaaggcacggtgcagacagcgggggctagggagaggggcagctctgaaggagctgcagggcagggaggggaaggggcagcaggggagctctggcctggtgcggggaggggaggcatgctcctgtcctcggcaggcagccgacacagagtcaagcacggacccctctgaccccagctcatctcttgccagaggctggtgagtcactgcaggggtctgaaatggtggctccaggttgtctgagtgttgctaagtggctgacccctagctgtccccaaacagggtgttccctctacagacctcaccccccatatccttctcccagcagccaagcttccattagcctgcaggattgattatgcaactcttaggaacagccgctcccaggaatgccaccctccacccccaggctccggctcctgcctgctgtccccctgggtcactgtcaacactcgtctccccacaggcagctgcactctccactccctctggagctaagctcaaggttggggacaggaggtggcgggtgggtttctgagcagggctccatcaggacaaactggccactcctgcctgtcccaccccatgtgtgaaggagcagaagggcagtcacgggggtgtcagagaagtgtggtggtcctccctcccaaaccgccagcgtgtcccccacagctaggttccctggagctgccaagaccctgcagtcctggccagagccccgcttcttcccttccctggggagaatggcaggcagtgtccggactggaaatccacctatgacctgtaagtttccagctctccttttccccatcaacaggtcacacaggaaggggacaccatgcctccagctctccaaacactggctgcctggccagtctcccaccagggccggggcctcccatccagccagggcagggaagcaggaaccaacctcctcagggctgtcacctgggctgcctctcctccagggcacacgcccctgcatgaggaaatccgccacctttgatttctggaacgtggcccccaccaaagcgatggccctgtccaccgcagccaccatcctgaagagggcctccagcctggcaccgtgctgggccgcatcctgctgcatggccctcaccagctccaggacctcgggccacccagcctgggtgtcaatgtggggaaccccatcagccccgcccgggcccggtgcccgggaggcctccagcctgtgcaggccccgctccaggtggcccatgtctcggcacatgctctgcaacttctctgtgacatcttcttggaagtgcaggagctggtccaccttctcgttcagcatgttcagctttgtgtccatggttgttaagcaggtcttgcccaaccctggcagccccccatgccccagactctccttggaggttcctgacatgctggtgcaggcttgacaagggcaagagcggggaatgaggagaggcacagacccctggttctcactcaggcggtggtgtctgcaaggtcattgtcctccgtagctgacagactcctggcagcaccaacctccacgatggcctgggctgtgtgaggagcgcagaggcccaggttcttcctgtgcctttgctttgcttatctcccaccctacacgggcctgtgagtgacaggccgaggtcagcccaggcccttctccttggggcccctttgacatcacggcagcatttaacattcctctctgagaggctgctgatgggcaaatatgttaagaatctgcccagagccagcagggttcatgcaactaatggttcggaggaaaggaaagggtcctttggagaacggcacctgccagctgggctccaggagggatcccagggcggaggaaggtccttagaggcccagagccctgaggccacacacatcagagtcacaataaaaagcaagaccaagacagaaaggaatgtgagaccactcagcaaagttgtgacttctgccatgatgaaaattttgatgcttctgcaaatttaaaacaaacttcaggtgcccctactacaccagcgttcagaacatgtgtttagactgtctgtggggtggccggcaggtccctccccaccggagccctcagtgactagtcccttgtacctaaaaatagaactgagggcaatggccctggccacctgccaagcgctgtcccgagggccatgttcttcacagggccctcagggggacactcaccagagacacctgctcccccaataacaactatgcaggtatcagacatgcaatttccatactgaaacagactagcagggacccagagcacaacaggcctgtgtttcctgtggtttacaaacgtttttgccttataagcccttggttcaaataaaacgttttacagaagtatcagtcaataaagcagacacaagcagagatgctaaggttacccccgaggtggggcacagggagccccttaaagtcccaaggacgccacggagcagtctgacctacaccatttccatccagctccccgtgggcagagggcaaagcccagagaggggcatttgcccaaggtggcccaggcaggcacacggcctcctgaggatggtccagccatgggcagggctgcccccaagggagggggctttagtgtccccctcaagcttcccccttctgaataaaagcaattatgataaaaactgacctggacatttggaatctaaaagcactattagggccggatgcagtggctcacatctgtaatcccagcactttggcaggcggattgcttgtgtccaggtgttcgaaaccagcctgggcaacatggcgagacctggtctctacaaaaaataagccaggcgtggtggcacgcacctgtggacctagctactcaggaggctaaggcgggaggattgcttgaggctgcagcgagctctgatcctgccactacactccagcctggccaacagaacgagaccctgtcttcaaaataaataaatacacgaaagcaccattagaggttttgctatgttagaccattaacctatcaatgcagtgagcttgctatgcaaatgcagcttgaccacaaccttctctacctacccttctatcccgatagttgcccctgggcagcccacagagaaatccaaacccattcctgagagcacagccctgggtgtcattggtggaatgacccagaacatgctagaaagagcagggtctgttatattcaccgccactgaaaacaaacacacaaataaacaaagtctccctggaaaaggaaatttgaggggtaaccctgtgttccagtccctctggggattcaccgtgcacctcaggaggacctcatctgccacagaagactcccccacccgaccagggcagggggctctcctgacacttcacacttagcacttccctgcagatcggggctccctgggccaacctttgggaaatggctgcttagagaagtctcagaagtctaacacacccagcccctgtgcctctccccagctggtgcccataatttttgtggaataaaattcccaccagacaagagag

SEQ ID NO: 1243117 - DNA, 4001 bp, Homo sapiens
gagccacagggcccagccttggtagaaatttaaggaggctgtcagtgtgggagcagctggtggagtgggggaagggtcggaagggtgggggagccgatgcttacaacttcttcttgatggtgccctttccctcagggtccaagaccttgaaggctccggtgatcacatcctcagggtcggcacctgtgggggtcagagggcacatgaagctgatgggtccctgaagggtctgggaaaaggcagccggggccttggacccaggacactccactcacccttgagcttctccccgaacatggtcaggaagacggtgaagttgatgggaccgctggcttccttcatcatggcatccaactcctcattcttcacattgaggcggcctggagggggttgggggaagcatgggctggagcaggctcctggggccgggcctgcgcttcccactaattcagctgatcccattcatttttcagctgggtagactgaggcccaaggtggagctgacagggctggaacccaaggccactgaatttcctagactctgcagccttgaatattcccacctgggggtagggggctcacccatggctgcgaaggtgtcccgaaggtcctccttgtctataataccatcacggttctggtcgatcacagtgaaggcctggggagggccgtggtggggagggttaggtcccccatggcccagcctcagcatccctaccccaggaggatcagatgctggctctcagccaactgtcctcttccaccccaagcagagaggggaggaaggaattctaaacctttcccctccttcaagcaggtgcacattccagggagagggccagcagggctgcttttggtcagccttccagtttccccgtcccctcacccacctctttgaactcctggatctgagtctggtcgaacatggagaagacgctggagcttccgccctctactgtccttctcttggccctcttgggtgcctggagggtgagggttgaacaaaggggcccatggaccagtccctccacctctctgggggcaatggattaagagtcagaattcttcgagtccctgttcctaaagcagccctttggcctgagtctccccttccttgggacctctttgctgagggggcttgctttgattgcattccccaaattcccgtctgtggctcctgggtctccaactctccatcccccacaatgggtggaagcttccttatcttctcagtgtcctgagcctagctcctctgagcctcagacttgctgtgtgaccccagccactcatttgccctgtttgagcctctacttttcttttctttttttttttttttttgagacagagtcttgctctgtcacccaggctggagtgcggtgctgcgatctcggcttaccgcaacctctgcctcccgggttcaagcgattcttatgccccagcctccgtagtagctgggattacaggcatgcaccaccacgcccagttaatttttgtatttttagtagagacggggtttcgcctgttggccaggctggtctcgaactcctggcttcaagtgatccaaccaccttggcctcccaaagtgctgggattacaggcgtgaaccacagcacctggcctgagcctctactttctcatttgtaaaatgggatgggagttattgcctggctggtgccagagggccttaggaagatggagtacaggaatgaatggatcaggctttgagagggactgggcccctgtgagttgaatgtctgggcggattatcattgattggatcctttaggccatcacacagtctgttttccatcagtgatgccgagaaagagatgagcatccttttaactttttgttggactgggaaccagctactttctttcaaagggtgaggctgccctgaggtctaagggatctgggcaggggttggaggattctcactcaccatgtcttcagtctccggggggcaaggcagcggctccggctggaaagaagcaaggagtcagcatggggcagtccctctggggttatatagtcctgccccagggagcccttaacataccaaggtaaccttagccctgcgggtgcccaccccagataccaaaatagcccaactcagggcctctcctttcttggagggctggcagcagctggagcccagcggggaggaaggggggagcatgtcttgcgatgcatgtctcactagggcctgggcaagaagagatgttctttctcccaaagaggggctggaatgtgccagagtttagaggggacgcaacccaaggcatcattctgggagataaatgaaccagatcctgtacccctgagtggggtgggctcagatttaaacccagtaaacgtctgggtgcagtggttcacacctgtaatcccagcactttgggaagctgaggcaggaggattgcttgaggccaggagttcaggaccagcctgggcaacatagtgagacccctgtctcccttttttttttttttagacagtctcgctctgtctcccaggctagagtgccagtagtgtgatctcggttcactgcaacctccacctcccctgttcaagtgattctcctatcttggcctcccgagtagctgggattataggtgtgccacgaagccaggctaattttttttttctgtatttttagtagagacagggtttcaccgtgtcggccagagtggtctcaatcttctgacctggtgatccatccacctaggcctcccaaagtgctgggattacaggtgtgagccactgcgcctggcccccgtctctattttaaattaataaaataaacccagtaaacatgtattgaacacacacagtgtgccacgtgctaggctgggctttgtggatgtactttggcagacacaatccctccacccccacatggtggagttcatagtcaagtgtgtgtaagtgtgagggtggtgagaaagagccatctgtggaagctgagggatcaggtgggtctcctacctcccttcaaggagaggggaatttttttttcttttctttctttttttttttttttgagatggagtcttgctcttgtcacccaggtgggagtgcaatggtgcgatctcggcttactgcaacctccgccttctgggttcaagcgatacttctgcctcagcctcctgagtagctgggattccaggcacccgccaccatgcccagctactttttttttttttttttgagatgaagtctcgttttgttatccgggctggagtgcagtggcgtgatcttggctcactgtaacctccgcctcccgggttcaagtgattctcctgcttcagcctcccgagtagctgggactacaggcgcgtgtcaccacgcccgcctaatttttttgtatttttagtagagacggggtttccccgcgttagccaggatgatctcgatctcctgaccttgtgatctgcctgcctcggcctcccaaagtgctgggattacaggcgtgagccaccgtgcccggcatctaattttttgtatttttagtagagatggcgtttcaccatgttggccaggctggtcttgaattccgacttcagatgatccacccgtctcgacctcccaaagtgctcaaagtgctgggattacaggcatgagccaccgcgccgagccaagagggattttttgaggcaagatgctttgtggtctcaggttttgtgctgggccttggtttcccctctgtaaaagggagatgtagttcccatcccacagaacttgccttataactaatagagacaggaatgaatgcagaaactgacataccagagctggtcaggagcccagaagtggagggcgcagcagccctgtctaggagtatgggagtggcttcacgagggccagggagtcaggtgcaggtggaggagcagatgtgctgggcggagggcatggcctgagcaaaggcctggagagcggaagatcagaagtgttcaggtggccagaattgtgatggggctggtgaccagcccctgaggggcctt

SEQ ID NO: 1243118 - DNA, 4001 bp, Homo sapiens
acacaggacagtctcaatctcctgatctcgtgatccttccacctcggcctcccaaagtgctaggattacaggcgtgagccaccgcgcccggcctacaatgttttaagttaagctttgaagaactacacagctgagtgccccgtctcctttaaggatgtgaaatgcaaacactcacgattttttgttaaatctaagaacatcaggagatacgactactcagattcaaggacactgacattacttgacaaagcaggatgcaaaaagagggcccttcctgcccaccccgcagacagggctcatcatatgagaggcaagtatcaagaacgaaggctctggaaacaaactccctaggtctgaatcctgctgccctacttaggagatggaaaaacctagagaaacttggttacctaggaggagcaacatactgtgttgctttttggtttggaaagggggggaagtagatagaggtgctgaagaggtctgaaatgctgatttaggcagaaggtgagtcaccactttgagtttcagtttccccagctgttaattaaaaaaaaaaaaaaaggcggggtggtggtggggaggataaaatctaccttattagaagccataagggctgcacattccttctgaagcaacctgtgatgttcttaagcgttatgtaaatgttagttgtaggtaatatcaatacaaagaataacgctattttttgttaacatattaaatatccggccggggtggctcccgcgtgtagtcccagcactttgggtgaccgagatgggaggatgacttgagtccaagagttcgagacctgcccgggcaacatagtgaaatcccctaccaaaaaaaaaaaaaaaaatgagccgggcgtggtggcgcgctcctatagtactagctactcgggaggctgaggtgggaggatcacttgagcccgggaagtcgaggctgcagtgaactgagaccgcgccacactgcactccactgtgggtgacagagtgagaccctgtctcaaatagaaaaaaataggtaaacataaatcctttctttctgacattctccgagcgttttattactattaatagtttttttccgattctcaagaggaactgagatcccaaaaaggctcagaactgcagtagtggaggcccgggactgggggataaaggcttaggtggtggacgaggctgcgggcccagcaacaggccttgcgtaccatcctgggggccggggaactgacaacaacaggcgacatgcgcagcgcacccgatccgtgccacacgctgtgcctgcgcttcatacacatcccccactttcatcctcgcgacagccctctgaggtaggtactttcgtcagcgccactttacaaatggggaaactgaggctccggggatcaagccgctatccaaggtcacatggctcgcgagccgaaaaggcacgttcgctggctcccgagactgcgttcccaacccaggcgcatcgcggcggacggcgggggcggggaggagcgggagcccggagacccggaccgatcgaggccgcgggcgcgcgggggcggcggccggactcaccttggcgctgtgcaccgcctcctgcgccccgcagagctgcagccagatgcgcgcgggcagcggctcctcagcccctagcgcgccgagcacggctaggctcacgccaaacaggccctcgatacggccgcggctctgctccagcagctccgccttctcagctggcgcagtgaactcgtccagcaccgcccgggccgccatggcgggcgcggcctcccgcggcggcgccgggggccggcggcggcgacgccccctcagcttgctgccgctgctcccaagccagtcaggcggcgtcggcccttcccggccgcctcgcccccgcccgcgccccgccgcccgccctcaggcccggctataccatcccgccacgaccgcagcagcttggcaattgctggcagcgaacccctccgcccctttgccgccgccgcgggccgggccccgccgccgcgcatgcgccccggccgcagccgtcattgaggctcgccgccccctaggggaagggagtagggtgaaggcgacggaagttgacgtcaccctcagtcgccatgttggttgagaataaagggatggttttggaggcctgggcggacttctttgatgaggggaaaccgctttcgcgggatctggtggatgtagatatatgggtttatagttggggaaacttaattgccaggaggcgagactgagagtgtcacagggattggacttgacctcagacatcttgacgctcaaaccaggattctagcagttgagttattcagtttcacgttaatccacaggcagacgggacttttctttctctgtttcttcccttcctccctacccttttaccttcttagctgcccttctcacttttttctctttccctttttatttctttcagtaaaaatggtagcaagaagagaagaaaatgggcatacttacggagaattgaaaatcaaaaaaatgattaagataaattcaagaaggccgggcgcggtggctcacgcctgtaatcccagcagtctgtgggggcagaggcgggtggatcactcgaggtccggagttcgagaccagcctgaccaaaatggagaaacccccgtctctgctaaaaaaaaaaaaaaaaaaaaaaaaaaaaaaaaaaaaaaaaaaaaaaattagcgcggcgtggtggcacatgcctgtaatcccagctactagggaggctgaggcaggagaatcgcttgaaccctggaggcagaggttgcgtgcggtgagccgagattgcgccattgcactccagcctgggcaagaagagcgaaactccgtctcaaaaaaaaaaaaaaagataaattcaggagagtgatttcttctgtgagggaagaaaggggatatgttatgggagaagcccgaaaagtgggagtttgggggctcactcatgatcttccctgggactggagcaaataaaccctaacccctctccaggtctgttttctgatctgtaaaataaaagagtacactcagttatctctaaggccttttccaggcctttatattctctgagtccatgaaaacagattgtggaagataaagtgttggattcctttccttcagctaaatattgtggctatagtagataggggctctgggaatattacctctctctgttttaatttttcatctataaaatgtagataataatagtacttcctattgtgaatattaatacagcacccaacactgtaagtgctcactgaacattattattgctaacttaagcaatatatttaaggcctaattttcagggaaaatctttgtgtggattatgcaaccacagtgaacttgtgggcccaggagtctgtgccatctgtgtacatccctgctagaggaaaaagaggaggagctaaagatgctgtagttggaaataccaagggggaatggtctctgtaggaggatttacccaaggtaaaacctatgagagatccaggcttctgggggtttccatatgtctcagaaactcaggtgtggtctcccagtgccccaccaagaagtgattcagcacagggaagagaaccactaggctcacagatcaacagattcctgctcccctgggcttttcccttgatgtccacacaaccagcagccttgctccatcaggtagatgacgtgggattggctgaggcaggtcaggtggcgagtgtggcattgctgatgcattgcttgcagaaccgcagtctatcagtaaggcatgttgtcaacacagcatgttatttcctgccttattgcactcaccttaaacggaattgctattgttcagtgattagacagggctttccccagggctggttcctgtttgctcccagtgacttccctgcttgcgattcttaattgcttaattgtaagaggtgaagagggaggctgccttgaaaaacacaccacagtgccttcctctccccacttccctccaaaaaaatcccaccc

SEQ ID NO: 1243119 - DNA, 4001 bp, Homo sapiens
aatccctcctggtctccttttaggtgtaagtatcttttatcattcaaatctcctcacatccaggaactttcttccattctaatctgaagcatgctgttgctaagcaacccagataagtcacatctaaagatactctccatactgtcccggcctggtcaaaacaaacacggcaacaaagtcacttcaagttacaaccaggagaggctaaagataggacggacacagaccttttaaaaagctgtctgtgtgttttattctggcatgctgataccagaccatgccttgactttgctactttcagtgtaaaccattgtcacagaaacccacagtgtctgcaacttcagtaagatgaaactccagcaaaccacagcccaatcatgcacgccccattctccaagggcagatctgcacattaatgtagaaaatcccacaagaagggagatgaagactagccttcactgctgtgatgaacctgtctgtttggaaagataactgggacttatacagcagtctccctcgagtttcttctggtctttaatctcaccttctctaactgaacttaaagcagttcactgatatgtgtgtatttatttgtttttgccccagatgctttttaattcaaagatgttgaagactccccctctccctgcctgtgaacactgacccatatatcatagaatttctacatcacagtgctacatggactgccgcatttctagagtcgacctttggagtcacatgactttcatggttcactcagttaagcattaactaagggttttatgccttcagtgccctggtaaaaggcaaacatctgtacacggcaatgttctctccagttctggcactctgattaccactccagataccaaagcgaactactctgttgggctgttaaccttttctttcaagataaatgagtgacacaaaagtgtacgcctcaaggacttggcagagtgaaaacaaacccacgaaacggccaatgtccacgtttactgcagagtaccccttgcctgatgtccagaccctgggtcctgtctccgtttgggcacacagatttgtgggtggtcgtccagagaaggcccaccacttacccccaaattttcccagcaggacaaaccacaaaagctacagattccctttactccctgggaagtacccaatctggagaagaaagtcggagctgggggtgtgggttctgtagggccggtctgtaaagggccaggaacgtaaggaatttgtcttaacaacgaaagctgggagaataagactaggaggagacctagacggagcccctggctttcaggagttcagaggagggcaaacaagtcgcagatgactccaatcggcgcaacaagtaccaaaacaggccctgaccaggccaggcgagagcggggcgaaggcggaaatcgctgacccgacggaaatggcctggcccttcacctcgcgcgacaccccacagggtacccatgaggaccaccctctagttgcaaattgtcccgaccactcatcgcggggtcggacactgacgcaacccccaggcagaaggcccgactcccacccagcatgagagccgcgacctcctcaaccctcgtccctggccagcgcccactccccgccgccgtccccgaaaccggctcccgggaggaccgtgcgccgggggcgcgggcgcggccgggcctgcctcaccagcgcgctcgtacccggtgggcgctggcccccctgaccccggcgcggcctccccgcctaccccgccccctcggcgccccgccgcaggtccgagccccggcggccgccccccgccacctcacctcgtgggggagccggcggccgctgggggtgttgtagggctcagcgcatcctggaggcgaagggagccgggaagtgggaccgcgcggagcccgcaacgagttatgtaaccggcaggggccgcagccgggacggaggcggcagcccgcggcacttccgcctcccgctccctgccggcagcgcagcccggaagcccattggccgccgcccccacgtggccccgccccctgaggccggcgctgccgccatgttgggagcgggcaggttgggagcgggcaggctccgtgcgaagccaggcccaggatcccgtatgcggggcactggtgagggccggctccttccctgtccctcgctccgggaggtcgccgagacatggccggccagacctctgggctccccggcctagcgtgtgcggacgccggtggcgcggtttccgggccgaggtcccgcggctctaccgagtggcccccccgcacaggccctggcaggcgcatcctaagctcgcgagggcctgcagcgccggggctggccaacaactgaaagcaggtgcacaaggctggctcctggccgaccacccggagccagctggcagcaccaccccgcgacgacactggattctcagccgtccgattctggcgaaaggcagtttagggctgtccctgagtaaaacaggcaacttaagctgccctccggttgtaggggttctataatgcaagatctaacgcgaagtttttgttgttgagacagggtctctgtctcccagcctggggcgcaatctcggctcactgcagcctccaactcctggcctccgcctcagtctcccaagtagccgagactacaggtgtgaaccaccatgcctggctaattaaaaaacaggttttttgggttttttgtttttttgtagggatgggaatgtcattatgttgcccaggctggtcttgaacccctggcctcaagtgatctgcccgcctgggcctcttaaaatactgggattactgacgtgagccaccacgaccaacctgggctgtatatttcaactccgagctttccagaatccaatttgaagagaactggttataagattcgagtcttggctgggtgtggtggctcacgcctataattctagcacttccggaggccgaggtgggtggatcacctgaggtcaggagttccagaccagcctggccaacatgatgaaaccctgtctctactaaaaatacaaaaaaattagccaggcgtggtggcatgtgcccataatcccacctacctgggaggctgaggcaggagaatcgtttgaaccctggaggtggaggctgcagtgagccgagattgcgccactgcactccagcctgcgcgacaaaagcaaaactccatctaaaaaaaaaaagatttgagtctgcgtgtcaaactgtcccctagtatccattgtcctactctgccatcttctccttttaaaaaataactgctttatcatcatctagtagtaacagaatcccacccccttcagcaggcagatcactgtcaagctaggcttttatttctcagcctctcctgcagcaggatcaggctatgtgccaaaagtttcaccagtgaacaagagagagcacaatgttggcaacttctgtgtcatgtgcttaaaagaatattgctaaattgttaacaactggtgaagcgcattattctttcaaaaattgaggaggtttgaaattttcaaaataaaagatggggttaaaaaaaaaaaggaaattgctcgctctgtacttcctctcccctttcccactggctagaagatggatgccgtggggagcccaatcaatcataaaaacaggcaaaactcaggtgcctgctactcagtgcagtctgcggtccaggagcagcggcatcacctgggagcttgctaaaaatgcagaacctcaggactcagttggactgagtcagaatgggcacttaattcagaatctgcattcaacaagacccccatgtgagtaacaagcacagtacagtttgaaaaaacactccctaagtaacaacagagtaacaacattctattgtttccacggggtgtgtgtttgttttgagaccgtgcccggctgtttccagggttctaaatacagcaccgttaagatgaactggcaaacagaacagcatgtacatcccttcaaactttactctttttttgggcagggcgcggt

SEQ ID NO: 1243120 - DNA, 4001 bp, Homo sapiens
gagtctcttgttcttggtgaaagagccacaaatccagataaggagaatctcagaccacaatgagacagtgctgatgtaagaatagcattaaataggcggggcgcggtggctcacgcttgtaatcccagcactttgggaagccgaggtggatcatgaggtcacgagatcgagaccatcctggccaacatgatgaaaccccatctctactaaaaatacaaaaaaaaaaaattagccggacgtggtggcgggcacctgtagtcccagctactcaggaggcttaggcaggagaatcatttgaaccccggaggcagaggttgcagtgagtcaggattgtgccactgcaccccagtctggctacagagtgagactgtctcaaaaaaaaaaaaaaaaaagagataagcacaaaccaagaagggaaagatgactacgtgaacaccacagtgactcaaccatgaacatctcctttacttacaccttcatatacaggctattagctcttcttcaacatatatgctttggactggtctagcctgtaggcaagtttgttcttaccattcttccacctgtcctggaagcacctttactgggacttcacagctacctcttttgtgatccatccccacaaggtctagctcttagttagctgtcaagagatatcatttgtggcagatactgctagtttcttatctaacttattttccacatctctttttttcatttgtaacaaagccctaattttgtgcaggtagattatcaagggaggctaggtccttcccctagtgacaggggctgaagcatgatgggccccaaacaattatttattcttggtaataactagtttaggatgggtacatgacacaatacatgtctgtatattttacctggattctattgtcaacgttaccaacatgcttagggtggcagagaagcactgggaccttgatgttgtcactgggccaccgaattaaccaacctgtaactgctctttgaacatcctttcggtgggttttctgttacttgtagctgaaactatcctatcagatattccacaaaatcacattacctaagttgtcaaatctcctaatattgttttaataaccatgcagccattcattaagcttttagatacaggaatgtgcctggcactggaataaggaaatatgttgagacttttcaggcttttctatcaaggtacctatcattttcgtctttttttttccccaaacacctttataaactggcaatttctttcacttacattatcttataatctttgaaattaccctctgagttagcccagagaggcactctgagctgtttgcagctgaggaaagcaaagttgtaaactggccaagattaccaaccaatcagtggcagagcttggggaggagctcaattttccaattccaaatgcctacaccagggcactccctcctcccccagcacacaataggaaatgactggctctagggtaggctgcatgtgaggtatccgggggcgaacaacgtcctgcgacgctaacctatggctctattctcgcgtgggatcctgtgactaggaagctgaagcagctcgcttaggctgcagctgcgggtacaatacgtaatgcctctataacactttgagtcagagtccagcaacctggcctacaccgatgtgaacgttgtgaacgtacacaaagatactccttcatgttccacggccccaccatccgctcaagacacaaaggacagctcaagcccaggctaggcccgaacccccgccctctcaatcaccttgctctggccagaccgaaatttcaggcctacagggcactgttggccgaacccacattttgttaccgattttctttcgagttccggtgtctcccagtcttctttctgtccttcttctcggaaacattacgtccccctggggtcaccctaagactctacttcagcaggcaaacaggcccggagctcacggaggagaccccgccagcggaagcggaaatggttgcttagagaaaaggaggaaaactacctctcgcagctgcccagtggctacaggtcctcggttaaggtgttcaattggtcaacacaaaagaaggacttccccttcgggagaacttcgaccaatcaaagggcaggatggcggagagggctgagggcgggtcgcttccggcggcttttcccgcagctcctgcgtaaaggagcatgagagcgtgggagttttgcagtggccgtggcgttcttcgtcgcgtctcggtcgggcgtcgctttctgcagctcctgtcagggagcgcgaggcctgttattaaccgcggagcggtaagtgggcccctttcgaggccgggccaagaggaggagcagtcggcgtaggtttttaagggggggttcggagggaatcgagggaggctaggggtagtggaggaacttggcagcggaattggtccctttaagaactgttctctccccccgcagctttgtcacgaagtccctgtggcgtcttgaagaaggcattccccacccgccaaatggcgtccatgcccccgacgcccgaggcccaggtgagtcgaggtacctttttcgtccaagtttattgctgctttcggtctctgcctgaccccctcctttggaggagagttgggcatgcctgttgtggtaggagtgctcctgagccccaaatagccctttgaccaagtgttcttcgttccaagaccacacacataatggtttaccaacttccttctttcagaactaccaactgggagcagggacctgtggaggaatctctgagagagtttctcaatgtcttatctgtttgttttgttttgtttggagatagggtctggccttgtcgctggagtgttgcttgtctggctggagtgcagtgctgatatcatagctccgtctggaactcagggaatccttacgcctcagcctctcgagtatctgagaggcgcgcataccacagtgtctggctacttttaaaagttcttttttttttttttttgatacagagtctcgctctgtcgcccaggctggagtgcagtggcgcgatctcggctcactgcaagctccgcctcccgggttcatgccattctcctgcctcagcctcccgagtagatgggactacaggcgcctgccgccacgccctgctaattttttgtatttttagtagagacggggtttcaccgtgttagccaggatggtctcaatctcctgaccttgtgatccgcccgcctcggtctcccaaagtgctggaattacaggtgtgagccactgcgcccggcctaaaacttctttatggagatggagtcttgctgctttgccaaggaactcctggccttcagctatcctcccacctcggctccccaaagtgctaggattaaaagtgactttctggaatggttcccaaaattacagatttggtacttctccaatttgaatgaatttttaaattaagcacatttctagactccacactcgttgagtaataataaatcccaagtgattaatttatcacaccgttagagaaggtggggtaggcctggatgaagtgctggagtgagcttagcaatgagtgtcatggggacgagaggaaatagcaaagggaaggatgttgggagaatcctgtaacctttatctctttatgattcttcctgggctgcccaactttctccttttcttttctttttttttttttttttgagacagtctcgctgcgacgcctaggctggagtgcaatggcgcgatctcggctcactgcaatctctgcctcctggattcaaacgattctcctggcccagcctcccaagtagctgggactacaggcgcatgccaccacatctggctaatttcattttattttaatttattttttgagacagagttttttttgttgttgttttgtttttgtttttgtttttgagatggagtgtcgctctgttgcccaggctggagtgcagtggcacgatctcagctcactgcaagctctgcttgagacggagttttactctt

SEQ ID NO: 1243121 - DNA, 4001 bp, Homo sapiens
agaccttgtccctgaaaaaaaaaaaaaaaagaatcctggtgtgtctctaagtaacatgtttcaagaataggccaaatgaatcagtcctctctactatcttgctggcccaactaacgtgaagtaaggaggggcttattgactgctgcattttgcttctaactgcttccctttgacacttcaaaaccagttctcactatgaaagtaaagtttgggacttaaatggaatgccctcagcaaaaaccctcttttgttagagttgcttagtaacctcaactatcttctcagctctgtcatgtacagttatacctgcattagaaacacaagaactccaagaatttacaagaaaacctaagttggttataaggactgttaccctgtttcttctccgaaaagcttggaagcaggatgtaactgagtacctccgaaaaagccagaagagccttagtttacatcctggctcaaagatatggggaactctgggcaaattacctaacttctccaagactctgtttctccaactgtaaagcacaggaaatggttgctttcaagggtactctcagaactaagtgcctaaagcctctactacagcactaggctggtggcgcaaacagaagctccagtccttggggacatataacttctgttgtctcagaggctccaggaaggaggaaagctgagcagctttgttatctccacagcctcaagacacagaagacgctcaataaataaggaatgggtagtgcaaggagaaaaggcaagggtggggaagtacccaaggaccctcctgatggcttaggcctgcactgtccattaaggtagctgctagccacatgtactactgagcacaagcaatgaggctagtgttaactgagatgtgctggtaagtgtaaaatacaatatttatacgatagttttgggggggcttttttgacggagtctcgctctgtcacccaggctggagtgcagtggcacgatctcggctccctgaaacctacacctcctggattcaaccgattctccagcctcagcctccagagtaactgggattacaggcgcgcaccaccacgcccagctaatttctgaatttttaaatagaaacagggtttcaccatgttgcccaggctggtctcgaactcctgacctcaggtgatccgcccgcttcggcctcccaaagtgctgggattacaggcgtgagccaccgtgccggtcctccaagacagttttaaaaaggaaaatactcatgaccagcttggggaaaggtggcaaaaacctcgtttctacaaaaacaaaaataaaaataaaaataaaaatttaagtaaaatatctcaagaactttttatattgtgttgaaatagtaatgttttggacatattgggttaaattgtatttaaaaatcaatttcatctgtttcattttacctttagtgtggttactagaaaatttataattacatttgcggctcacatgagactagcattttatttccattggacagcgctggctgagaacaaaacctaaccctctgtgccgccctcgcggccgggatgcggtgcgccccgggcctccccattcggaaaacgaggagcctgggcgcaacggggccggcagccgccttagctacccggctggcgctggggaccccgtcccccgaactgcacaccgcgtggcgggggaaggggtcccagccctcgcggagcacctttggcccagggcgggagctccgagcgccggcttcccgcgccccgcacggcccggcccagcctggaagaaggcctgaggaaggcccgaccgcgccgcccgcgcccttaggcccggcccgaatgctggaaagcccgccggcccgccctcggctcggtgagcctcggctcacctcagctgccggtcgtacttctgctccttgagcagctttcccagctgcgccatggccgcgcctgccgcgcggaaaacagccgagcccctgcggagcgccgccaccagctccacaagcgcgcaggcgcactgagcgccccttcgccgctaccgtctcctgcgcgctgcctgcagggggcgccgcactgcactgcgcacgcgtcgccggtacgccggggcctaagcggccctggtacccgagcgggtctggggctcttggtccccatcggccagaaaggcagacccgctagcctgccaatttgccctctgtccatgcagtaattgggggcgactggggcattggaatcaggcatacttgtatttcgaccacttaactggctgtgagatctactctttacctctcaaatcctcagtgtgctcacctgtgcagtggggataaatgggtcccaagtgtcttttgaccttaaatgagattttgaatacaggaggccagactccccccaaatcttgcatgaataataactttcattttgatgatcattatttttcacccatttcttcctctcatgaaaagcccacaagcctattttgaatcacaaagctaggggctccctgctgcagatgcagacaagtccagggctctgttcttggagagtttagtctcatgaaggaagagggacagcaaacaagcacttaccagacaatgtggccttcctctagatagagggaagcagggtgctcaggggtgcacagaagaacctccccagtccccctctccaagaatgtttcatgtggtttggagatggaggagtgttttgttttgttttgttttgttttgtttgagacagggtctctctctattgctcagactggagttcggtggtgtgatctcaattcactgcagcttcaacctcccaggcagcaatcctctcacctcagcctcccaagtagctgggactacaggcatgcaccaccacacctggctaatttttgtacattttttgtagagatggggtttcgtcatggcccaggctggtctcaaactcctgggctcaagcgatctgcccgccttggcctcccaatgtgctgagattataggcatgatccactgtgcccagctggaagggtgttttaagcataaggaacagcaggtgccatctctaggaagcaaagaaggcatagcaagctgtaggtgctagagtaagtttggtcaggtgaaggatagggagtggttgagaaggtttgagagacagttgggacaggctgggttctgaagactgtgaacatagatccaaggaggaatttaaagtcctccacttcctgaaaagaccctcctttcaggaagagaacggctgtcctgtggggatgggaggccaaggaaggaggttaccccatgagaacaattgggaggggggtggtggtgctgaagacaaggtgaccatctgtgagggagacgaagactccttccctgctatctcgcagaccctacaggcaccttcaggttaataactgcctgaaataaggtgaaaatgaacacagatccccacccccaatcccctaggatggggaccagagagatggcacagtttgatggtaatgatgcagtgatgatgaattgcactttgccctgggcatggtctcctggactagggtgagagtacaccttcccataccttcccttgcccttacccagctcccatggaacacactgatgggaaacagaggtgtgaggctttcccagctcatcatgtgtttgtgctgtcacatttccttctccaagtggacaggtaaaatataagggataataaaatacactccgggaaagtaggaaggtcaaaaggcagcagatgagagttcactgcttagtttctcatacctatggacttcatgaaaggaaacacccacaaatttggtagaaggctagtcatattgcccgtgaagaagtaaatgattttgaaaaggtttgtgttggtgttgtctgtaaaatgatacctcagggtatcagtttcctaggaatgtcgtaacaaagaaccacaaactgggtgacttaaaacaagagaaatttattgtctcacagttctggaggctggaagtctacaatcaaagcacgggtgggactatgctccttctga

SEQ ID NO: 1243122 - DNA, 4001 bp, Homo sapiens
ggctctttctccctagccatcccaacctggctgctagattccccctcatgccccaggaacctcctggggcctgagtgtagctgggacaacttaacagccctaggaatctccctgttgtcagagctgaagctggacagggttctgacaatacaatccccacaagcctttgcaaacagtctgtttcatttaacagaaatgaccatcccccaacagagctcaaatccatctatggccctcaatccccaggccatacccagcccaactaccacttgatccctgttacggcccttcattggcttccttgtttctccactgctctctcccacctggtcccactcaggatcagaacaagctttatcatcaacaaatactttttttttgagactcaaataatttttaagataattttaaataattcaaatcatcaatcttgccagggcgtggtggctcacacctgtcatcccagcactttgggaggctgaggtgggtggatcacttgaggtcaggagttcgagaccggccaggccaatatggtgaacccactcccccgttccccaccccatcccgtctctactaaaaatacaaaaatcagccgggcgtggtggcacacgtccgtagtcccagctactccagaggctgaggcaggagaatcgcttgaacccgggaggcagaggttgcagtgagccggtatcatgccactgccctccatcctgggcaacagagcaagactctgtctcaaaaaaaaaaaaatcatcagtcttgatgagttgatgtttctgacaccccactcctttttcagtccctcatacacacaagcccccctgagcctctgagcctttgtgcgtggggttcctttggactgaaacgctcttcctccagttctgaccttggctcacttagtgattcatcttcaagttcccactcaaaggtcacctcggagaggcgtgttccagatcaccctccctaaaatcaacactatttacaacgggttcaccccgttggttgctttgctgcacacacagcaatcagaatgtatgttagctatttacccggcttttgttgatttttctagtaatgggggagggctgttaaggcaaagactgtgttgttcacggctatctcaccggggcgcggcacattgcctgatacaagcaagtgctcaatgatactggatgatgaataaactctgcaaggaagcgattcctatccccattctgcagaggaggaaacaggggctcagcttggttaagtgacttgaacacggaggcacggctacaacccaaatctcaggccctctgccctcgacagcacggggctccctgcctcctcacccggtgaccagggtcccgtcgcggcggatcccgaactgcgcgttctgcagccccccggagctgctcacccgccgctcgtcgctcaccacgttccccaggcactcgcccgagttcatgcggaagaagccgccgttctgggcgacacggcagtcggccgcccgcgccgtctcctccacggtggcgcgtcgtctcgccgcgcagccgccgggtccaccgggctccagcaccgagaaggtgcgcaggggctcaacggcccgcgtcaggtggccggccaccgcgcggtccctgaagtgcgacacgaaggtgcgcacggccagaccgccggcgccgggagtcgcgggaggcggaggccaactctcgtgctcgcggttgccggcgcgcacccgtgtgcagtcccgggggaggcgcgcgcgcgcgcgtggatagggcagtagcaagtcgtcgtcgcgggaggccctgcggggacgggcggccgtgagctcagggggctgtcctcgtgagctcggaggacaggggggaccccccgaaccaggctggcccagggagctgcactcaccccgagtcgaggccgccggacgcttcccagaggaagccgaatagtgcaagccggaggagaagccagcgacccgtggaggtcgccatattggaccggggcctcgggtcatgtgggctcgcctcacgtgactcaagtcccagggtggccgctttcagctcggactgaattacctgcgctcttttcggctggcgggctggcgggcggtgctggtgatgttaactttttatctccaggtaatctcaaacctacaggaagttgcaaggagagcataaagaactctcgtagaactgttattcatgtttagcagtggtttaggcttgcctgatttactcaatcatttgtactttgttttttttttttcctgaaccaatggcaaccaaattgcagatgtcatgatcctttaccccatacctcgccatgaatctcctaagaacaagggcattttcttaaccacagggcaaatatcattaggacaactcccattgacatttctgtgatgtcatccacagctaaccttcaattgtccctctaatgtctttttttttcttttcctttttgtccgcccctgaccctgtaacccaggagttgcttttagttgtcatgtctctttgatctcttcatctggaaggctcctcagccttttgtcttttactaccttgacatttttgaagacagcccagctacatgatttgtgtgactcaatgcaaaatgaaaacgtggggacacttactaaaaaacccagaaaactattaagaatttcaagatggtcagagcaaatggttgcagcaagccagggaccttctgagtgagcccatgaagctggccctgagtatagaagccagtttattttgtagcatgtacttcaagcttcctttgagaggattcttctcttcaggcctcctgtcccagtgcagtgtccagggttgggtggtgtcttggtgccagtgcagtgcgtgggccattccaggagccacggcaagtctaattggcttgatactgttgcggtcttgccagtgcaccttaatatagcagtttctccttgtctgaactagtcccggggttctttgtcctacctccaagaaaactaaggagcgtggacacaagggtggggttggagcgaacgtttaataagggaaagaagaaagctctccaaagtggagacgggagtccgagtggattgtcgggttacagctgaatgcaaaaagctttttttttttttttttttaagacagagttttgctcttgtcacccaggctggagtgcaatggtgcgatcttggctcactgcaacctcaacaacctctgcctcctgggttcaaatgattctcctgcctcagcctcccgagtagctgggattacaggcacacgtcactgcgccctgctaatttttgtattttgggtagagacgaaattttaccatgttggccaggctggtttcaaactcctgacctcaggtgatccgcctccttccgcctcccaaagtgctgggattacaggcgtgagccactgtgcctggccgcaaaaaacttttataggacactgctctcctcctggtaactgagtaacttcttaccagtaaaactgcctgtgcagctccccttatgttatgcagctgtgggtatgtctctaggcaagtgcaaatcgctgcttctcttgtttgtgtaactgtgggtttgttttagataaggccccctcctccctgtgccggtttccatggagcccactgtgtatatgcctgaaaaggagaggaaactttttcccgggagcctgctaattatgcaaagaacaaagggcttctgcgctggaccctgtctgcttatctccgtgcaggtccagcctgagttttttcccaggttgctttatttttgccagtttctatgacttttcaggcaggccacttctgaggtcagaattttccccaacggatttttcttttccttctccctcactaccacaggtatggggggacacagataggggccaggccagccccttttcatccacagtcagcacttctggtgcttgatctcaggcccctctttgagccactgctcctttgagccagtccacggtgagggttagtgaactcagttagagagtgtccccccaaactca

SEQ ID NO: 1243123 - DNA, 4001 bp, Homo sapiens
ttaagaatgaggggtctgggctgggcgcggtggctcacgcctgtaatcccagcactttgggaggccaaggcgggtggatcacgaggtcaggagattgagaccatcctggctaacacggtgaaaccccgtctctactaaaaatacaaaaaacattagctgggcgtggtggtggccgcctgtagtcccagctactcgggaggctgaggcaggagaatggtgtgaacctgggaggcagagcttgcagtgagccgagatcatgccactgcactccagcctgggccatcgagggagactctgtatcaaacaaacaaacaaacaaacaaacaaaagaacgaggggtctgaattagaaaatcttacatggttagaactagggggaacaggcagacgcagacaggatccaccatctctgcaaatagcccctctgctgagcagatcaagctgtttggcctgggtgctgctcattcacctgccccaggcaccctgacccccagcctcccagatggcaggtgaattcgaccagtgggaaaagactggtgagacctggagtgtctcggggtcaccgctctgtgacgggaggaagcagagaaaagtgtttcggatcagccgggcaggagagatggtggagcagcctcctgtgccttacttggttaatttggaagtagctcccgtcatcttcaatgcgaatcttggccacgccacttcccgcccttttttccactttgacaggcttgatgcactcctagagcaggaagagaccccaaatcagcccctgtgagtgggcggaggttccctgggaggccaggcctcaaggatggctgcccagccgcacagcctgaaggctctgccaggagccatgcactcagggactgaggctggtcccaccgtcttcttcctgccccactgctctcacccagggatcgggttcccaacatcctgcggcactgaagttcccagtgtgcaggaaggccagtgctaacagcgcctgcaaactacccacctgcggagacaccaccaacactgaccttcacccttcacgtgaacagggggcgtgaccaccacagagaccagagttgcactgcccatcgagaggacgtgtgcttggatctgtttggagaccacctcctgctcagtgcccgggaaacaagtggatttctctctcttctccttgagaaccctggcagcccagaaagccgcctcccagctcatccctgccggaagcgctcccagcagcccgcctctcgccctgctcagctctggccccgcggggctgttggacatggacaggcaggtgcacccagaaaagggcgcctgcagcctcccgggttcaagggtagctgtccggcccaccagggcgacgttaaggacagctctactgaggagccactgcggggcgtctagcgggccgcccctactgccctcaaatgaggtggggtccccaccgcacccgtttatgcagatgcaaaggctgtggcttgggggtcctgaggcctgacaaggcgtcctgcgcaggggaaggggaagaggccccggcccgggccccgccgccctccagctgcgacccaggggtcgggttagggttagggatgtgtgggagccgcctctgctgcctcctctgggttgggcaggccggcgcgagcccgcgaccacgggaccctcccacgcagcccgcccggacaccatggggcacaggagcgggttggggggcgccgccctccctggcctcagtttccttgttggtaagaagcgggcctcagtgtctgaggccccgcgcccgggtcgatagagtccctgacggcccagaccgggctcccgggattcggatctcattcctcaggggaggaagtggggcgcagagcaatttccctccgcgcgacagggcaccgagcgcagcctcgaccccgcccgcccaggccggcccacctgagacggcccgatgaagtcatccaggtccgtcagctgcagcgccccgctgaagggcgacgccatgacggccgcactgccgccgcgcgcaggtgtcgctaaacggcgcgaaacgaagtggctggttccgccacgctgccggaaagcgcccccaggacgcatgcgcacctcgtcccggggccggcgccctctgctgacgagccccggcgctgcggctccccgcccacctcgcgggaacccgggacctaccgcttcgtccacctcccgcgcgccccaggccccgggttggggtgcagggggcgcaggggttggtcgggccagcgccgcagctccggccccggagtctctccgccttcacaaggaagcggaggggatctggctccgtccatttcctcatcctctgcgtacctgcggaccaggtgctcccggatgcaacccaagaacccggaacgcgcctggcacacaggaggcgctcagctcgtgttggggaattcaggcagggaagaaagcatggataggcacgaggtctccccttcctggggagccgctcccagggcctccagcccctttttctgttatcttggagaccagtctggaaaagtccatgcccctgggagaccctgaaacaggaccctgtgggccgactcgcttttcgtttttttctttttttgagacagagtctcgctctgtcgtccaggctggagtgcaatggcgcgatctcggctcactgcaagctctacctcctgggttcaagcgattctcctgcctcagcctcccgagtagctgggactacaggcgcccaccaccacgcccggctaattttttgtatttttagtagagacggggtttcaccgtgttagccaggatggtctcgaactcctgacctcgtgatctgcccgcctcagcttcccaaagtgctgggattacaggcgtgagccaccgcgcccgaccccgactcacttttttttttttcttttttgagacagagtctcactctgttgcccaggctggagtgcagtggcgcgatctcggctcactgcaacctctgccgcctgggttcaagcaattctcctgcctcagcttcccgagtagctgggattacagtcacctgccattgcatccggctaatgtttgtagttttaattagagactgggtttcaccatgttggccaggctggtcttgaactccttacctagtgatccacccacctcagcctcccaaagcgctgggattacgggcatgagccaccgcgcctggccagttacatgtatatctggcatcatatggccagttacatgtctaatggccagttttatggggacttttcaggaaactcctggatcgaggctggcatctttccggcccaagcaggctcagcccatggagatctcacagtggcaacatcctaggtcccagcctgcgccgcaccctccccagggttctaggccctgattctgaccacatgtccccacctggatgcggcctgggcactcctgcacctgcctgtggggtttgggccaccagcctgtgtggccttctccatcacctgcagctgctcctctcggccagacaggactttcttctgctgctgcacggaggagctttccccagcacctgggccaggtgagcttccaggtcccagccatcccgccacctggcaatacctggccgagcttggagattaggggctgaaatatcttctattaaaaatagaacagggggtcgggtgcggtggctcaccagcgctttgggaggcccaggtgggtggatcacccgaggtcaggagtttgtgaccagcccagccaacatggtgaaaccccgtctactaaaaatacaaaaattaggctgggcgcggtggctcacgcctgtaatcccagcacattgtggggctgaggcaggtggatcatttgaggtcaggagttcaagaccaccctggccaacatggtgaaaccccatctctactaaaaatataaaaattagcccagcatggtggtttgtgcctggaatcccaggtactaaggagggtgaggcaggagaatcgcttgagcctgggaggtggaggttgtggtgagctgaga

SEQ ID NO: 1243124 - DNA, 4001 bp, Homo sapiens
gtgtctgcttggtaaaaaggaatctaaaagaaaaatatacatataaagaaaatgtggtcaagctcgttggctcagccctgtaatcctaaagaggccgaggcgggaggatcacttgaggctaggagttcgagaccagcctggccaacatggcaatatcccgtctctactaaaaacacaaaaattagccaggcatggtggtgggcgcctgtaatcctagctactcaggaggctgaggcatgagaatcggttgaacccgggaggtggaggctgcagtgagccaagatcctgccactgcactccagcctgggcaatgaagcaagactttgtctcaaaaaaaaaaaaaaaaaaagtaaaaaggaaatgtgtctgcattctttgatgttttctggctaaaaactattttttaaaaaaagcaattagaaacctacaattaccttgtttcttaagatttttagttaatatggcttgtgttgaaacatactcaactgaaataaaatggggaaaaaacacctctgaagagtagcgtatttgtttggtactttgaaaaaagccaaaacgctagaaacgggtttttcatctattctaatctccacttggaaaatactacctatacacagacataatgaagatttttttctttttctttcttttctaaatagtgatagggtttcaccgtttcccagtctagtctcaaatttgtaggctcaagagatcctccctccgtagcctctcaaagtattgggaatacaggcctgagccactgcgcccagcccacagtcaagatttagtcagcagtaataaatacctacgcagggagaggatgtgtgcttgtcatctgccttctggaaaattaaatacaggcacaaaggattcttcagctacatgtctgatcctgccctccacaatacccgtctacagggatgtttacagggatgtgttaatccccacgtaatggggattgcctattgaaataacctcccagtaaggatttttttgggcaaaatattctcgtttggcaatttcgacttactgattcttttgcaaagtcaacttgtttctgggcaaactttaaaaataaactcctaaggtagcatttagctagcagctagcacatcctaaatcgtgtctagatttaacttacacaatatgtgctttgcttttttcctaatttgcaacagaaaatagtaatcagctggtagtttcagaaatcacccttttgctgagtcttaaatttttttttattccagggaaacgtgaagattgtggggcgctatttttttttttaaagcaaaccacacagcatatctggccacctaaaacacaaagtgtttgaaactaaccgtaagatttcctttctgctcgcccaacctgtcactggaaacgcagtattcatttgtaaccagctttggagcagggcttttaaaaataacgttttcttgctaaagtccccaaaaatctcttgattcttggtggcaatgtccagttgagtctttgcacacactgtatttttgccaactgggtcgcaactttgcgagaactccgggggacctcgtaggaagccaggttggcagttatttttttctccacttgccactaggttgcactagatttaggatgctggggaatatgcgccatttaatttttaaaaataaagtaggaccatcacgtgacgagacccgagagaggaaaaaaaaaaagccgaagggacagggtttttcattgaaatcccgttcaaatcgccttccctccaaagcctgaaagagctgaattctattaaatcctggttggcaggttttttcctcgggtccacgtcacgagctcattctccgcttcaaggttcctttcgactccacaacgtgaagccagggggaaggcctccttaaactgggggttttcgccaaaaaagccagggtcaccccccgggaaagtccctatttaggggtttatcgggaggggactgagcctgacgaggctgcagggccgcgaggccccgccccccccggggttcccagcatgccccgcgcggacaggacgcggcggcggaggcggggcgaggaaggggcggggcgaagaggagagaagggcgtcggttttgcgacaggggcggtgcggtgcggaagcggaagtgaagggtgcgcttggcggcggcggcgggagctgcggagtcgggaatcaaaacaaagggcctggggggggcggggggaaggcggcggggccggaatgtgagcggaggtggagccggcggcagaggtgagtttgcagacagtcctgcgaccagaccccggcaggctctgctccgaggccagcggggcgggacggaggacagtgtcccctctttccccgcctattgctggtgggatggtggtggagaggggaggttagctaactgggacgcgccagttgggccccccacgaaagagttggcttgtctccctttcgggtccattcactactgtcactgttggcgccgctgttccccttcgagggcatttggctccccgcccgcccctgtctgacccctggtggggccctccaggagtgaagtgcacagctggaaggttaagagagaaggaaaggggcgggtgtttttgcaacacactcccccctccccggccgttttgcattctcctcggccttttagcaacacatagggtgtagtctcagggttgacaatgtctagggcttcagccactctcactagtagttgtaacgcgacctcgtgatacaccttttagagtttctcaagcacctttccggtattaccaagagctgtccaattgcatttgtgtcttttggacttctctgagcggtaaatattcttctcttttgcatatcggtgtattgaaacctaaactgttttcctatttattaagctttattcgttcaacagttatttattaaaatatgccaggcattgtactaaggacaggagttggaatagtggataagaaaacatagtctctgctgtcatggagtttatagcctaatgggggagaaagataataaaataagctaaaaaggccgttttggacagaagagctatgggggagaaaacggtaatgggatggggtggtgtggggtcaaagactagattgggtgctaaggaaacaacatttgctaaatgttccccgtggattacctcatgtaatccaaacaacggccttgtaaggtggtttctattattatcacacccattttagagatgggatctgaggttcagagaggttgtgagttgtccaaagctgcaccgcagtcaaattggagaccaaaatgcagacagtcgacagagcctatgctctcctcattgaattggtcaaaagacttgaagagagtgacagaaaggagactgtcgctcaagtcaaacagaacctgcttttggctacctaagttgcttcgtggatggtatttgggaagttttcagggtgcaggcacctgaaagtttttacttttaatcgcttgtattgagcagtattgaaggcaccttgatgtagtggaaaggggtgaacaagcctaatcttgtgtcaggctcgctacaaaacttcattaagtttctttttctctctctgcaaaaatgtagctaatttctcccctgtctatttcacaggattattgcaaaaattatataagaggatcccaccgtctgggtttttttcatcattatattccttgtgccaagcacaggcctgctgcatagtagatactaagtaaatatttgctgaatgaagacataagtaatgttaagtgaaaatactttataaactagattatactgtgaatgttagctcactttcaggatttggctttgaagaagtttgagagaatgtttaagttatgaacactgtgaatatcacagattcttacgattttgagaggagttttttgggggacataaaacctgtatctaataggaaagacaagaatcgtaatttactatcagtggtagcagttaaatccatctccaaattaaccactcccaatagtgtgtagtaggtaatgtttac

SEQ ID NO: 1243125 - DNA, 4001 bp, Homo sapiens
ctctacataaaaaataataataatgatagagtcgggtgcagtggctcatgcctgtaatcccaacactttgggaggctgaggtgggcagatcacgaggtcagaagtttgagaccagcctggccaatatggtgaaaccccatctctactaagaattagccgggcatggtggcacgcacctgtaatcccagctactcaggagggtgaggcagaagaatcacttgaacccggaggactgaggttgcagtgagtcgagatcatgccactgcactccagcctggacaagaacaagactccgtctcaaaataaataaataaataaataataaataacacactttggaaacaaaaataagtcaagttaataaactgttatccaacatgggataaaatatatgaatcacaggcccctgagacttcagcggcacagatcatctgcatttaatcctacacaaaacacacactaagaggaaaggctcaaaatgggttgtaggccggcacggtggctcacgcctgtaatcccagcactttgggaggccgagggggcagatcacgaggtcaggaaatcgagaccatcctggctaacacggtgaaaccccatctctactaaaaatacaaaaaattagccaggcgtggtggcacgcacctgtagtcccagctactccggaggctgaggcaggagaatcgcttgaacccgggaagcggaggttgcagtgagccaaaatcgcaccactgcactccaacctgggcgagagtgagactctgtctcaaaaacaaaaacaaaaaaaaaaaaaaaaaaacgggttgtataccaacgaggtgatggaggctggggtggtcgggtaacaagaggctttaggagtagctgggatctaattaatcttcaaaacacccgacccatgtcctaaaatgccatcctatgctagaatacactataacaaaactaaaaatgatgaacctgcctaggtcgtgctgcaaaggccttttctttagaaagttaaaaggggcctgaggctcaaagtagaaattaagaggcacaacctggtagtaaccacggacaaagcaatcaaggaagctcaggccctcaggaggcagaaagcctgagatggctcggagaagataaagtcgcctccccaaaagcggtgtcaaggtgacagcggggtttcccaggacctcagagactcaggtcctcagtgagcccagccatcactcaagctgcggaataagcattttcgtcctttacccaatccctccccaaagtgctgtcagaagaaacctgaaccgtcctgcggcagagacgggagcaaagcggagagcagactgccccaaacgtgttcccggagggagggagcagggtgggtttttggaaagaggcctgcaggggcgggacagtgggtgtgagggcaggggcaacgctgcaatcgaggggtctggggtcgcagagaagcgggtggcaggatggaggaataggagagagagagaaaagaaacgagggtcatctaggagaggagtatggggaggaaggaagaggagaaagaggatggagcctggcagcggggtttggggaccggcaaggcttaaccacccaggaagtcccggaaggagaagagggcaacggggtgggagagagaccaacgcagaaagagaaacaaagttgccaagggcgaggggccagcgcgaggaacgcaccggtggcaaggcactcagtgcctaactttttaggacgggaggctccagggaggcgggattttggagcccagggaccgggggagtccaggcggccgggaagcgacgcgcaagcgaggggcgtaggggtccctgccaggcggtggcccggggtcccgggatcctggggcggggcagaggagcttttcagccgcggtggaggtccccggacagccaccccgaccccagccccgcgcagcgcctcacttacccgagcaggggcggcgaggccaacgcggcggcggcggcagaggcggctgcgaagggcggtgcggccccggccctccggaccccgcccccgccccggagcctgcggtcggcgcctcccattggctgctgctctacggtaccgcgtccgcctcggccaatcagcgcagagcagcgtcgtttggaaacttttttcccaggccgggcgcggcgcggccaagcggcgaaggctcctggccggagggggtttgagaggcgccggctgccgggcgctgggctgcggcgggctggcgggcattggagatgctgcagaacgctgcctggacacccgggaaacgggtttgggcttgcgggccgcgcatttcaggaaaatacgccggcctctccttcacttcgattgcattttcccattcttgcactttctccaaatcagaaggaaagacaaagattcaggcccactgaagctagcagtgccccgtgcccttcctactcctttacaccaaaagtagaatcttcagcatcattatcttctccagaagcaggagaacgtagtgcaccagaatttggtcataaacttggctttgagtcctagtcctgccccttactaactgtgtggtcttgggaaagttgtttagcctctatgactccgtttccccatctataaaacgccattatgggtctggcgcggtggtcacgcctgtaatcccagcactttgggaggccaaggcgggtggatcacgaggtcaggagttcaagaccagcctggcacatggtgaaaccccgtctctactaaagatacaaaaaattagccggatgtggtggcacgcacctgtaatcccagctactcaggaggctgaggcaggagaatcacgggaaaccgggaggtggcggttgcagtgagccgagatcacaccactgcactctagcctaggcgacagggcaagactccgtcttaaagaacagacaaacaaacaaacgacattatgcagaggactaaatgacttaacagcatttgtaaaaacgtttagaacagaaatttgaacttagtaagtacaatatatgtatttgttaaatgatcttgattttgtttatttatttattttgagatgaaatctccctctgtctcccaggctggaatgcagtggcgtgatctccactcactgcaacctctgccttctgagttcaagcaattctcctgcttcagcctcccgagtagctgggatcacaggcccgcatcaccacacccggctaatttttatatttttagtagagacggggtttcaccatgttggccaggctgctctcgaatccctgtcctcaggtgatccacccacctcggcctcccaaagtcctgggattacaggcgtgagccaccacacactgcctgaagatcgtgatttttaaatggctgtgtgtgccaggcacaattctcacagcaaccctaattgttcactaacaaattaaaattaaaaaataatttttttcttttcgagacagagtttccctcttgttgcccaggctggcgtgcaatggtgcgatctcggctcactgcaacctctgcctcccagattcaagcgattttcttgtcttagtctccctagtagctgggattacaggcgcccaccattacgcccagctaattttttgtatttttagtagagacacggtttcactgtgttggccaggctggtctcgaactcctgacctcaagcaatacacctcagtctcccaaagtgctgggattacaggcgtgagccatgtaactcagaaggcagaggttgcggtgagtggagatcacgccactgcattccagcctgggagacagagggagacttcatctcaaaataaataaataaataaaatcaagccaccatgcttggctggaatttctttttttctttattttcttctaaaacatcctgtcataacatgttcattaacaaataccgaacattctggttagtgggtacaaaaatagagttagaatgaataagatctagtatttgggagcacagcagggtgactacagtccacaacaatgtattgtacattttaaaataactaaaggagtat

SEQ ID NO: 1243126 - DNA, 4001 bp, Homo sapiens
gagccgagactgtgccactgcactccagcctgggcgacagagtgggactccatctcaaaacaaaacaaacaaacaaaacacccatggaaccgcaagccttccctccagggggttaacaagttcagtggcctgcgcggttcccttccaagttgggtgagctgggcctgcctcaagtgagctccacaaagaaaaagttggcaagggattggagggggtgccagccccgtggctaactgggctcagcgctggaacttctgagcacccagtcagtttccagtgtcccaggaacagcttccacctttccttctctacaagtctgtcacgagctattgctgatttatttatttatttttttgtaaagatggggtctcgctatgttacccaggctggtcttgaactcctggccttaagcgatcctctggcctcagcctcacaaagtgctgggattacaggcatgagccactgcgcctggcctgctactgccgatttaataaaacctcacccaacgtaccccacccccaccttctagccccctcccccgcaacacacacgcacattccaggccattcagcctccatacctctccccgaacaagcctctctcacaccccagagcatgggccattcccttgatcctgaacccataatgccacctccttcttcattaacaaaaattgtttttcgaggtcttcaaaagctgcccccgactcggattccaccgtttcctgagcgcacccacagacggctgccccttccagccttgtaacagggctccggggctctgctccctcatcggacattaaggtcctggaaggcagtgatcagccccctcccccaggtgtcggaggacacttactggaatctgtgctcatctgacatacacggatggagcacctataagtcccagagctggaggaaaccgggttgctttcctttcctcctgtctgggtctctccacaccggggagaacacagaagtcactcctcgaatcctcccccccgtccctgctccctttcccacctcctcttcctgaccgttcgctcttgctctccagccactgccccctggatgtgagtttccagcagggcaactgatcacttctccagaggagccccaaggctgagggtccccagtcagtagggtccaatctggcttcccacttcccaggccacttggcgtcgcctccactcccagcaagaaacttctcccccagagaaagacggctcagattgtcacagggcgcagaaataagaggtccatggcgcgggtcctgccagaagcccacgggtcctttcttaggggacaagcgacactgattggagggcaggagccctgagctagctttcagggtcctaatccgagctccgctggtcagagaccccatggggccaccccctgaccggtgctcccgcagcccggacgccagcgccagggactcgccacaacctcaagtcctctcccggggctgggctccgcacacaaacaggtagcacaaaactaggacttagttggggtccgcaccccttcctgctcagacccgagccgccccagtccccggccgccgcgcccggagtccgctccaactcggaaagtggcggccggctgcggggcaggcgggcggtacctgtgagcagctccagccggtgtcccagcaccttcatctcggcgcccggcgcggcccggctctgggtggcggcgtcggggcagcgcgctcggccgagccggggagaggagcgcgggagacccggagcggagcggcaggagagcgcggagcgaagcggcaggagcagctcacagccaggagcgctctcccgcccccaacgccgcgctcccccctccaaaacggtttaaaaaaatccaccaattgcatggccgcgcacccccaaaaaggcacccgccgccacctggtcccggtgaactccaggaggcggaggaagggcgcggggtgggtgcggtgacaccgtgggaggtggtcccccgtgcccgccgcccgaacaaagagaccccgccgcctccgggcgtcgcggtggggggtcgcggacggcggctgggggtccccagcgcggccgggaaggcgaggaaggagagcgggagccgcggggaggagggggcgccgcccccgcggaggcgaaatggggcgggagcgagtcggtgcgggactcgcggggctagggtcgtgcgtggggctggggtcgtgctcggggctgggctgggctgggcggggacgcgcgcagcagccgcggcggcgagagaagctggccctgggctcaggggcgagggcgccgccgactcaccgcggagatgcggacgagacagacgcgcaggcggggagcggggcttcggcgccgccgacgcgcgggtgcaggtgcgggcagccaggagcccctccgcgtgcccgcggctgcaggggcggaggccgggctgggggcggtgcgccgcgggggcgtgcccgcgtgggtttggcgggtgtgggcgctcggcccgcggggcggtgccgggcctggggctagtcccggacggaccgcggtccctcgcgcgtggcttccgccttctgcgcggctggggtgcccggtgggcgggcgggagggcgagcggggaccgcgacgcggagcctgggggacaccccggtcgatccgcgcccccgccgacttctcacccgctccgccgcgcggactgtgctgggtgcgctgcgaggccctgcccgcccctccaggccccctgtggccgcgcggcgtcgggttcccgggggaggggacggcgctgccgtagtctttgtttagactcccaaggggaaccttagacctgcagagacatccccatcccagcgcccctgcgcctgctgcttcgcgctacccgccgtcgccgcctgggaaccgagggagaaaagcccttagggtcgggaagaaccaggggctcaggggcctctggggcgtcgtccccctccccccgttttcggagcccgagggtgtccttgaggaacttgtgcaggagtgaggagggacatcccctagcaaaggtgtcctggtccctcagggtcccaccctgaaggtggggaggtctctgctcccctcaattcacctccattatctgagcgggaaagggaacatggggacccgtctcttcctcaggctcatcctgctcggggccccgaggcactcctccctcctgccactcccctcaccagccctcctttggtcccagatgaagtcccactccagggagtacggaaatctgatggcctgaaaaattttatttggacaagacagctaaagacagggctcctggagaaccgggttctattcaggctcggccggtgaccttgggcggggctctgctcctccctgggttccagtcttttccatgcaggactctgttggaccaggtcatcttggaggtccaggatggcggtggggttgggggtgcagaggggcctgcaggcttccgggcccttccgcagacctctctctgggctggtttgcggagacgccctggttttcctttcccccagctccagggggctgtggccgtgaattaaccgatccaccagctgaggaagctggtaagattttggtggccccagatggggcatatgttcccgcttgggttacagctttgtccttgggttacccctacagcttggggtgcagtgtataaatcacaggaggcagcaatttgggttccttgctctgcggaaatccctgcctctcagtttcctcctttgcaaaggtgtggagggaggtcggtgatgacagaagtgaacctctatttctgacacctccaccaggcttagttctatatatagcagccaggagccagtccttaggagcacaggctggtcctacagcttcctggctgtggaatgtttggcaagctgcttaccctctctgagacgtcatgtcatactctgtgaaattgggatgatgctgacctcaggattcctgtaaagattaaataacagaatataaagaaaatgcttaatatagtgccagacgcatgacttaa

SEQ ID NO: 1243127 - DNA, 4001 bp, Homo sapiens
ggtcaatcccagagtagggagggcaggccctgccaggtgccagtctcaggggccagggcggtgcactgaaggctgcatgttcacaggagatcaggttccacccgagggagctcctgaccaggcagccctttcacagccacctgtgagttctctcagctctggagggtggggctgcaaaagaactgcaatgcgcctcctgctgcataaaggacagttatcctcctggggtcagacgtcgagagcccagggcggtgccttccaaacccagacccgcagcgtgcgggtccgcctgaggggtgtgaggggtgtctgctctctgctgctgaggaggccccactgtcttctcccagccctggtgtggccgcccctgtccccatccccctgaggtgacgtgatcaggctctactagggctcatctcccaggatgggaagggctggggctgggcctgggcgtcaccgggctacctgtcctacgaagtccagtgaccttcgctgaaccctgctgcgaacctccctaacgccttctctcaccctctgcggagagctcaggactcagttcagcctgatcgaagccaaacatccccgtcccttggagcgctgcgcaagggcagccccacaagggccacagcgcggtgcactctgaggcccccaaccctcagggccgagcactcccattggctctgggtgacgtcagagccggccccgcctccaggtaggcgcaggcgggaagcactgcggcagcaggggagggggctgtggcggctcctctcggtcggtccgtctcccctcgcctgtgaccttgagcactggaggggagtggggctttgagccgggctttgcgccggtgtgggagttggtgctggtggtgctgtggttcggcctgtcagccgcatcaataattcaggggacagggtctgcatgggcgggcaggtgctgacgtcgtcacctccgtgcgtgcggggtgacctatcgtctgcggaaccggcagggcaggcgtgtggggcccgggggtgggggtgagtctgcccctgcctctccctcctgaggaagaatggggccggggtacctgatgccccggcgagaggaggtgccctgggctccacctggggtcccctagccctgccagcttcacggctccagcgttgccttcccccacctacaaaataaggcaggcaggcaacccctcctcgttcctccccagcagggacccctgcctgaaaggctgtcattcctgtgtggcccagacctccttgcctctgcccggctggcgcagcagagccctgggaactgtgaggtggctcctaaggaagaggccgcctgtccttcccatcacactggcgcagccatccaaacaagctagacggccgcccactgggacggcagcccctgcacgcacagacccggcacgcacactgggcacacagcctcgggggctcaccaaggacacccccgccccctggcctgatggccccaggcatcaccaaggcagacaccatccaagcgcacaccagagggcacacggtcagagggacatgcaggcactagcgcccgggtccacacgggcaatgcagccaagtcagacagtgccttccacgttccatttcctgcagatatgtcacccaccccccaaccacacgctccccccagcccctgctatgggctctgactagcagctgcccccagccactcctgcaaacaggatcaccagggaacctggagcactctggccgtgtctcagtgaccccagggtgaggctatttgaaggccgggctgccaccagatgtgggttgaggggggcacttcctccctgcggtgggtcataaggatgcaccatcctcccggcccaccttgatgcccgcagcgccctcactcaccccatcccagcactccggcatcttgccgagggagggaacccgcctctaccaggaaggacaaacaaaggcctgagtcactcgggtccagagggcgggggcagctcgagtgggagatggtcggctctgtgatggggcacagctcctgggccatttatacagggatcctggcccagcctagctagcccctcctccccgcagggtttctgagcagccactcgcttaccaggagccccagctcccatattggctgctgggagacaagcctggctccaattggcttctgaagtcctccttgccccagccctgtcactgctcctcccaccccagccacacatcatccttgatggtccccagcccctgcatccgcccccagcacataggcacacgccaacagctgcagctcacacgggatcctccgaatacaaaagccgagaccacacgtacagactcacccatgtcaggtacacacagggtcgtcacagacatgcacagcttaccaatgcggggcagggcagggtgcatgggcactgcccagacagctagagcccttgacccacaccttggggagtatggagggcccgagagggccccaagcccaacatcttggggaccagacccccacgcccagccttcccattaggaaggttccatcgcttaaccttgtggaggcctggggagctgctgctttctggggcaacttgggttatcaccctgcttcaaggggctgctccttctccacccaccagggatgaaaatcccaccttgcccacgcagatacagggggtttccccacatgctgaaaatggagtttgggggccgggggccaggggccctgggcagatagcagggccaggggtatggtcaggcacacaccagctctgccctccccaccctcaccctgctgccaggggctccagaccaccagggagaggaagcggggctaggaggcagcttgctgacattgacatgcccacctcctgtagacccacccggccctcgttcccagaggcaaccagtttggggcttggctctcgggtctctggggagcagaacactaggtctatctcaggctccgtgccctgttctcctgggcagcaaggatctgggtggcgagctcgcccgaggcctgcaggtggagtgagcagaggagaagaaaggccaagaagtgcacaggaggagaggaaataggccagagagggaagcagaggagggggcccaaggctgggagagcaggagccacagagagaagggggctgctgcgtgcctatgctcccaaatccatgaagattatatgtattatcgttgcaactgcctgtgcagtaggcactgctgtttctcccatttatatatggaggctcagagaggttgactgacttgcccaaggtcacacagcaaagaagtggcagacctatgagtgggatcagggtttggctggcaagacctgaccctgccttgtctggccacgataactgcacaactgccagaaaaggggccaacagtttggagaggcacacagactgccccatttctctcctgccagggcctgggcaagggtggggtcagggcacagagcctgagatagccctagtgtcctgctccccagatacccgagagccaagccccaaactggttgcctccaggaacaagggccgggtgggtctacaggaggtgggcatgtcaacgtcagtagctgcctcctatccggcttcctctccctgtcttgctgaagaaggaacacgccactcaccccagcccatgctgatggccctgcatgctgactggctgcccttggagaaagtggtcatctcttcatctctgggtacctgctgacctggtcgacacctgctatgtacactattgctggtcatgtcctctgcctgggggcacctattccatctctcacctcttactctggaggcctagggaagactgacaggccctgtgctccccagggcagcaggaagtagaatggggagtccccctggcccgtcacctcctggccatgctccccattcctgcaggcactgtggcacaggaagaggcttggaaaactgaggcacagccctgccctctgcccacaatgccctcccatgtcccccaaggccccacccaatcctacgcccactc

SEQ ID NO: 1243128 - DNA, 4001 bp, Homo sapiens
attacaggcatgagccactgcgcctggcctgctactgccgatttaataaaacctcacccaacgtaccccacccccaccttctagccccctcccccgcaacacacacgcacattccaggccattcagcctccatacctctccccgaacaagcctctctcacaccccagagcatgggccattcccttgatcctgaacccataatgccacctccttcttcattaacaaaaattgtttttcgaggtcttcaaaagctgcccccgactcggattccaccgtttcctgagcgcacccacagacggctgccccttccagccttgtaacagggctccggggctctgctccctcatcggacattaaggtcctggaaggcagtgatcagccccctcccccaggtgtcggaggacacttactggaatctgtgctcatctgacatacacggatggagcacctataagtcccagagctggaggaaaccgggttgctttcctttcctcctgtctgggtctctccacaccggggagaacacagaagtcactcctcgaatcctcccccccgtccctgctccctttcccacctcctcttcctgaccgttcgctcttgctctccagccactgccccctggatgtgagtttccagcagggcaactgatcacttctccagaggagccccaaggctgagggtccccagtcagtagggtccaatctggcttcccacttcccaggccacttggcgtcgcctccactcccagcaagaaacttctcccccagagaaagacggctcagattgtcacagggcgcagaaataagaggtccatggcgcgggtcctgccagaagcccacgggtcctttcttaggggacaagcgacactgattggagggcaggagccctgagctagctttcagggtcctaatccgagctccgctggtcagagaccccatggggccaccccctgaccggtgctcccgcagcccggacgccagcgccagggactcgccacaacctcaagtcctctcccggggctgggctccgcacacaaacaggtagcacaaaactaggacttagttggggtccgcaccccttcctgctcagacccgagccgccccagtccccggccgccgcgcccggagtccgctccaactcggaaagtggcggccggctgcggggcaggcgggcggtacctgtgagcagctccagccggtgtcccagcaccttcatctcggcgcccggcgcggcccggctctgggtggcggcgtcggggcagcgcgctcggccgagccggggagaggagcgcgggagacccggagcggagcggcaggagagcgcggagcgaagcggcaggagcagctcacagccaggagcgctctcccgcccccaacgccgcgctcccccctccaaaacggtttaaaaaaatccaccaattgcatggccgcgcacccccaaaaaggcacccgccgccacctggtcccggtgaactccaggaggcggaggaagggcgcggggtgggtgcggtgacaccgtgggaggtggtcccccgtgcccgccgcccgaacaaagagaccccgccgcctccgggcgtcgcggtggggggtcgcggacggcggctgggggtccccagcgcggccgggaaggcgaggaaggagagcgggagccgcggggaggagggggcgccgcccccgcggaggcgaaatggggcgggagcgagtcggtgcgggactcgcggggctagggtcgtgcgtggggctggggtcgtgctcggggctgggctgggctgggcggggacgcgcgcagcagccgcggcggcgagagaagctggccctgggctcaggggcgagggcgccgccgactcaccgcggagatgcggacgagacagacgcgcaggcggggagcggggcttcggcgccgccgacgcgcgggtgcaggtgcgggcagccaggagcccctccgcgtgcccgcggctgcaggggcggaggccgggctgggggcggtgcgccgcgggggcgtgcccgcgtgggtttggcgggtgtgggcgctcggcccgcggggcggtgccgggcctggggctagtcccggacggaccgcggtccctcgcgcgtggcttccgccttctgcgcggctggggtgcccggtgggcgggcgggagggcgagcggggaccgcgacgcggagcctgggggacaccccggtcgatccgcgcccccgccgacttctcacccgctccgccgcgcggactgtgctgggtgcgctgcgaggccctgcccgcccctccaggccccctgtggccgcgcggcgtcgggttcccgggggaggggacggcgctgccgtagtctttgtttagactcccaaggggaaccttagacctgcagagacatccccatcccagcgcccctgcgcctgctgcttcgcgctacccgccgtcgccgcctgggaaccgagggagaaaagcccttagggtcgggaagaaccaggggctcaggggcctctggggcgtcgtccccctccccccgttttcggagcccgagggtgtccttgaggaacttgtgcaggagtgaggagggacatcccctagcaaaggtgtcctggtccctcagggtcccaccctgaaggtggggaggtctctgctcccctcaattcacctccattatctgagcgggaaagggaacatggggacccgtctcttcctcaggctcatcctgctcggggccccgaggcactcctccctcctgccactcccctcaccagccctcctttggtcccagatgaagtcccactccagggagtacggaaatctgatggcctgaaaaattttatttggacaagacagctaaagacagggctcctggagaaccgggttctattcaggctcggccggtgaccttgggcggggctctgctcctccctgggttccagtcttttccatgcaggactctgttggaccaggtcatcttggaggtccaggatggcggtggggttgggggtgcagaggggcctgcaggcttccgggcccttccgcagacctctctctgggctggtttgcggagacgccctggttttcctttcccccagctccagggggctgtggccgtgaattaaccgatccaccagctgaggaagctggtaagattttggtggccccagatggggcatatgttcccgcttgggttacagctttgtccttgggttacccctacagcttggggtgcagtgtataaatcacaggaggcagcaatttgggttccttgctctgcggaaatccctgcctctcagtttcctcctttgcaaaggtgtggagggaggtcggtgatgacagaagtgaacctctatttctgacacctccaccaggcttagttctatatatagcagccaggagccagtccttaggagcacaggctggtcctacagcttcctggctgtggaatgtttggcaagctgcttaccctctctgagacgtcatgtcatactctgtgaaattgggatgatgctgacctcaggattcctgtaaagattaaataacagaatataaagaaaatgcttaatatagtgccagacgcatgacttaagtttaagtgttcaatacatggtcattattattattcatgatgaaattgttattatcgcatgagagattctttcaggcttacctgagtcctacccttttcagtcatttcagactttgtcattggacaaaattaattgttgatgttctagtgacataattcacggggcctaggctgttctgcaggctgcctaacaggagctttgacactatgacacgcctgtctgagacatggtgtctgcagtggccttgaactcatgcagactatccatgtagctcagatagttcatgaactcctgtgagcattccagtgagtcaggttgtggatttgaactcctaaaagtggagacagtagggccgggcgcggtggctcatgcctgtaatcccagcacatttgggggccgaggtgggtggatcacctgaggtcaggagttcaagaccagcctggc

SEQ ID NO: 1243129 - DNA, 4001 bp, Homo sapiens
acagttccatctttaagatgagagggctgaagtctgagaggttaagcaacctgtctgaagtcacacagctggctactgatggggttggagttagaatcccgatctgtgagaaaaggaagaggacagagagggaagtctgtgaagaccacaaaatagcaacagaggggatgggttgtctcccagggccaggttgcaggtacaatgggggcggagcctgtgactgatgacagtaactgagaggggcctcatccaccctggccagggacttagaaagcccgccagaatctggtgaccccatctggtgggggaagaggggtcctgactcctctatccaggagatgagagaacagtgcatggggtctccaaagcctagacccctgcttgagccccccacacatgtctcctgtgagcatttctcatccaggccctttgggggcaggaagagttggggaagagaggaaccaggagatctgttcaccatgcagagctctaaaaacccatggtgggggctgggtgcggtggctcacgcctgtaatcccagcactttaggaggcaggggcaggtggatcacttgaggtcagaagttcgagaccagcctggccaacatggcgaaacccatctctactaagaatacaaaaattaggcatgcatggtggcgcgtgcctgtaatcccagctacttgagaagctgaggcacgagaatcccttgatcctgggagacggacgctgcagggagccgagactgtgccactgcactccagcctgggcgacagagtgggactccatctcaaaacaaaacaaacaaacaaaacacccatggaaccgcaagccttccctccagggggttaacaagttcagtggcctgcgcggttcccttccaagttgggtgagctgggcctgcctcaagtgagctccacaaagaaaaagttggcaagggattggagggggtgccagccccgtggctaactgggctcagcgctggaacttctgagcacccagtcagtttccagtgtcccaggaacagcttccacctttccttctctacaagtctgtcacgagctattgctgatttatttatttatttttttgtaaagatggggtctcgctatgttacccaggctggtcttgaactcctggccttaagcgatcctctggcctcagcctcacaaagtgctgggattacaggcatgagccactgcgcctggcctgctactgccgatttaataaaacctcacccaacgtaccccacccccaccttctagccccctcccccgcaacacacacgcacattccaggccattcagcctccatacctctccccgaacaagcctctctcacaccccagagcatgggccattcccttgatcctgaacccataatgccacctccttcttcattaacaaaaattgtttttcgaggtcttcaaaagctgcccccgactcggattccaccgtttcctgagcgcacccacagacggctgccccttccagccttgtaacagggctccggggctctgctccctcatcggacattaaggtcctggaaggcagtgatcagccccctcccccaggtgtcggaggacacttactggaatctgtgctcatctgacatacacggatggagcacctataagtcccagagctggaggaaaccgggttgctttcctttcctcctgtctgggtctctccacaccggggagaacacagaagtcactcctcgaatcctcccccccgtccctgctccctttcccacctcctcttcctgaccgttcgctcttgctctccagccactgccccctggatgtgagtttccagcagggcaactgatcacttctccagaggagccccaaggctgagggtccccagtcagtagggtccaatctggcttcccacttcccaggccacttggcgtcgcctccactcccagcaagaaacttctcccccagagaaagacggctcagattgtcacagggcgcagaaataagaggtccatggcgcgggtcctgccagaagcccacgggtcctttcttaggggacaagcgacactgattggagggcaggagccctgagctagctttcagggtcctaatccgagctccgctggtcagagaccccatggggccaccccctgaccggtgctcccgcagcccggacgccagcgccagggactcgccacaacctcaagtcctctcccggggctgggctccgcacacaaacaggtagcacaaaactaggacttagttggggtccgcaccccttcctgctcagacccgagccgccccagtccccggccgccgcgcccggagtccgctccaactcggaaagtggcggccggctgcggggcaggcgggcggtacctgtgagcagctccagccggtgtcccagcaccttcatctcggcgcccggcgcggcccggctctgggtggcggcgtcggggcagcgcgctcggccgagccggggagaggagcgcgggagacccggagcggagcggcaggagagcgcggagcgaagcggcaggagcagctcacagccaggagcgctctcccgcccccaacgccgcgctcccccctccaaaacggtttaaaaaaatccaccaattgcatggccgcgcacccccaaaaaggcacccgccgccacctggtcccggtgaactccaggaggcggaggaagggcgcggggtgggtgcggtgacaccgtgggaggtggtcccccgtgcccgccgcccgaacaaagagaccccgccgcctccgggcgtcgcggtggggggtcgcggacggcggctgggggtccccagcgcggccgggaaggcgaggaaggagagcgggagccgcggggaggagggggcgccgcccccgcggaggcgaaatggggcgggagcgagtcggtgcgggactcgcggggctagggtcgtgcgtggggctggggtcgtgctcggggctgggctgggctgggcggggacgcgcgcagcagccgcggcggcgagagaagctggccctgggctcaggggcgagggcgccgccgactcaccgcggagatgcggacgagacagacgcgcaggcggggagcggggcttcggcgccgccgacgcgcgggtgcaggtgcgggcagccaggagcccctccgcgtgcccgcggctgcaggggcggaggccgggctgggggcggtgcgccgcgggggcgtgcccgcgtgggtttggcgggtgtgggcgctcggcccgcggggcggtgccgggcctggggctagtcccggacggaccgcggtccctcgcgcgtggcttccgccttctgcgcggctggggtgcccggtgggcgggcgggagggcgagcggggaccgcgacgcggagcctgggggacaccccggtcgatccgcgcccccgccgacttctcacccgctccgccgcgcggactgtgctgggtgcgctgcgaggccctgcccgcccctccaggccccctgtggccgcgcggcgtcgggttcccgggggaggggacggcgctgccgtagtctttgtttagactcccaaggggaaccttagacctgcagagacatccccatcccagcgcccctgcgcctgctgcttcgcgctacccgccgtcgccgcctgggaaccgagggagaaaagcccttagggtcgggaagaaccaggggctcaggggcctctggggcgtcgtccccctccccccgttttcggagcccgagggtgtccttgaggaacttgtgcaggagtgaggagggacatcccctagcaaaggtgtcctggtccctcagggtcccaccctgaaggtggggaggtctctgctcccctcaattcacctccattatctgagcgggaaagggaacatggggacccgtctcttcctcaggctcatcctgctcggggccccgaggcactcctccctcctgccactcccctcaccagccctcctttggtcccagatgaagtcccactccagggagtacggaaatctgatggcctgaaaaattttatttggacaagacagctaa

SEQ ID NO: 1243130 - DNA, 4001 bp, Homo sapiens
tagtcgcctagtactcacttctagattctgtcgatctggcacgggctggctggcttatttaagacggtctgcctcccagactggagtgcagtggcatcatctcagctccctaaaacctctgcctcctgggttcaatcgatcctcccacctcagcctcctgagtagctgggactacaggcgcgtgccaccacgcccggataattttttgtatgtttagtagagacggggtttcactgtgttagccagaatggtctcgatcgcctgacctcgtgatccgcccgcctcggcatcccaaagtgctgggattacaggcataagccaccgcgcccggcctaatttctgtattttttgtagagacggggttccaccatgttgcctaggagggtctcaaactcctgggctcaagcgattcgcccgcctcggcctcccaaagtgctgggattacaggcgtgagccaccacgcctggccagacacacttatttttcacactaacatgcagtcaaggttgaaaccactattacctgaagtctatgactttgaaaaggggtttcataacttgaccttgggagtctatcctaccttaagacggttatttttattcccaactgcacttcagagtcatctggagaacttagaaaacaacaaaaaaaaggcagggcgcggtggttcacgcctgtaatcccagcactttgggaggccgaggcgggtggattgcgaggtcgggagttcaagaccaacctggccaatatgatgaaaccccgtctccactaaaaatacaaaacttagccgggcatggtggcgggcgcctgtagtcccaaatactcgggggggctgagggaggagaattgcttgaacctgagaggcggaggttgccgttagccggaggttgcagtgagctgagatcacgccactgcattacagcctgggtgacagagcgagactctgtctcaaaaacaacaacaacaacaccgaaatcactgcctcccggcgtttcagcctcacgcagatttcatcagctcaagctatatactacaggtacagtcgttccttggtatttgcgcagattggttccaggacccccgactatacccaaatccccgcacactcacgtcccgcagtcagccttgcagaatccgcttataggaagagcctgccctccttatacgcggggcggcacatcccgtaaatactggtcgcgtttggttgaaaaaaaatccgcatataagtggacccgcgcaattcaaatccttattggtcaaaggtcacttggcttgtttcctagaattacttccaggagtcctggacacaggcagaaggtgctgcagggaagagtaaggacagaactgcagagagaaaaccgctctggagaaggctgtaggccagtgtggctgcctctttgcatgctgctttcactacaatacggtgaccgctattttgagaccgtacgaggtgctctagccgcattaactcatctaatcctcattgctactccgcaaggtagagaccaggatcccaattttgcaggtgagtgtgagccaggctaggagacttgtccaaagtttcggtaagcggcagcccagcagtgctggactcgagtcagtgctcttgctcgttattacgaggtcacccggcctcccgtcaggggtcaactaaacacctttaggcagcggggctgcggagcgagccggctgccccccgggtcacccctgcctgcagctggcgcgccccggatgcccggcccccacccccaccgggcccaatccctgacccttgccaagcggcagcaaagtcaccacgagtcacctgcgcgagcactaaggccggctgcaaagtcccgagcctcgtctgggtccccgcggagcagagagcggtgctgagaggccgggccacggccagcatccggacccggggcagcggcgcaaaggccgcgggcaggcggctgacataggctgaaaggacacgagacgccatggctacgccaacccaggatgcactgcgccgccgcctccggaccagggttcctttccggcggcgcgcaggcgacgcacacggcagcgctgtcgggcaccgccggcggtggcggcccctggcggctcctggaggcactgcgccctcggagcccatccaggttcggggacgaacaactgcttggtgtcacaactaaactgtgcagacgtcgccgtctttccctaaacgacacggcacgagaaacctactttcattttttatctgaaagttctgaaatacatctgtttaaacgtttggggccgggtgcggtggctgacgcctttaatcctagcactttgggaggccaaggtggcaggactgtttgagctcaggagttcaagaccaacctggccaacacggcaagactccgtctctattacaaaaaagattaaaagaaaaaaaggacaaagttttgattccacaattcttccacaagtattaacatttattgaataggtaaaaaaatatatataataatgtgaaaaaataatcaatttcaatacctaagactaataaatgtgagaattacgattaaaacaatatacatgttttaaaacttgacagtgtataatatagctgtcaggtccacgactatgccaactgtcatgcccacagccaggttccagcccatatcgaggtctgaggggagtgggtggatgaacagatagctgaaagaacactcaggggacggtaggcaggtgaaagatgattttattcagcagcagctctcatcagcagcttacttacactagttctctcacactgtctgccttgtctcagctgcttagtcccatggctcccccacacaactgcgaggctggctctcccttgccttcagggtcagcagcttaactctctctcagctgtgatctggctccccctgtctgtctgcaaagactgacagctctggctctctctttctctgggcacgaacgcctgtacagtatcagcagggcaattataccttttacagaaaatagtggcttagagccaagtgatgaccttcccatgttatgcctacatggctgtgataacaagtggagttatacgcctctgtctaaacttgctgagtcacgcaggatgtaaacatcttaccttggcctatccttgaccaaagcacagccatgttccttacaatagctaacaaaaataggtaagcgagggaggagtttaagaaggctaattcctatttctaagcagggagctaaaggatattgactgaaatggaaacacacgggataatgactccaaattctgaaatctgcctgaatgaatgatccaataatgtcaccagttttacctcaatttctttttatttttgttaaatccaagtaaaataaaatgtaatggtatgctgccaggcgcggtggctcatacctgtaatcccagcactttgggaggccaaggtgggtggatcacgaggtcaagagatcgagacaatcctggtcaacatggtgaaaccccatttctactaaaaatacaaaaattagttgggtgtggtggtgcgcgcctgtagtcccagatactcaggaggctgaggcaggagaatcgcttgaacttgggaggcagaggttgcagtgagccgagattgcgccactgcactccaggctggcaaaagagcaagactccatctcaaaaaaaaaaaacgaaaacaaaaaaaacatagtttcatcccactgttgtaaaataatttctatttattatagcattcctttaaaactcgagtgtctgggggccaggcatggtgggtcaaacctgtaatcccagcattttgggaggctgaggcaggtggatcacctgatgtcaggagtttgagaccaacctggacaacatggtgaaaccccgtctctactaaaaatacaaaaattagctgggtgtggtggcaggtgactgtaatcccagctactcaggaggcaggaagctgagacaggagaattgcttgaacccgggaggtagaggttgcagggagctgagatcgcgccattgcactcta

SEQ ID NO: 1243131 - DNA, 4001 bp, Homo sapiens
taatttcttggtcgactttgctggtggagaaaaggagcaagagaggctaatcacaaggaatccttttcctgtaccctgtgagaacaattgaaagcaagagccctggggtctggctcctcccatgtcacccctaaaatctgggcatgccaccctgtggcatcccagggactagtgtcccagcagcacacggtgcagatctccacactcccagcatggctcacgtactagtccctcttccactgcatttcggcttcatacatgcacatgatgtcctcctccttgcactcagtgatgtctggcacgcggcggtactgccggtggtagtagtaatacctgttctttgcgtgctgccgctctataaattctgcaaagacaaagccacagactcaaatgcctcatcggtttggacaggcttttagctttcttatttctcataagccctttggaggggagagaggagaacttcctgagtgttccagcgtttagaaaacagcaattcgtctctctaagggatgtggccagccaggcaggcctgtgaaggcctaggctacagctgatggagagctcccgagtaccaggcatcatcctcagagttccacatgcattaccttactctgtcccccacacaagcctacaggcagctgcttctcacagatggcaaggactgggacgcagctctgccagtgcacctcccccagctgcacagggaccctgctgggtgcgcaaagaggctccaacagggagcctccagcaagcagaacttaccaccttacggcctcagcttcctcactgggaaatgaacgagctaaaaggagagctcgaacatccagacacataggacagacatgctctacaactgctacaaaagagagggagctgggtccgctgttgcacggtttccagatctttgggggtttgatttggagacttcaccctcttacggaagaaccaccagagcatgctatgcaccccaagtgttcaaaaagaactgaaccaggctggacacggtggctcaggcctgtaatcccagcacctgggggccaaggtgggaggatcacctgaggtcaggagttcgagaccagcctggccaacatggtgaaaccccgtgtctactaaaaatataaaaattagctgggcgtggtggtggtgcgcctgtaatcctagtactggggaggctgaggcaggagaatcgcttgaacccggggtggggcagaggttgcagtgagccgagatcgcgccactgcactccagcctgggcaacagagtgagactgtctcaggaaaaaaaaaaacaacaaaaactgaactgggcattttcccggttcgttccagagatgctgaatttgggcatctcggccatcaccccgacacttggtcatccggcagagagacatttgagagaggcctgaggccagcggtgcagtggaggggtgcccggggcggcggggggcggagagcagtgcggggtcctggggcagtgggcgctgggtgcggcagggagggaagagtcctgggaagaagcggggcatcccggggtgcaggggagagtaagggatcctgggaggtgaggtccggggtgcagtgggaggccaaaggaggcgacggagctcggaggtctccgggggtggggagttgtccccggggtgcagcggggggcggtctcaggcagacgggaccccggaggcattggaggatccaggcagggtgtgggatccaggggtccccagaggccggcgagggagccccgggctggggcttcgtacctctcacgagggtcacgggtcggtccacgatgaggtcgaacgctttcatcatgtagacgatgggattgggctgcaccggcgtgcggcgcgggggctcagggtacacatccttgtcccagctgtccggcatggcggcggcgggcgcggactccgctcccggacgcgctgccctggcctctacctccgtccgggtcccgcggcctaggtcgcccgctacagaggacgccgagggcggctgcgtctgcgcgctggcgccgcgatgcaccatgggacttgtagttccccggctccgccgggcgcggccgggacccgcctcgccgcagggcgcccccgcgtggggcctccgttctcggtctgtgccgagcgcctacgcggtgctggtcgctggtctgggcgcctgggaagcagccgcgaaccggacagattcctgcttacgatgaaagaaacagacaaaaggcaactgacataaggaataggagggggtcattcggttcccactgcgcgccaggcactgtgctgagtgcagcagggaataagataaactgtgatggagaacacaggccgttagagcgcacacgacaaagtgaacaaatagcacgcgattccaaacaccctactcctccaggaagctttcctggattgcctagtccctacagacttctctgggccccgctctctacaagggcccctcatggactggctggtgccagttaacttgggagcctgtctgggggagggcagggagcagaccaggaggcagggcttgcccttaggcggctcatagggagaaggcacctaccctgggcacagggccctctggccggctttgatggttccatcctggccctggggcactctggtgcttctaggcagctccactgagcagggtcctgctggccacatcttcagtctccacacctggcacggcccctggctgctatccaggggggacactggtcatgtcctgtcctgaggttgaggccagcgacacagaaccatcaaccctacagacaaacagtgagaggtgacagcgtgctggcagtcctcagagccctcgctcgctctcggcgcctcctctgcctgggctcccactttggcggcacttgaggagcccctttctgggctggccaaggccagagcgggctccctcagcttgcggggaggtgtggagggagaggcgcaggcgggaaccggggctgcgcgcggtgctttgcgggccagcgcgaattccaggtgggtgtgggctcggcgggccccgcactcggagagcctggccggccctgccggccctgggcaatgaggggcttagcacccgggccagcggctgcggagggtgtgctgggtcccccagcaggccggcccaccggcgctgcgctcgatttctctcgccaggccttagctgcctccccgcggggcagggctcgggacctacagcccgccatgcctgagcctcccccactccgtgggctcctgtgcggcccgaacctccccgacgagcgccgccccctgctccagggcgcccaatcccatcaaccacccaagggctgaggagtgcgggcgtacggcgcgggactggcaggcagctccacctgcagcccccgtgcgggatccaccgggtgaagccagctgggctcctgagtctggtggagacgtggagaacctttatgtctagctcagggattgtaaatacaccaatcggcactctgtatctagcacaaggtttgtaaacacaccaatcagcactctgtgtctagctcagggtttgtgaatgcaccaatcgacactttgtatctagctactctggtggggacttggagaacctttgtgtggacactctgtatctagctaatctggtgaggatgtggagaagctttgtgtctagctcagggattgtaaacgcaccaatcagcgccctgtcaaaacagaccactggactctaccaatcagcaggatgtgggtggggccagataagagaataaaagcaggctgcgggagccagcagtggtaactcactcaggtccccttccacagtgtggaagctttgttctttctctctttccagtaagtcttgctgctgctcactctttggggtcacagtgcctttatgagctgtaacactcaaccgcgaagatttgcagcttcactcctgaagccagtgagattacgagcccactggcaggatgaacaactccagacgcgcggcgccttaagagctgtaacaccgcgaaggtctgtagct

SEQ ID NO: 1243132 - DNA, 4001 bp, Homo sapiens
aatactcactctgacccttccaccctctgtcctcgccttggggtaaaggacagatgccctcgccccccatccctccaggcaacgagaaagggggcacccttggtcatttctaggcacctgggcggtgagactgaagcacagctatgggagggcctctcaaacatcacccctcctcctggctgaacctcagatccccaagccctcctcaaagatccagcctgggcaccccgcagccccgttcctgactgggcaaggctcctcaaaactggggtccctatctgggtgtcccagatcccccttgaggccaggcaccaggtaggtgccggctctgggcaggaatgctgaacacatgagtgacatggcagggctgacacctggtaatgtcagccagctccaggagtctgcatgagcacctcccgccccaccccccgctcatcactccttttggcaggtgaggagatggaacctcagagcccccaccctgactgggcagggcttccatgcagggcagcttggggctgcagggctctgcccaggactttcagtgggagctctgcgggggtcctgaggaggggatggtttggctgcatgggtgtgtctctggctgtgtgtgcgtgcgtaagcgagtgcgtgagtgtgtgaatgtgtgcctgcgagtgtggcactctagagctccccctgctctggccggccctcccagcccagaccccggccaagggttccaggagcagggaagaggagagaggaagggagggaatcccccgactcacagggatccgcgatacacgcgtgtgcacattcacacacacccaccactctcccagaaatccaccacacaggcagaggcagcccccagccccaccccagcaggaccctcgctgaaacacgcagtcaacatccccagaagcctcctccacctcctcctagcactctctgctgggagaagtcctcctcctccgagccgccccctgaagattcctccctcccgggtggggcgggtgggagggtgaggtgggcttcccagagatgggtgatttgggtcccaggggagttaggaggggtgaggggtgagtctggtccatgaagaggacccagctctctgtagggtagaggggtgtggggaagggaacagaggacttggaatggaagggggcggggtggggaagaccagaggggtaccagctcagggctgatgggcgatggctctggctcaatggaaaggagacgagaagacagaaggtggggagggggcttcacttttaaagtggcagtagctggggcaaagggtctttgagcgtgagatgaacgggggctcagggtctagggcgaagagaggtgggctagaggtaggggttgttaggggtctcagaaaagtatcgctccggacaggatccgggatggagaggaggaggcggctggacgcggcgaggggctccggtcccgcggggtaaagggtgggggtttggcttggacaaaactagggggacagtggccgggtccgggggctcacggctccccactgtgggcaggcagggactccgagaagcgccggtggaggggcggaggaggggggtctcccggtccagggagaggactgggctggagaccggcctggacgtggcggggctgggggctcccgctccggcacgcggaggggccgggggtctcctgcccgggtagggagggcctcgcgggtcgcggcgtcggggtccgcccgaggggcggagggggctccgggtcccagcggaggccacggcgggggtcccggccggcgcgtactcacgtccaggatgacggcggtgcccccgcgcggcgaggctgggccggggtccgcgggggcggcgggggccagcgactcccggggctcgcccatcctggcgcccacccagcgcagcagcccgcccagcgcccggccctgctgcggcggctcccggagcagcctgtgcgcgccggccctgcacaggcgcgccgcccgctcgcacatcgcgccgcgcccgccgccgccgcccggaagcccgccgacccccgcccagctgcggcccgcccccgcgcgaccccctccccgcgctgcccgcgccgccccgccctctctcccgctgcccccgcggccgcggacaccgcggggactggccggcgccggggggcgggccggccggaccccgagccacgtgcccgctccccgccgcccccacccccgccggccgggcgcggggcctgaggactgcccgccggggcgaggggcgcgggcgcagccacagagggggctacccggaggggaggggtatgtggggcctgggggcggggcggcgcccctggggcctgctccccaaaagtctcctgctctccccgcttctaaagtcccccctcccactcgcggcgcgcagcagaggccgaagcgcgggtgtccagcgagcccggagcgccctctgccggctccagccccggggagcggcgcccacgccccgcggccccgtcacgcccgcgggcgcccatccttaactcccgcgggcgtgcacgccccctcaggccgcccccttggttacaaaacgcccagaaccagtcttcaccccagaacatctttccttcatactccatccacccatccatctatccacccacccacctgtccgtccatccatccatccatccatccacctgcctacccgtccatcaatccatctatacatccatccacccatcctcccatccatccatccggccggccgactgtccgtccatccatccacccaccctcccaaccattcatccatccatccatccacccacccagcatcctcccatccatccatccattcacccacccactcatcctccctccctggcatccatccatccaccctccatccatccatccatccaccctcccatccatccatccatccatccatccatccatccatccatccgtccatccatctgcccgcccgcccatctgtctgtccatccacccacccaccctcccatctatccatctatccacccccctaccctctcatccatccatccatccacccacctacacaccctcccatccatccacccaccatccttccatccatccatctatcctccctccctcccatccatccatccatcctccctcccatccatccacccacccacccacccccctccctcccatccatccatccatccatccacccacccaccatcctcccatccatccaaccatcctctcatctatccatctgtccacccacccacccatcctcccatccatccatccacccatccatttaaaagatgaattaaggagaacccactaggtgccaggcaggtgcccaaccacggagttccagcaatgggcaaaacagatggtgtacttggtctcccagagctcctggagcttacatccaagtgggcagagccaaacactgaaatgattccacaaacaaatgaacaattaaaactgaactgctggaagggtgtggtggctcatgcctgtgataccaacactttggggagccaaagagggcggatcacttgaggtcaggagttcaagaccagcctggccaacatggtgaaaccccgtctctattaaaaatacaataactagctgggcgaggtggcagtcacctgtaatcccagctacttgggaggctgagacaggagaatcatttcaacccagaagcagaggttgtagtgaaccaagcgccacagcactccagcctgggtgacaaaatgagactctgtctcaaaaaaaagaaaaaaaaactgcactgctatgaaaaggtagcaccttagaccatgaaaggagtatttgctgtgacggcagtggaggggtttgtgtcagaagaggcttcctagaggaagtgattcttatgctgagacatcccaaggaaaaggagttaaagaaaggcgggaaactgtcctgggctggggactctctgtgcaaaggccttggggcaggcagagacctggccagcaggagggactgaaaggaggccgcatggcagaac

SEQ ID NO: 1243133 - DNA, 4001 bp, Homo sapiens
ggatgcacggtcagtagcatgctgacaaccttaccgtagtgagggcgcaatccgacaacggcagaaaattcagataagcaacacgatcagaaatcctagtgtgcatacggtttatcacgaaagagtaaaaacattcctttcccaggaatgactgtaaaaattaggagttagagatatgaaagccacaggatgaatttcagagttgttttcaattgtaataaagaaatcactacggatttacggtttgtgaaatattcatcagctagaaagtcctaggttaccttagtacaagctgtagatacgtttacagtggggtagttaaacgtttcgaattactgaaatctcaattacgaatttaggaatatgtggagagtagacaatgtgtccaattaaaatcaaaagcaaaattacactgaactttctaataaaacaaatttgaaaaaagtgctgttagggagcaggaaaaaagtcactctacaaatattaagatacagtgctgagttatacataacaccgttaataatgcctcagccgtaccctcgaaatttttaaaaaaagaacatgttacgacattacaaacacgtcagctttcaatttaaatcagcagggggaaaaagggaagtcctttactgagtggtggtgctgttttccctctggaaattgaaaagacgatttattcagtccgagtttcaggagcaactttgtatcccaatcctaattatctatgtatataaattttcatctaaattaccacctcctgggaaatgcaaagccggtggagtaggttttagagctctgtgctctggacaagccaactgttttaattcccagtacaacaaattagtaagaaccgaacaccagcggcggggaattctgagacctctggcggagcgcgaggagcgccgcgtcccgggaagcacccgagcagcagcgctccccgggggccgggacaagccgggtccgcggcgcccgcgcgccgcccccggagcccgcagtggtgccgcagcctccgtggccgcagcaggtgggacccggctggcccagcaggccccgttccccgccgcgaggtgcaggcgccgcggggctattcgaaaaccactgcacgacgtcacggccgcggcttttattgttctcgtggaattactttttgccatcacatctggagaaagagcggcctccgctccacgacaggaatctcacaactttgcaaagggatgcgcggaattctacggaagcggcgcgagggcgcagcccggagggccctgctgggcccaggggcctcctggccgccttcccgacccgatccctcttcccacacgcgccccgcgaacgtcggccggactcgcaggggtcggaagcggcgcgcccggagagccggcggagccgggcagggctcgcgccccgcggtccgctccgagtagccgcgagccccgccagacaaagaggcgcgtcgggtcccgggcgcgggtaagggacgcagaggcgcgggcagggcggcgcgccagcctcggcccgcagggggcgccgtccgtggccccagccccggtccttacctttgaggaccgagcagagccgctccagggccatgttcccgagctgcccggcgcttcgcgaagggctgaggtagcggcggcggtggctcggcgctcacggctcggcgcggcggcgacggccccactccgtccccatcgccggccagcagctgcctccccgctcccctgaggagagctcaggtcctgcggcccgccatgcccgagccccacagtgggctcccgcgcggcccgagcaccccgacgggcgccgcctcctgctccgcggcgccccgtcccatcgaccgcccgagggccgaggagtgcggacgcgcggcgcgggaccggcaggcagctccgcccgcggccccggcgcgggatccactgaagtggcgggcgcggggcgcccaggctcatttaaggagggagcgcgagcgccgcgtgccggctgcgccgcctgtgcgcatgtgcccgccccgccccgccccgcgccgcgcctcgcgcgcccgccgcggcctcgcgccgtgggacggcgtcgctccccgccggctgccgttagggctgggagccggctgggcgcgggggtagtgagggtgcctctcgccgtggctgcgcggcggcctcgtccgagaggccggcgccggggcagtgaccggcccgtgcccagccgccgcgcagggcgcccggggcagctggccgagccctcgatgcctcccgtctgacggaggcgcccgggaagcgccgcccacctcggccccgcaccctcgccggcctgccgggtctccgccagccctagcagacagagaggggcgccggtccctagtcccccagacctccattcaaggtcaaaactttgcccagctcagccttgctcgaccctgggcagggaagcgcggacatcggcagagggagcccgaggctctccgtgcccttcgcgccggtgagttcccgacccgcggcgctgccggcgtttccctagcgcccgccaggttgacaggcactttagtaccaactcctcagactccccctcatgaagtaggttttaggggattggaaagtcgaggccagagaggtgaagcccttcgtccagagccgcgtagcgaatgagcggcagggctgtgcacctcccccggggctgccctcctagcagctaaccactacgctgggcagcttcgccagctgatgggagtctccaggtctgccaacaactgcctggctgttggtggtattcatgatcctgctttattttctccacagcggttatcacactgatatgaccttcctcatttatttatttgttcatcctttatatctccctcaccctcacaccattaaaatatcagctgcttgcaggcaggccgactgcattcatttttttcactccacacatacgtattgggtgttaattatgtgcagaagacaatgattggtgctggagataacaaccgtgatcaaggccttaccataatagaatatttatgcctgtctctgcgtgtagtaggaactctgtaaacgtttgtctaaccaattgtagctaaagacaatgtcaggcaactgaaacatttttcaggtgttaagctcttctctctcactttgtattccttcaagaaaggtacaaaagcataaataattcatgagatttacaaaggaaaaacatacttaacaccaattaatatcgaggtgtttcaccctttgccatgtgctgtgaatgggggcataaaagatgggtaagtttgggttcctaaaggtaaccacctactacagttaagatcgcacacgagaaccaattaggaaataaaacatttaagaactttttcccacggatatgaaaaggtggctcacgcatgtaatcccagaactttgggaggctgaggcaggcgggtcacccgaggtcagaggtttaagaccagcctggccgacatggtgaaaccccatctctactaaaaatacaaaaattagctgggcgtggtggcacgcgcctgtagtcccagctactagggaggctgaggcaggagaatcgcttgaactgcactccagcttgggcaacagcgagactccgtctcaaataataataatgatgtagcatattagtagaataggagagtaagaagacaatattaagtataggttacagacaacagtgaaccaaaaaaatttgagaggaaggggctctcaaattaacataatagtttcttaatgtgaagttgttgactgaaggaaaaatctgcgtgtcatgtcatcagagaagacttcctgaaggaggtgacacacaaaccatggaaatgcttggggtggcgagaggagaggaggcagaagaagagctcagcaggcagggagcaggatgagcctggaacgtggggcaagtgttgtgtttggtataaagaggttggacatggtgggctttgattatggagataggtgctcaaatgctagttaggtaaatgattacttttaatagtgcagtaatggagt

SEQ ID NO: 1243134 - DNA, 4001 bp, Homo sapiens
gaattgtctctacattggtctcgaagctaaacttagattttcataaagtatatgtttcatggaaaattatctgatgattactccccaaatggtgttaatgtcttggctatttttagcactcaattctaacacattagccctgctctaagaatcatctcttgatatgtctcttttttttttgacattcaaaactacaatatttctaaagtacctcaggtaatgttgcccgaaaaacatcctacaggatggtggctgccaactaaagtcattggagcaacagacagtggctacaattactaagtaggactctgtgtacaaaatcaatggtcagtctgtaaagtccagcacctttcagagtaaaccatctcactctgattcacttaaacaatttagatacactagtaggaaggtgaagtcccttttttggagggggtggaataagcaaatggatggatacatcaaaccaaaagcagaagaaacacctacatttttttttacacggtgaaatgaatagttaacaacccagttatgtcttttgccccctcccggtggtttaaaaagcgtaaagagcgcagtgggaatattttggttttgaagccccttgcacagggaacctgttctgacacattcttgtggtgtccagtaaaggaatttcacctgagtagggatcagctccagtgctaatatttcagatgctgggaatcccctgcaggccttagccaaaagagttcttaaatgaaaagtctctgcctgagctccctccctgcaaccagcccttgaacggaaaagcagagaaaattctcaaaggacagcgtctgtgcctgggctggtcctcctgggagaggagaggaataaaaccaatccagagagggcacccccatctttgtaaaggagaagggagaagtaattagaatgccacggaggtgggaagagaaaaaaaaagaaaagaaaattcgggccctttccatcgggccctttccagcaagaagatgacgaggaaaggaagaacgcctggtcgaggggggctgtcccaacatggggagggagtggactaggccggagggagagggggtggaacgacggcgcaaaaacaagctggaaagggaggaaaatggtgaccctgcactcagaaccggctccaggccacgccgcccgcttgggggcaactttgctggggaggagggtcccggtaagagaagacgcggcgccccgatcgcggtggccccagcgcggggcccagtctggggccatccccgagcccgggaggccggggccggcggctcgcggagcctggcggggccggacgggctgagagcggctagaagcgaccggtgccgcagagccccgggggccgacggaatctgggccccgagcggccggcggctccgcgggggaggggccgccactgctccgcccgccccctccaccgtcaccccgatcccttcggcctctgcccgctccggccaaagaagccatgggggtcgcggctcagccgcccccggcgggacggggacccctcgcctcccctggccctgtctccctgtctccctgtctccccgcccccacgccccaccccccacagcctgactcacctcgcgagtagagggacttgggcgattccaggtctaggtccgcgctgagcaatgagatgaagtccgagggcatcgcagctcgacccagcccggcccgagggcagcgggagggggggagcggcggtggcggcggcacctcctctccgggaccgcgggcaccgaaccgggggcggcgacgcgagggcggctgccgctgcctcctcctcgagggtagtgacttccactgggccgaggaccgaggaaacgatggcgaggtggagggggaactccacggggactgattctcggtgaccaggagaggggttcaggacggggaaggggaagggggagagccaaagggtccgtttcgtgtttctcctcagcgaaaactgacggtcgccgccaccgccgccgccgctgacaggaatctgagccccgcccccgtggggcacagcgcaggcgcggaggggggtgcccgggagcgcggaagagccgtggcggcccccggagggcggggaggcgcgccagggaacagcagcaacatgggcctcgcttcctgccggcgcggcccgggctgctgctgttcctgagccgggaaagggccccgctgccagggtgggagggggggaggctgggaggtggccgcgcgctggggccccggggagggaaaaggtatttgcaacgacctggtggcggcgagcctgaggcggccggccccgagcagagctgagcgcaggagacagagccgagagaagcgagaggtctgcgcgagccggggacggaccccagaggccggcggcggacgggcctggctggcccggggtctcgcaggggaccggagtgtcatcgcccggacagccgccaaccctttggggtttgcatagcagtgtgtacaaagggactgtcaaacccatttcttaattaggaaatggcaaaccgtatcccaaaaacctcgagttattgatttttaattaaagtactttctcccctaacactcccctcctacctttggaggctgaaattttttttaaaaaaaacgatctctctgattgtgctggggcatccgggttattcggagtgggacatagaagacaattaaaaaattggatcatgtgaatccacctggctgttctagaggaaaaacaggtaaaaagcaaacctcaacgctactcttccaaacagtttttcttttttctgtttctttttttttccttttggactaggcaaagatggaggaagaacgcatttaactgagtttttgctcttgcttttctgttcgtggagccaaaagtttccgttgcaaaaatttaaaatcctcacccacaccgcagagcgttttctgattctaatagacttctgagaaatttttaatcaagttattgaaatattacctggagtgcagggtgtgcatcttgggaagtaattttaatcttgtgtggaatattgatgccagtagccacgtgggcatggtttttaagctattcgaatggtttcgttttttatctacaaggatagttacaactcatgaaaatcagtctgttgtaatatgtgtatgtgtatatatatgcacacatatatatacatacatatatacacacatatatacatatatatataattatagagactttttcccatgaaattgagcagttctcgggacttggagtgctagggttggggtaagaagctctcagcaaaggagggcccagtacagatgtcgctgaggcaaggccctttacaaagttttacctgtagacctagaatttaaacgtgtgtcatcagagctcacctatctttcatctcaacatttgattcaggttgcccagttgtcttcactgaattgtgtgtagtaatcaatcctgtgaacatttttcttttgtcggaggttcagaaagcttttcagagccaccccaagatggcaaagcagaacaagaaactgccctcaaattgccatctctgctgtatggtgtcgtgacaagtcccaagggaagtcccttcataactgataagagccccactcatttgagagagaaagattgaaacctcacattgcccaacaggccaaggcctactgaaatcctatagcttctgaattggagtaaacacacctcttggagaccccccatacgccacccattagtcagtatacagggtagcagagaggaaatgcgattcaccacccgatactaagaaagttgactgaatcactctgagcagatcccttttccccagaccgatgtaatcacttaacaaacttagggtataggaaatccccagtacggttctgaccctaattaactagtcaagaactggcaaggcctcttcctttttctgtgaatccttctctgcccttttgtgacctttttattccccgttgaggctttgttgtatatgttaatcagatttcccctgattaggtaagagcaaagt

SEQ ID NO: 1243135 - DNA, 4001 bp, Homo sapiens
ttgggaagctaagatgggcggatcacctgaggtcaggagttcaagaccagccaggccaacatggtgaaaccccatctctattaaaaatacaaaaaattagccaggcgtggtgggaattagtcagctactgggaaggctgaggcaggagaatcgcttgaacccaggaggtggaggttgcagcgagccgagatcgtgccattgcactccagcttgggcaacaaaagcgaaactctgtctaaaaaaaaaaaaaaaaaagagagaactgagattcaaacccaggccagatggctcctgtttgcttttaatcaccccactgtactccctcatggtacaagagtcttggtccaaggtctccatttgcccactggattatttccttattagactagattcctattccccgcccttgagttgtttgcaaaaaatgcatcagtgggggaggacaaagacagggcatccctgataagattcagagaacaccctgctggctccagtgttcccaaagaacttgctgcagatgtaacaagatgtcacagattctcaacaccttaccgcctcctgccccgcccaggactacagaatcagcatctcttcaggtggcaccagaaatgtatacattaatacattctatgcttgttaacaatccagctcctgtggctgggatgcaggagtcccctctcccacgctcttcccttgagcctcaggagacaactgactgcaggaatataaaccccaggaattctcttaagagaagccagcggctgcgtgcctctccctggaggccctcccttaccttcctcatcccctggagggtagagtttcaggagggatagatcatctgggataaggcgaaggctgcttttaacctgcaaagacaaagaagggagaggggtcaggcccaagtccttcccctaccgaaagaaaaaattgggggtaattcttccctgacacccagctcccaaatcctccctaagatcgtggacaccttggccctctcctggcaacctagaagtccagcttccccaggattcagaatggaagtacccttcaccctttcctccatctgcctaagacactctgaaatgtatgcttccttgccctttttaactaggttactagccgcccctctacccctgactcttagggactctcagcccattgctcacacgaccatcgggggaccccagcctctggagccgcccagtcctctctgaacccgcatggaccccaacccccaatactgcagctccctggcttcatttgccatggaccccaacctcaaaatccaacggccccaggtcctcccagtccctctccaaaatctcaggaatcccagctcttcagcctccctgtgcccccaagactctagctcctaggaatcctaaacttccaacgcatcccaccctccttcaccaccccagtctgcagaaagtcccggagccctgcctctccctgcctccaacaccctaacgcccgaggaccagccccagaacgccagcctcaacacccctatagccctaccctccccgaacgccggcccctccctggaggccaagcccttggcccttccgccggtcccctccccgggaccgggcgcaccttccccgagtacaccggaaccagcggcgcctcccccggatccagcaccagccgccgccgccgcctgaccggctcccgcgggggtcctgcgggccgcctgtcctccccttcgctgtcactgttgctgttatcccgggacgcgaccggccccgggggctccgggggctccacctcaacctcgtccgcggcaccgcgagcggtggcgacctccagaatttcctcatcgctgtcggtgaccaagtccacagacactacgtccagcgtgccccgggatggagaccgctgggcccgaggacgccggccccgaccgccccagccgccccgaccccctcggccggcaccgctacctccggaccagcggccccgcttccccacaggctccgccatggcacactttcctccacaacacacgcccgcctcctctcgcctcgccccgcccccttcagcgactttcgccttgcattggacaaacagcctgctcgtcagcaactcttcgcgccccacgcgcgggatccgccttcccgccttttcattggtctctgtacccgctcatcatgcgcccacctctgaaaccaaggcgccaaagattccaatcacctcggcacaatcaccgtagctttcgattcagtcggcctcacccattggctgggccacctctccacagacgagcctctcccggacccgcccaaccaagacaaccgtcttccggcttggttagtcgcagggcatcctgggaaatgtagtcctcgagcggtaaggtttccgggagaaggaaggcgggcctggaattccctgtggaaaccgcggatttaaccaggcgcggtgcctcacgcccgtaatcctggcactttgaaaggctgaggcgggcagattggttgagctcaggagtttgagaccagcctggccaatgtggcgaaaccgcgtctctactaagaatgcaaaaattacccgggcgtggtggcacccctctgtggtcccaactactcaggaggctgaggtgggagtttcgctggagcccgggaggcggagatcgcaccactgcaccccagcctgggtgacagggcgagaccctgtctcaaaaatgctttaaagaaataataaggctggccgcgcgcggtggctcacgcctgtaatcccagcactttgggaggccgaggcaggcgaatcacgaggtcagaagttcaagaccagcctggccaacacggtgaaaccccgtctctactaaaaatacaaaaattaggcgggcgtggtggcgtgcgcctgtaatcccagctactcaggaggctgaggcaggagaattgcttgagcccgggaggcagaggttacagtgagccagatcctgccgctgcactccagcctggccgacagagcgagactctctctcaaaaaaagaaagaaagatagaaataataaggctgggcgtggtggctcacgcctataatccagcactttgggaggccgaggtgggcagatcacctgaggtcaggagttcgagaccagcctgaccaacatggtaaaaccctgtctctactaaaatacaaaaattagacaggcgtagtggcaggcgcctataatctcagctactcgggaggctgaggcaggagaatcgctggaacccaggaggcagaggttgcactgagccaagattgtaccactgcactccagcctgggcaacagagtgagactccatctcaaaaaaaaatcttatgtatttatttatttttaaattttattttattcatttatttaattttatttatttatttattttgagatggagtttcgctcttattgcccaggctggagtgcaatggctcgatctcggttcactgcaacctctgcctcccagattcaagcaattctcgtgcctcagtctccaagtagctgggattgattacaggcgtgcactaccatgcccagctaattttgtatttttagtggagatggggtctcaccatgttggtcaggctggtcttgaactcctgacctcaggtgatccacccccctccgcccccgccttggcctcccaaagtgctgggattacaggcgtgagccactgcgcccgactatttattttatttttttctttttcttgattcggagttttgctctgttgcccaggctggagtgcaatggtgcgatctcagctcattgcaacctccaccttcagggttcaaaggattctcttgcctcagcttcccgagtagctgggattactgttgcctgccaccttgcccagctaatttttgtatttttagtagagacggggtttcaccatgttgcccaggccggtcttgaactcctgacctcaagtgatccacctggctcggcctcccaaagtgcggggattacaggtgtgagccacagcacccagcctggcatatgtaaatcttcatgatggc

SEQ ID NO: 1243136 - DNA, 4001 bp, Homo sapiens
tagctttgaaatgttattcagtattttggttgtatatacaattcctacttatgtagtcacacaattcctttattattcatatgtttggttaacacccttatcgatcatatatttgtatatatgctctaatcaagtttgtgcccaataaaatctgctgacatcatcaactgtttatctcttttacaataaaaatactcaaacaagctgtttttctttcaagtcccgataatctagatacaattcaatgctacactctccacaaatgccacttttcctgtttcttcctctactataaaatgcatcaccattcacagacttcctagtagtacagttattacttggactatgtgtctcctccaactatttcccaaactccttgaaaagcctcagtcctctgcctcatcataacactacagggtccgtaagagtggttcgacgtaataggtgctcaaattatgttaatggaattgaaaataaacgcagccaacacataactattataaattatgtactacagtgaaaaagacatctagcatatgaagactaaaaggaccgataaaataagtaccgcctagagaatcctcatgcctcacgttcaggtatgttttttcaatgcaactctacagaacagtctactgaacatcaaacatgaacattaagaaattcacctcataccaggcaagaaaaaatagggattactcttatccatttcctttttgaagttcgtatgcatatgtaacagggaaactgaacttaatgaaccacagtattccaaaccaggtcacaaaagagctctaagtccccagtcatcctgtttctatttcctgattggtctgacctgcaagcatgatggtgcccagctttcccaattcaagatttcctttaaaatatcttccaaggagagatttttctttaaataaaaatcgacttctagaactttctaggaaaattatgaaaaaagcaacccactattaaaaaaaaaatcttccggaacactttattcaagtaaggaaatccagtttccagaaaagtcccgttacagttacacttcgaattaattgtgggtcataaacttgcacgagtggacgttaactcgaaagcattactcttctagcaaagtagacttaaaaaaacacgtgcctgatttttagaggggtcctaccgttgaaaaataagcatctttcaaactaaaatttcaagaaacgacctagaatagatgaaaaacccagtgcgctaacaattcacagggacaacattttccttgcaacacactggcaaagcaacgacaaccagacgccacttgggcagcagcccggaccctgggcctccaaaccccgatcgtcccggagtcgagttccccactagtttgcttccagccaagcccgccaccacttccacgtcgcagcgacccacacgcctcctcagcgatttaaatccgtttttaactcaccacacacacgcgcgcgcacacacacacacagggttatcggtctccggtcatccaagggaacagggagggagcgagagatcctgcgagcgagaagcggggtcgctccacggtcccgcctggcccggcacccacctgcaggccgcgagcccgggggcggcggcgccggcgccccgtcctcgccaaagacgagtttgaagtcgagctcgtcgtgggcgccacagtttgcagtagtcatcggcgtggcccagggtgctgcagctcctcctcaggcggcggcggcggcagcggcaagcggcggcagcagctcctcaacgccgcttcatgccgggccgcgcgggccaagaggtcgcgactccacggcaaactttccgggcggggcccgcgacgccgagcgttccgttccgaaagctggccgcgcgccgagcagcaccaggaaccgcagccgcccgccaccggtgcctaagcctccactgtcggcttagccaatgttccccgccgcccccccacagtcgccgccaccgccgccgcgggtgcgctctcgcgccctgccgcgcgcccggccccgccccctacgcgcgcccaccctgcctggctgccgattggccactaacacggcgaacaggcgccgggccccgccccctcacaggcctatcgcgtaactcggtctccgcgagaaggaaggaagtcacgtgaacacgcaggcgcccccccccccccccccgcagagcccagctacctctcgggaattgtagtttggcctgtattcccccggcgattccttctaaaccagacgagagaaggccgttagcctctctaattggataggggaccaccaccggccaatgcagaagacccttctcctcattgggcggagctcatgtcgaggaaggggtgctgaagcactgaggttctgggttcggtgatgtgggggcgcatcgtgttactcctgatggctggctctagggaaggcatcagggcccctcagagttacctggacgccgcccacatcctcatccccccacctcaactttaatggctgagtctccagagggcagggaccggaccgagagtccagctaggttggggtggaaccgaaggagacagattgcgcgacaagtccggactctgagctcgcggtcgccgcaggcccaccctctgcggggcggagctttcgccccggtggctgcgcctttgtccccactagcgggcccccgcagctgctcccttgacagcatgcgcgtttgaggcctcagcgaaccccaatgggcagggcctgtcccttgctggaagttgagtagattgagcgggaaagcccgttgtgagctcgtgccaatcacagctctgtgctctctgcatcctgctgcatatccatgaaagcgggagggatggagccgcctaaattgggtggctggcagtggagaggaagtgacactgcctaaagaaccgttttcgtgatctgcccctcccgagcaagctagccttcccgagatggcccaagacgcctcctcctggggtctggggtgaaggccgtccttggggactgggagcctggcttgtttacctaaggctccgctgaggcgcaaggtggacagggacgtgagagaagtagggtgaccgcctcccctagctccgtgccccgggcatagggcccacagggcatagcatccctagatgcgcgttgctggaggaacccagggcactgtcagaggcttgggtgcaggtgcgcccaaaaatgctgccctctcagaggctacaataggttaaaaaaaaagagagaaaaaaaaaaaagaaatgccgctctcgcaaggcctacagcacattccacaccgcccacaaaggccagtgggaagagagggtaaagggaagctctttgccgaggtctcaatgtctggactgacacttgagctaccagggagccctagagggagccaaactagaccttgggtcaggaagacagggaatgtccagggcatccaagacgttcatcttgtattgcttcatttctgcccagtgttttgtaccggtacctgtgctgttcctggggattcagagataaagtctcccttcaggggtaggggagaggggaccagcaaatctataattactgtacaaagagatgagggttgtgccaggagctcagagacagttcataagcctgctagctgcagggccttgacaggggttagtaggaaccggagtgacagacaagaagtgagcaagtttcattccaggcagagaacagatttccaaagacttgataaccataaagtaacctgcagtgggcagaagcctaaggtggggccggatgagtgggcagaatgctgcaggccactgcaaagtgtctggactttatcctgacggcagtagggagcagtggaaggacttagagcaggggatttacatggtcagaattctggatggatcactagattcaactgggacaggggtgaatgaagtcagagggagaagataatgtggtcaaggagagggaacaactggcattagacgggtggactatccttcccaataacctgtcctgcctgcaaatctc

SEQ ID NO: 1243137 - DNA, 4001 bp, Homo sapiens
ccttacctctgccaggcccagagaagctactggaggctcaggactctaggtccctctgaggttggggacatttaggggccacacccctgccccaggccgccccgcccagcccagcccagccacaccctccctgcctgtctgcccccgattaggaggcctgggcaggggcacctggtgggagagtctgcctagctgtgtgccggcagctggcccaggatctcaaggcttcagctgccagccccaaagtccaggcacagggcctgagggggtgtggggggcatgaatgcaggggccagggcactgaatggggacagcagagagcagccctggctggggaggctgcaggcctggcaggggcagcctgggaagcagactcagggctgctcctgagatccggagcctcaccagcaggagaactcgagccaagcccagggcccagcccaggtggtgctggcatcaggcaggcaatgcccatagcctggaggctccacccatcctgagggttcctcccgcggtgatccaagggcctgggagctggcctcaggcacaggagggctgctccaacccagcctcaggtcaggccagctccttgaggccctggtacaccttgatggagttgtccttggcatcagccaccaggagctggccctggggtgcacaggccactcccaagggctgcccaagcccctctgacaccaggcagatgggtggcccagcccggggaaacagggtcacctggcgcctctgctcgtctgccacaataacattgccctctgagttggagcagatgcccgctgggcagccgaaagtgtgccccgtccagccccccagggagcccaggggttggcgggcactgccaaacagcctcacatccccaaactcctcactcacagcaaggcccccatcaggccctgggcccacccagcaggggccctccagacccagcatggaggctggggccaggggctcccaagcaggacccaacgagaagctgtgcacagccccaggcaagtagtccgtcaccaggaggcggttgagggcatccacagccagccctcggggagacaggaaggtgcccactgtcacccagtggcccccggggtcccgggctgtgtgctggagtgcatggacagccccatggatgggatcgctgaccaccacaagccctgacgctgtcacagccacgtcctctggaacgaaggccccgctccccggagtgcggcagggcaggaggcagatggggcgtccctccagatctagcacgtggacacagggtgcagccccggccgtgaggaagagcaggccatcgggggagcagtgcaggccccggggccctcccacagcccctgcgggcacccggatccacccaagcagccggagctgccgggagcccgtggagtctccaggtgggtccagtgtgaggtgcagacacctggaggccagagtccagtcagtccgaatcaccgtctcagcttctctgcagctgggtcacgcttggggctgcaagagagagaataaggccccactgtgtgtgggaatggcaaagtcactcctccagtttcttcctatgaggccgggtcctcctggtcctgagggtctacctggccaccaagcccagcggccaccctagtgtctaggtgcctgggacttgagtctgggagacacatgacccgtggagctcgctgtgggttttcccctgagccccagatgagctcatgggcctcagacagataagcaacatttctcaaatccatctgcctgtggaacccctttctacggcgggggggcggtcacccacacacagcccttctacccgagcccctaggtcagggagacttctgaccccttaggggcgaggcagcctattccgagggcctccacctgccccaccgagagaggccggggggaggggtctcttacctgggccctgtctcgctgggccctgcttcggggctgggtggctgcagcctctgttgttggaaactagaactggaggaagtgggaggagccactggcagggacgcagctgggccgggtggaggagggagagtgcagtctccggccttggcccctgaagcttctatgaaagaaaaaccaggtcccctgaggactccccatgctgtggtgttcctgcctccgcgccttgttgcaggctgcgccctctgcccggacactattcccacgtcccctacacggccagatgccatgcagcccacccccctccaggggtcccccatggtccccccacaaccagcaagttcattactccaagtggcaaggcagccccaggctgccacccccaagcagggtccttgggtctggaccacaggcgggtgacctgctggctgaggcaccctccatgaggcctgtcctgctccccacgggtgacagcgaaggaggtcgtgtctccacacctgggagacgggtgctgttgcccccagcaaggccatgctcacctgtctgctcagtgggggtgagaaactgaggtgcagtggacatatggggtgcagtggacatatggggggcgggggctgaggacagggagtctccctcagactcgggacttgggaacagttcctggctgcccagagccccctgcagcccctccaggaagcctctgggtagaggggcccggctgggacctgtccccacagcactccgcgcctggccaggcagcaccccagctctagctgccccgaggcagggtcggggctgatgctatctccctggtagttaatggggccgctgccagcctgcttggactggccccagcccggctggacgcaggcaggaactgcttctcctcctgggggggcgatgtgggctccagagcccattccagggtgggcgtggagggtgtggccagctctcccaggagagaagtgatttgctgtgggggtcccgggtgcccctccctgtctgcccatcccctgcccgtgggagggccaagccaggccctgctgggagggaggcagtgagctgtgaaggctgatacctatcacggctgcaggggctggcaggggccagcagagcccacgctgggtgagcagcctccagccacagagccccggggccaccgtttaaccgcaggagagctgatatgagcgcggccttgctggattcagaggctagaggatgttcaggggtccgtgcccacccccgacacaccaagacacaggccgagcagcccagtccacacgcctctccacccccgacacaccaagacacaggccgagcagcccagtccacacggctctcctggctcagctcccgtcgccgatgtcccgccccacccccagaccccagccccgcggggagggcccagcccacaggagagggccgagtctgaagacagaggcccagcaggactgctgcccacccaggcctcccaggccaggacacttccttaggggggtgtccaggtggctacactagggccccaaaggaaggaggcacagacggcgtgtgtgaacagtttctgttttaatgtccacaattgtgatcaataaataactgtgacctccagtgtccctgtgtggccccagggacaagcgttggccacggcccgtgggggtctatccacatgcatgcggaggcggggcaggtcccaggcaggtgaggggcaggggctgcaggagaggggccggcatgctgcaggcagagacagtcagacctcaggcgctgcaggtcagacctcggcgccctgggggctctgcaggccacagacagcctcaggggtctgggaactcctcgtcgcaacacaggtgccccagccactgccaggaatgacagggtcatctggggctgcgagggggagccctgggggtgggacgctggagtcggcctcacacttggtggtgtggccagagaagggttggggcgctgcagggcccagcatgccgggtggctcgggggtgcccccggtcaacacgggacccagctcgggccgcccccacgcctctccaagagcctggggccccttggcgggcgcacgtttcaca

SEQ ID NO: 1243138 - DNA, 4001 bp, Homo sapiens
cactaactcactgaagtcattcaatatgcccatattgagggctggaaataacaaagacggaaaaaatacagttctggtctttctgggattcaaaacgtgctgagaatttattctctcaagcactcagattgaagacatacccttcttgaataagagtacttgagttctgtaacagctaccatctctactcaccaaagggatgtctgccatggagtacaccaccacgccctggtactgagaagtattttcagtgattcgacccagaccagatttcaacacatggttcccatacaggaaggactgctctgcaccaggctttatccaaactttatactataagagaattaaaatccaagagacataaaaacgttactatttctatccatgcagacaagctagctgctggatctgtgaataattttctgaaataattttaagggaaacagagagactcatgttttcctcaaactgtctatctcctgaacagaaatgcaggaagttgcccggtgcagtggctcacgcttgtaatcccagcactttgggaggccaaggcaggtggatcacttgaggccaggagttcgagaccagcctggccaacacagtgaaacactgtctctactaaaaacacacaaaaaaatcagccaggtgtggtggcacatgcctgtaatcccagctactgaggcacaagaatcactggaaactggaaagtggaggctgcagtgagatcgcaccactgcactctagcctgggcgacagagtgaaactgtgtcaggaagaaagagaaagagaaatgaaaagaaaaaacagagcaagaaagaaaaagaaaaaaatagaaaaagttattttctcaactctacaaggatcatcctccatggccaggttaacagctctttttctggaccccggtgtcttcattgctgccacttatttgctttctgatctctagctgggtctccctaggctcttctacttcgctggagaaaactaaccctacgcagccacatagcattcctatcccatagccctgaccatgctcaagctgcaagacctctacacatctccatgtgctgaaactcctccaagcacactgtcagggactctgtgggagagaagctgccggacaatctgcctaatccttgacttcatcgcccgtggcagaattggaaaccgccccacaaaccttggcataaggtgcaaggtaatccagagctgtgacgtgcaaccgaaacttgtgggttttagtgaattttccaaagcaggtccccagcgacaccagcttgtccccggaaatattggcggccagcttcataatcttctcactaaaagggtaaagggggagcaaggttgcggatgaaggaggctcgtgggacccaggacccctctcccctgggtccatgctgcctgcccggccccgcctcacctcacatagtacacccggtcgttgtgcagacggaaacagtaggtgccatcgggccggtccaccagcagttgaagattctccccaatgctgagggcaaaaagaggactggagaccgcgcccgaacgaaccggtctccggcaccgcgcccccactccacccttggccaccacacccacacactcccgcgtccgccccgcgcgctcctactatttcgctatcttctcaaacatgacacgggtctcctcttcagtcaaaggccgcatttttccccctgggttggaacaccggatcctcgtgccttggtaactggaaacggaagtcggtcgctcgctgctccccggcaatcccaaagccttcctctctagccccgtaccaatagttcgtctcgctagcgcccaatagtctggacgaccgcaggggaaagcaagccggccggatgagaaagcatagagaccggaaatgtgcctgtttcttcctgtcctaagttcggagtcagcgccccttgtggtccggaagggaagtgacgttgttgctgggaagatggcgaccgcggcgactatcccatcggtagccacggccacagcagcggctctcggcgaggtggaggatgaagggctcctggcgtcgctgttccgggaccgcttccccgaggcccagtggcgcgagcggcccgatgtgggccgctacctccgggagttgagcggctcggggctggagcggctgcggcgcgagcccgagcgcctggcggaggagcgggcgcagctgctgcagcagacgcgcgacttggccttcgctaactacaagaccttcatccgcggcgccgagtgcaccgagcgcatccaccgcctgtttggcgacgtggaggcgtcgctcggccgcctgctcgaccgtttgcccagcttccagcagagctgcaggtgcgacgcgcctggcgctaaaggggttttataactgtaaaagctgacatttacgatggtagaaataactaacacataaagcgtttaccacgttccaggttctctgctgagcgctttattaatccatttaaacctcacaacagccttcgagataggtactgttattccttttttatcttttttgagacggagtctcgccctgtcgccaggctggagtgcagtggcgagatctcggctcgctgcaacctacctctgcctcctgggttcaagcgattctcctgcctcagcctcctgagtagcagggaccataggcgcgcgccaccacgcccagctaatttttttggatttttagtagagacggggtttcagcatgttggctgggatggtctcgatcttttgatgtcgtgatctgtccgcctcggcctcccaaagcgctgggattacaggcataatccactgcgcccagccctgttatttccattttacatatgagcaagtcaagacagagattagtgacgtccaaggacacagctaggaggtttcgaattcagaactggttacccagaagcacgtccctccctcgaagggcagttgtgggcacaaagaaaaaggattcatgcaaagctcttattatcgggtctgacacagttaacattataggtgtgagctgaatatatgtgcacatttatatacttattttatacgaaagcgtggaccggaggtcatctgcttcaaaacttccattgacgggaaggtgacaaggaaatcctcgcatttgagggcatcagatatcaaaaagtctctccatttggatggctggatgtggtggctcagcctgtaatcccagcactttgggagcctgaggcttgaacccaggagttcgagagcagcctggccaacatggcaaaaccctgtctctataaaataaaaaattagctggtcgtggtggcgtgcgcctgtagtcccaggtacacaggaggttgaggtgggggggtcagttgggcccgggagattgaggctgcagtgagccatgattgtgccaccgcactccagtttgggaggtcgaggctgcggtgggctgtgattgtgccactgcattccagactgggtgacaaagtgaaactctcttaaaaaaagaaaaaaaggctgggtgcggtggctcacacctgtaatcccagcactttgagaggccaaggcaggcggatcacgaggtcaagagatcgaggccatcctggctaacatgctgaaacccccatgtctactaaaaatacaattagctgggcgtggtggcacgcgcttgtagtcccagctactcgggaggctgaggcaggagaattacttgaacctgagaagcggaggttgcagtgagccaagatgatgcgtgccactgcactccagcctggtgacagagcaagactccgtctcaaaaaaaaaaaaaaaagtcctttgtgagtcatattctgtctccattatccctagttctgccttccagcctttcatgattaaagtttaatttttcttttgagcctttggatatttgacagcagcttttgtacccttccatgctccagaatagataggggacttgataaagcaggtctctgcaaatatggagaagtgttgaaagtagactgtggcaggaactatggttgaacattagcata

SEQ ID NO: 1243139 - DNA, 4001 bp, Homo sapiens
ttcatcctttgatcctaggcttgcgcgagttccacgcagactgcctgaaagccccgtgcagagttccggagctcacaggacatctgtgaacgccaagtcccaggccaggagctggggctggactcactcattcccatcacacttagtgctcctccaggaactccagcctcagagacacacggggtgaaggctcagggctctgcccaggctacagtggaatgaggccctctatctcatatgccaagtaaggggtcttccaggtctcagtccccctagatctgctacccagagggccgcctgctctactggggttcctgtacaggtggtactgatgaatgccacagacaatcagaacatattcagatcctggggccagcacagctctgccttccacccagacacccctaatacccccttctctctagcccctactccacctccacctttgaatgctggtggcagaaacaaggtagaagtcagagcaggcccccaaatcccgccggtacagacacgattccccatcaactggaccttcaccacctccccacctaggacctttcccccaggcagccctctgcctccagctgggcacttcgaggttctccaaggcatgcgggcagagggtcgcgttggtggggcagggggcagctgagaagagattttcagacccagaagctgtgcaggaaagtgctcaaagttggggtgcatgggtttggggacccatctctgaggctgaaaggaggccaggaggtggggcaggggtggggaatcatacccgggtgcttcggcctatggtgcccgccaaccgcagctgtcggggtcccgagacaccgcccgggcagcgctgtctcccgatccactcctcgatgcccttccgagcccaggcagcgctcacggcgaagctgtcacctgggacggggacgacatgaagcccctgagtctggctccaggtgccaaaagttacccccgcggagggaagaaggaggcgcggtgggaggcgaaggaccacggcacgggggccaggagggggttcgcgggctggggcaggagccaagagagggacgcgggtaagtaaaggggggttcagcgaagccctaggagcgaggagccagaagggggcaagaggggtgagcagtaccccaggaggacgggtttaggatcagaccagggagcactggcagccaggactgcggaggagagggctgggggtcaggagaggggccgcagtaggtgcaggagccaggatatcggaagaagggccggggggcaggaagagggggcagggtcttgcggggaggcgcttgggggtctgaagagagggtgccgtgagagccgagggcagggacgcgggagggggaggggttgagggtcagcggtgggagcgcaggaccgcggggagcgggtaggagggacagaggagggggcgcgaaggctgctcagggagcgggcttggggggccggtggccggaactggggcttcggggtggccctggtcataagacctggcgggctgggccgttctgccgcggccgcggtgtcccccgcgtccatccccgaggtctgcgccccgcgcgcccctaccttccgggctctccctgcgcttgcacacggcggctgcaggcacatcgcgaggcggcggcggcggcggcagccgcggcggcgggagaaggaaagaaaggaagggagagagttagcgaccgcggcggcgacggcggcggggcccggggcgagcgcgcgggcgggggcactgacccggcttggagtgaagtttccccatgctggggctgcggcggccgggagcgtccctaagccatgcgcccggcccgcgggcctggcgcctcccttggctctcctcctcccgaagcagcccccgagccgagcggagcccgaggcggcgccgggacgcgctcctgccgccgtcgccgcggcccgactgacgcccgggagcgccgagcccccagcccgccgccgcggcccgcgcctccccgcgcgcccattggccggtgcggcgcatcaaaggcaaggctggttgcggcgggggcggggccggaggcggggcagggcggggacgagggcggggcgctgacgggaggggcgggacacagtccgcgctccctgccgcggtctggggccgggggccgagctccagggctggcgacccggcggggcggcttgtccaggaggcgtattgggacagaacagcccggccatcgctaactgtactgtcacttccctccgctccacgttctctctaaacgggcagggcgggactcggcggctccaatttacaggtggggaaactgaggtcgggagcggagaccttagctgctcaggtgcaagcttcggcagcgctgccttttcccagtcttcccacgacctaccttctgcagaaagtgttcattacccgccccgtgacccgccccccaccaccgcactcctctagtttcttatttggggagtccaggaggagcccccagcgcaccccgggccagtgtgagcccagccctctccaggcagcgacaaatgtccaaagcgccccgttatcagccagtctctgggatctcctcgtccgggggcccgtgggtgcccgcccgggtcggggcgcgctgccaaactgcgcggcccggaagggggtaaccgctgagtctttgatcttccttggtttccgctccccgctgcagttcgccagacccaagggtttgtttgttttgtctggggaggtctctgcggggaggtcgcgcggggggagggggatggtggcggtcgacatcaagggattccaccccacctttgtggctctcagaacgcctgcccccttctggggacactgtgggtccgtgttacgctcgtcctggcaccaggcagctctggcgtgggaaaagaaaacccgcagctcagagtgagaccagccccgacctttggagtgaattacctgtgctcagttttgtgatctgtataatggaggctccattctgccctttttgccgactctctagagcagcactgcccaatagaaatataatgtgggccacatttgtaattttaaattttcttgtcgccacatcttttagaagtaaaaagaaatagatgaaatattaataatatatttcgcttaactcaatacagtcagccctccttattcacaggttccacatctgtggcatcaaccatctgtggactgaaaatatgcaaaaagaataatacagcaaaaataaagaataaaaaactttttaatatagtataacaactatttacataacatttacattgtattaggaattacaaggaatctagagatgatttaaagtattcagaaggatgtgtgtaggttatatgcaaatactacaggacattttatatagcggacttgacatctggggatttgggtatcctctaggatcctggaaccagtccccaaagacaccaagggaacaccatatatccaaaatagtataatttcaagatataatgagatattttacattctttgtattgcgctaagtctttaaaattcagtgtgtattttacacttaaaacacatctcaaagactagccatattgcaagtgaccatttgcacttggctagtggctactgcattgggcagcatcgctctggaagatctacatgtctcaaaaggacattaggaattcacagccccccagagtcataaatctcttcatccaagtgtcttactttcatgttccaagcttccttttttaacaccctttttggtggaaacgaaggctaatgttataagcaggtacactaaaatcctgttggccaggtggtttcatttgaagagtgctgaaaccacaaaaatatattactgttgtcatttttatgttacaattcttcattcagtacttctgatgtgccagtcctcatcctccatcatgtgtagccctcgcaaccactctctgatgcagactcatacttgttctagaaaggagggaacctattcaactcagagaggtgaactcacttgcccaaggtcacaaag

SEQ ID NO: 1243140 - DNA, 4001 bp, Homo sapiens
tgtgagcgcagctgaaagacagagagactgaggacaggtgggactcgggttgctttgggggatctgaaggccagaggtcgctccacagctggtttgagctgctgcgagcagggcgaggccagagggacgagtaggtgccactgctgcctcctccccgggagcctcccaggtagcaccaggtttcacccctagagctttgtctgtgagcgaaggtgaacctgaggccttcctggtgtggtgtgggctcaagcccagttcctcaggctcagcaagtggcctgctgcctcattcctgagaagcctcagtcccgacggactagccgcctctgcccatcacccgcccacctgatctgtgcctcagtccttgccgggacctgctgggtccttccctgccacttggcgcccgggtgggacttcccagtgctggctgcctacctgggctgccagtatctcccaccacggctgcttggatgctcctctcttcccacatcctgcccctgccccctcccagggccttggaattcaggactcggttctctcgaggtggccccagcatcatcacttgagctcaaaagccttcccgaaggaagaaggaagtggcacctgcacctcagggccctaccctgctcactgcatggacccctggagtccaaggggtggagaggcccagccctggggagcccagcaccctgggacagaagaagaggggtgcagcctgcagcctgtgatggccaacagtgagccccaggctcagggtcacctccagggaggggtccagaaaaacaccagggcctctggagcctggccataggggaagaccctgcagccaacacccaggctggcccagggcagtggcacttcttccgagaaggcctctgcggttgccgtctctctcgacccttgtctcacccaaggctgtgggcaggagaggccctggggctgcccactcgcctgggggcggcgcctgcaccctccctgcccctcatgacctcgcccctcctgtgctgtcacctccatctacaggtggggtgctgaggcccagagaagtagcctcccatggggggtcccagtgccaggaagggtgcccaggtctgccgattccccaggccgtggctcagcatcaccactgcctgcccgcagcaccttcaagatgcttcctgcttctcctgggccatcactggtacctgggggagctgggttttgtccctgggacctgtcctgggccattcttagttacctgttttttcttttcttttttgttttgttttgttttgttttggagacagtctcgctttgtcacccaggattgagtgcagtggctcgatctcggctcactgcaacctacgcctcccgggttcaagcggttctcctgcctcagcctcccgactagctgggtgggattacaggcgtctgccaacatgcctggctaatttattttttatttttagtagagatggggtttcaccatgttggccaggctagtctcaaagtcctgacctcaagtgatccgcccaccttggcctcccaaagtgttgggattacaggcgtgagccaccgtgcctggccacatctcttttttctacagcatgagccagtcctgccccaggagacagcttcttggagtctcgtggagtctccccagtccccctccccagagtagctcaggccttaaggccactgtccttcctgccagcatcccttctccctcccctgccctgcactgaggtcacctggacccaacttacctcccgggcctcgatgctgctccagggacagcaagactggggggcctgggggcgtccatctccatgctcctgggctcagccctgctccagctgcgtggtggtagatgccctgggaatccctgtgccagcctgagttctcaggaccagggatcagggcacttaccacgccaaccaaccaaccgtgtgggggccgagagcagtgcagccccgaccttctgcagccccaccgagcccaccggctgtccctgtggctccgggtcctcacctcttcctgtgctgggctccacctcattcttccttcctgtctgatttcaacagccaacagcctcgcagacacatcgaggagccggggcaccctggcttggtcaccgcccccgtgcaagttaagtgcgggggcgatgctgggggtcttgactctgggattaagtgtccctgcaggtggcatgctcaggataaagtggctggtgccaaggctgttgacacatcacctccatcccgccacaaaggaagctgccccgccatcaacaaatgcttgttttcaggcgggtggtcaggaaatcaagtgagcagcctgaggtcacgcaactagagggtgaccccagcaggactggactgtgccctgccacctccaggccacccctgtggctctccttatttatttatttaatttatttatttgagacagagtctcgctctgttgcccaggctggagtgcaatggcacgatctcggctcactgcaacctccccctcccaggttcaagagattctcctgcctcagcctcctgagtagctgggattacgggcatgcgccaccatgccccgctaatttttgtatttttagcagaggaggggctttgccatgttggccaggctggtcttgaacgcctgacctcaggtgatccacccaccttggcttcccaaaggggtgggattacaggcgtgagccactgcgcccagcctatttattttttgagacaggatcttgctctgtcacccagactggagtgcagtggtgtgatctcggctcactgtagcctctacctcctggggctcaagtgatcctcctgccttggcctcccaaaacacggagataacaggtgtgagccactgtgctccctcttttaacacctcttgctttcttttctctctgtcacccagtaggcacctctgactcagctgtgccccataacatcttcctgtgagcaaagggctccccagaggcaggtcacctgtaccctaagaggaaacagcagaatgttgccgtccgcggcaggagatcgcactcggcccctggaagtggacctcagtgggtggcctgccctgacagggaagggcgtgagggggaaggacatggcccagagcaagccacatgagaaaaattacaataaagtatgggacatccgctggggacagggagcaagcaacatggggccactgagggaaggaggtgacaaggtgggagccaagggacaggggtcctggggtctgaattttcctcagcaagcaagtgggagccagcaatggttgtagagcaggagagtagtgggtctggactcatagagcagcttgtggctcaggggaggtaggagggttagctggttccccagagcctgtgtgggtgatgggggggagggaactgaggcagcagaccagaagtgctcctgcacattcccctgcctgcctaccttcttttgtccctccttcctctccctccctcccaacaatgctttctgagcacccaggaacctgctgggtgctgggaggacacgatggaccctcgagaaggctgcccgaggctccaggcaggcagagtgcagacccagcagctgcagcctcggctgtggggagcaacaaaggcgcctgaaaccaggccgcccacaggatgttggaaaccacagggcccggtgggtatccgtcacataaaaggggccagaggctcacactgcctccctttgtggctcagggggatggatgcggagcctgagaggacacagcctcatccacgggatcttggggagcagcccaacccagcccagcccagccccgccccgccccgccccgcccgttcctccccctcgcaggaatgtccatcagtccacacagggctggtcccattccccactctgcccgctctgctgagaaccaggtgggccgtcctcctggctcctggtggaggtgggggtgctgggctgggggctccctaactgttctcactctggggctttctgtccacccagagctggggtcagccagaca

SEQ ID NO: 1243141 - DNA, 4001 bp, Homo sapiens
atagagggcacggggcatttacacagcaaaagcctaaataatgtgcagttcctttgattcagtaattccatttctaggactctaaccttggcaaacgatcatgaacgtatatacaatatttaattgcaaagatgctcactgcaagattatttataattattaaaaattggaaacaacctaaatgtccaacagttggggattggccaactaaatggtggtccatcatctagtggactatgctatcacatttccggatgtactttctggtactatgtccttcctcatagcagtacacacttggaaagcactcactgtgtattaggcactgtctaagtgctttatataccttattttatcctcacaactccagagagtccacctctaactctgaaaagagtaggaggtccacccagaagccagccttcccaattcccagaggctgaggccagtactatgcgtcctggggtttagagcccagctgctccctgggcatgcagtagagacatacttggatgtactgtcagccccactggtcatttctcctcaactgggctaatagcaataggtcctcactcaggcagagagtcttagaatttatgaaacatgctcacaccatgatcctcaggcagggatcaccacctccactaagcagacggaaagaccatggccaaggaagggcaaagggtgtgcccacagtcacacagcaagtccatgacagaggcaggaggagaactgaggtttcttgcctcccaggccagtaaatttccaaggccttggaggcctagatggcaccagacaaggctaagtccctggattttgtgtgatctcggcaaaaggatgtggccatagcctagggcataacttcttttccaggctatggtgtccagcatccatgctacccatgaagaaatggtccagggcagcatggcaccagatggaagtaagtagtgcctggatggtgtgatttctggtgatgtttctcatcctcaaatttctcctccagccagtctaacacaatacctttgtttccatcattagtgttctatccccttaggatatgacacaaatctctttaaggctaaccatcctcaggagaaaaagcacatggcatcattatcagtcattgagatttccatggggaataatcttggagacagaggacgatggttgaaagatccatggcccagctctgttactaattctctgtggtaggcattagggctgttcacagatactctttctcctctttctaggcctttggtgggattacacttctctgcctccttgaaattgggcacagccatgaaacttgctttggtcaatgaaacatgctaaaaaagactcatgtcatgcctgtagttgttttaagaaccaaggtgtaattgacagtactttttctttttttctactccagggaccagaaatattgcaaatcatggctaccctgttagcctgagtgtgggagacaggatgatgtggaggagcaatcccagtcaatccacacgagacaggaagcaagagcaggaaataaacttttgttgccatgagtcactgggactttggagggtgcatgtactacagtgtaacctggcctatcctagctgatacactcatagtgtgaccttgagcaagcctttttcctatataagcctcagtcataccatctctaaaatgggtagattagatgctgtctcaaaactcttcctgattttctgtgtctgatcattacattctcatgctgaatgatggtcaagggcaggtttgttgtgttgggggcagcccagtaaggcagatttgggtagggaccagtcttggcagtaggagaaaagtgacgaagtagataggaggggaaaagaggaggtgaaggggagagaaaaatcacctacttggtctcctcgttcatgataggtgctctagggtccccacggagagggtctcatgggtgtctgggctatgtgtgccttgagctggattgacaggttgtttccatagtgcagactcctaaggggagagaagacagggagttttccccactattccagactccaaaaggaatgctgtaaaccaggcaccagcccttgcccctgcctgccggagacacatctgagaacattggctccagacacagtccccccaactccatccgctagaccttgttcttccccgactgcagctccttgtgtccctgggtttacgcagcctaaccctccttgatgtcacctcctgccacacctggctcagaggatgcccctcttcctcctccaattcagatatgcaccttacaatgtcctttggcatcacaatgagccctgcaagtcagcaaagttattactgctcatttattcagatgaaaatgaaataatccttactgcagatgccaacttttgcccccaatataaaaccccaaaaaggttaggatttgcaatcttcttcctatttagttagttttttaaacaattgagagtaaacattcttcttaaagagaagacctggaggcattgatagctgctcacagaaagcacaataaaaagatgagctggcacaaactcccacaccacgcaacagagatcttcctacgaacaaagaagagaacaggtagctacagagtacatggaggaaatgaagagaggcggaagatcagcgtgtgctctgattgtgtctctgtgaaatacggggaatgtaactcagagttccatgactttagacaaatccacgtaaatagggcacattctgacataatggaggtggtatgtagtatggtaattagaaataagaaaggaaaagagagatcttttgaagaggtcctgggggactaataacatatgtctatatttctctttctctctctttcttttttcttgagatggagtcttgctctgttgcccaggctggagtgcaatggcatgttctcagctcactgcaacctccacctcctaggttcaagcaagtctcatgcctcagcctcccgagtagctgggattacaggcatgtgccaccacgtctggctaattctagtatttttagtagagactaggtttcaccatgttggccaggctggtcttgaactcctgacttcaagtgatctgcctgcctcagcctctttaagtgcttcttttcttttctttctttttttttttttttttttttttgagatggagtttcattcttgttgcccaggctggagtgcaatggcatgatctcggctcaccacaacctccaccttctggttcaagcaattctcttgcctcagcctcccaagtagtgggattacaggcatgtgccactacacccggctaattttgtatttttagtagagaaggggtttctccatgttggtcaggctggtcttgaactcccgacttcaggtgatctgcccgcctcggcctcccaaagtgctgggattataggcatgagccactgtgcccagcctctttcctttatttatttatttatttatttatttatttatttatttatttatttttttaagagacagggtctttctatgttgcccaggctggattcaaactcctaggttcatgtgatccttttgccttagcctcctgagtagctgggactgcaggcatgggtcaccacagccagctaaatgatattttaaaaaacattatcacactgtaacaggagaaataaagagaggctttagcaaattgagataaaaacttgccgtggactgaatgtttgtgtcccacctcccccaccaattcacctggtgaagcctaaatacccagtgtgatggtatttggaagtgggacctttgcgaagtgattaggtcaagagggtggaccccttatgatgggattactgccctcacaagaagaggctggaggccgggtgcggtggttcacgcctgtaatcccagcactttgggaggccaaggtaggtagatcacttgaggtcaggagtctaaaaccagtctggccaacatgatgaaaccccatctctaataaaaacataaaaattagtcaggcatggtggcaggc

SEQ ID NO: 1243142 - DNA, 4001 bp, Homo sapiens
caggctcagcctcaggttgatgggggatgatgtgctcccggggcctgcctcctgcacggggctccacggagcccagctcccagacacgctactaagtgcctagggttgcccgctgtggcctgcttccagggagcaacagagaggccaccaagcagaggcccgtggggctgaggatggagccgcccccagccgactccaagcccgcagagggcagacgccaccctggactgctctccctgcccagctgggcctctctggcctattcctaccttccaggcccactgcactcctgtctgggaggcccttatgagggcagcccagcccccgcacccacccccaaccagagaagcacagatcttggggagctgccccacaagccccgctggccaccgagggctgcagccgctgcgctgccggcttctccccaccaccctgccacctccactgtgatgtatgtccgctccctcgtctgttcccccaggatctcgaagtgactccgggctgagcagtggggcggctgggggaggggtgacgattctcctcaggctttggccctgcaagcaaacccacatatctgctctgtatgtaataaatgtcttaacgtcgtagctgcctgttcctgggcccaaatcgaaacgaaaacgaggactttattataaaaaaacgttggaccacgttgggctgggcaccaggacagtgtcctggcacgtttccaggcgagccgcgcaggctcctggagcagctcctcgggcaggaaaccctgtacgccagggattggagaggcctgcgccaccctccatgcaacgtccagacaggtggatgttcagcagcccgtccaaagggatgctccaagcgctgtggggtggggccagaagcccgcccacctgggccctggaggaggctggagtgtgagagcctctgtgacgcgcatctgccgggctactcatacagccagtgcccagcgctgtcctcccagcagaggagctcgtctgcgcggaaccagagagcgatctcgcggcgggcactctccaccgagtcgctgccgtgaatcaggttcctgcgcggaagaggcgcgtgtgagcgtgggaaagagacctccggcacgggtaccacgcaggctgaacagggggaggccggacggggctgggaccgtccccggggcgggccttacttgccaacctcgatgcagaaatccccgcggatggtgccgggcggggcgtcggccgggttcgtggctccgatgagcgcccgcgaggtgcgcaccacgtccagcccctgccatacctgtgcggaggaacgggcgcggtatcacgcgggggtgggggtcccggagccgcccgcccgcttcccggatactcaccatggccaccaccggcccggaggccatatacttgacaaggcggccgtagaacgggcgttcacgcagctcggcgtagtgctcacgcagcagctcctcggaggcctgcggaagggtcaggccgcctgcgcccgcacccggcacctaggcgtccccaggtccccgctccccttccccccacaccgcgcccccgctcgctcaccgcgcccccacctgcaccagcttcagcgccaccaacttgaagcccttcctctcgaagcgccgcacaatctcgcccaccagccgccgctgcacgccgtccggcttcacggccaggaaggtgcgttcgtgtgcgccggtgcaggctgcggggcaggcggggacgggccgtcaggccggcccagcaccggccacccgcccccggcccgcgccgcgcggctcacccgcggggaagaggttagcgaagatggtcagcaccaggcagatcatgatggcggtgcgggagcgggatccgcggggcggggcggtggcgcccggggcggggcctgcgcttaaagaggcctggtcggggcgctgcggcctccgcggggaggctgcttcacttgcaccccggaacccggcagccgtggggggccggagggcagctgcggaggccaagtctcctccagcagctcggacactaactgtatcccccacaacccgcccaggtggttccacccacgcggcgccctgctccgcaccgcccgaaccccgccccccccgcgcccccccggccagggccacgaccacagcgtcagcccttctctccccggtcctaaagacagagcgcaaagacaccacgaccctgggtacttcttttctctttattccctttcatagcttctgccgggatccaggcagagagagcactaatgggggaaagggagcgagcgcttcccgctttccccagcgtgggccctcggagttgggtgtgggggcagcagggccagaggaaaggcacaggtggcgatttgccccagccctcccccctaagatgcagaccctcagaacacgtcgcggaaggtgagctccctgctccgagaggcagactcgggtgtaacgcaaagacggtttctttcatcaataaggtccccactgcctcacagcccctaaggccacccgctggttctggcattctagacgggggtgcccttggcccttcctttgtcttcctgttttgcagggtaatcccagggttccatgcgtatcctctgcacattcagcatgggctcctcggtgcttgtgtctccatttttctgtcgttctgcgataatcatggcccggaggagaggcgggtacggcacggaggccaggctgtcttccggcgccggcgtgaacgcggtgaaggcctcctcctcgtgcttgggcaccagccgccagtcatggtacatgacgtgttcgatctcccgcgcctcgctctcagtcttccctgatgaagaaaaagaggcgtctgcacacacttgctgtgccgtcggcggtcggcatcgaactgccgggcacccgctctcccgagccttacctttgaaggtcaggatgccccaggccttcccgtggtccaagttctgcaaagccagaaggaagcggggtcagctcgcaaagctctcggcccccgaggtcaggaggtgggagcctcagccacgcaaacctgcagggaggaggggaggcggggagaccaggcggctgcaggggcggggtgcggacggggtgcacgcacctgcgccgtgtagtcgggccgcacccgcgtgaggcgccagtagcacggctcgtcgtgctgccacagccaggacttgcgcgtgaccaggcggcccaggccgaagagcgggaggcggccgagcagctgcaagaggcggctctcgcggcgcacgtcggcccaggcccggaccggcagccggcgtccagagaacggccgcgtcaaggtctcgtagtccaccgcgtagagctgggagtcgcgcggcctgttcagttgctcccgcagggcgcgcacgcggcgggccagctccgcgatcagccgcggacgcaccttcttccgcgccatggcgggtccgcgtcctcagcggtccggccggaagtcaccggaagaggccggtgtcccaggctaaagtgttcggtcgcggccggaagcgaggaagaggtcggtccggccatggcgcgggttggacccgggagggcgggggtctcttgccagggccggggccggggacggggcgggagcggtcagcggcgacctccaacctgggagatctcagactccgacgctgaggactccgccggctcggaggccgccgcgagagcccgggacccagcgggtgagcgcagggcggctgccgaggcgttgcggctgctgcggccggagcaggtcctgaagcgcctcgcggtgtgcgtggacacaggtgcggcggagggcacgggcgatactcggggtaggaaaggcctttctccgccaggcggcgccctctgtccgactgggcggggcgcgcgtgccgaggggcctggggccgggcccgcctcccagtcgggggtttgtgccgaatggagactccccggtccggccacccgcccaggtagggcgctcgcgagggtggaaggaagcagtgaccgcgctcctctcccccggtcccagccatcc

SEQ ID NO: 1243143 - DNA, 4001 bp, Homo sapiens
gtgaaaggccgagaaggatcccccaaccccatccccacagggacacccacaagcccagagtcccactacctgcagcatcttcatccccaccagcgtgaagccccgcctctcaaagcgctggatcacgtccccaacgagccgccgttgcacgccatcgggcttcaccgccaccagggtccgctcccgggtccaggagggccctccttcaaaaggcaagaggtcagaggcactgccacctcaccctttcacgtccccacgacccgggtttcccagccagagcccaggggtcaccaggcttcagggtgtctgcctctatgcagggcactctggaagggacagggatggtgcccacagccacaaacacccccatgatagtccctgtcagggacacccaaggcaatgtgtccccagggcttctagcctctcccaggggccatggctcctcccagcagaggcagaggctgcctgagatcgccccgaggttcagggaggcactgcccagctcagggaccaccaccgcaaggtccatagaggcagagccagctcagggaccacctcaaggtccagggagggacagcccagctcagcgaccaccctgaggtccacagaggcacagcccagctcagtggcctcagggaagtctggagatcctgcaaaactccagcctcacttttgactccatcccttctggatgacgacagacatggtctgaagccccgactttccacatgaggaagaacccagagcccaccctgtgtctgaggtgaatgagtggcagggaaccagggagaaacacactttccccaccaggtgagccctggaaacacggacaaaaaggggcctgaagattgaagagggaaggtagcagggttctgtccgagccaggagacggggcctgtgctgctgtggagtttcaaggcctgtcgcttccagacccagggtcagcgctgagctccgccccagccgtcctcctctggaggggacgctgccagggaaacagaagacgtcctcaccttcctatagtcccaggctgctccagagccaagctaccctccggcatcgggtccctggtttccagaggagcccagaccctgtatgtcccacagaatctggacagagccaaaggggctccgccaggccaggaggaaaagttaaccccagcaggcggctgaagcccacgggaggaagaccccctggttggtttgttcccccaaaacccagtttgcagggcgccttgtgtagcctggggctctgctgcggctggtgcgggcattgcaggcggcggctcacttttcagagccgatggagggagccctgggacatggatcgtcctgtgaggtggcagctgggggggccgggcagcggcggggccggggacttggggcctgacgtcccagtcagattctggcctaacttggccttcagcgaacgccccagcggagcggctccccccacccccaccccccgactccctcacccccccacacccccacccccaccccccgactccctcacccccccacacccccacccccaccccggccgggagaccccctccccgcccagtgctgcagccggcctctgccttccttgcgctcccgggccctcggtcgccccggacccgcccaggctgccaactcgccgggcgcctgcagcctggggcctggggaggcgagaaggagccgcagagccggacgggcactggaggggcgtgcgggtgcgagccggcgccttccccaactcggacggaccccgcagcccgcgccccgaggcctctgggggagtcggaccccagcccgcacgtgcgcgcacaaaggccgagcggcgcgcgccccttcctcccctccgcgtccccgccggggcgcgcggccccactcacccgagccgtggcgcactagcaggctcgggcccggggcccgcgggccgcagcgcagcccccgcagcgcggagcgccagaagaggccgcccatgacgcccggcccgcgggccgctgtgagcgcgaggagcgggcgcggagggcggtgccagcccgagacccgcccccgcccgcccgggagccccccgccgccccggagccccccgccgccccggacccccgtggcccggcgctcacgggggaaatgttcaacgccaatttctgttaaaaatcagaagaaaaaacaaaataataatgaatccttctcgaattgcattcgtctttacaccgacgcaaccgttaactatcgttttaacgctttcccacggaggaaggcccactcgggaggctgaggcaggaggatcgcgtgagcccaggagattgaggctgcagtgagctgtgactgcaccgctgcactccagcctgagcaatagagcaagactctgtctcaaaaataaattcacggaccaaaaggaggtctagaagccctggtctgagccccctccaatggagggtgaaattcccacgtgagccccagggcgggagaaggaggcgctccggagacgctgactctgcggccaggacgagtaggcgggactacagacccgcgccaccacaaccagctaatattttaattttttgtagagatggggcctccctatgttgcccatgctggtctcaaactcctgggatcaagaaatcctcctgccttggcttcccaaggtgctgggattacagatgtgagcctggtctgtgaatttgaatggggaaaaatccgacctttattctcaaatggcctctgatgtgactgcattcctctaattcattcaattgcggatataaggaagaagccacattcatagttgcagggcctgtgactttgtcaccaacagaattcacaggtacggtaatatttgggtagatagcacagcatgctactatttgaaatggttaggtctcccactgctagaacttacttaatgagtcttgaaaaagcctgttctttttgctgctattgtgaatggaattgttttcttatttgaattgtccattgcaagtgtataacagacaattgaggtttgtttgttttcagacagagtgtcgctcttgttgcccaggctggagtgcaataatggcatatctctgctcactgcagcctccgcctcccaggttcaagcagttatcctgcctcaggctcccgagtagatggaattacaggagcttgccaccacacctggctggtgtttttttttatttttagtagagacggggtttcgccatgttggccaggctggtctcaaactcgtggcctcaggtgatccacccgccttggcctcccaaagggctgggattacaggcgtgagccaccacgcctggccaacaattgagctttgtgtattgatcttgtatcctgcaagccttccaaatgcatttattagttctaatagtttttaattaattccttgggaatttctttgtataagattgtgtcatatggagcggggcacactggctcatgtctgtaatcccagcactttgggagcccgaggcgagcggatcacgaggtcaggagttcaagaccagcctggtcaacgtggtgaaaccccgtctctactaaaaatacaaaaattagctggacatggtggtgcatgcctgtaatcccagctactcaggaggctgaggcaggagaatggcttgaacccaggaggtggagctcacaatgagccgagagcatgccactgcactccagcctgggcaacagagcaagactctgtctcaaaaaaaaaaaaaaaaagaaaagaaaaaacatcatgtcatatgggaatagagacggtttcagttctttctttccaatctgaatgccttttattttattttcttgtctagttgctctgactagaatttgcagtactatggtataaagaagtgactttctttctttttagaggctggactcttgctcaggcctattatcccaacaatttgggaagctgaggcaggaggatcacataagcccaggagtttgagactagccagggcaatatagcaagaccctgtctcttgaaaaaaaatagtaaataaacaa

SEQ ID NO: 1243144 - DNA, 4001 bp, Homo sapiens
ggctcctcccagcagaggcagaggctgcctgagatcgccccgaggttcagggaggcactgcccagctcagggaccaccaccgcaaggtccatagaggcagagccagctcagggaccacctcaaggtccagggagggacagcccagctcagcgaccaccctgaggtccacagaggcacagcccagctcagtggcctcagggaagtctggagatcctgcaaaactccagcctcacttttgactccatcccttctggatgacgacagacatggtctgaagccccgactttccacatgaggaagaacccagagcccaccctgtgtctgaggtgaatgagtggcagggaaccagggagaaacacactttccccaccaggtgagccctggaaacacggacaaaaaggggcctgaagattgaagagggaaggtagcagggttctgtccgagccaggagacggggcctgtgctgctgtggagtttcaaggcctgtcgcttccagacccagggtcagcgctgagctccgccccagccgtcctcctctggaggggacgctgccagggaaacagaagacgtcctcaccttcctatagtcccaggctgctccagagccaagctaccctccggcatcgggtccctggtttccagaggagcccagaccctgtatgtcccacagaatctggacagagccaaaggggctccgccaggccaggaggaaaagttaaccccagcaggcggctgaagcccacgggaggaagaccccctggttggtttgttcccccaaaacccagtttgcagggcgccttgtgtagcctggggctctgctgcggctggtgcgggcattgcaggcggcggctcacttttcagagccgatggagggagccctgggacatggatcgtcctgtgaggtggcagctgggggggccgggcagcggcggggccggggacttggggcctgacgtcccagtcagattctggcctaacttggccttcagcgaacgccccagcggagcggctccccccacccccaccccccgactccctcacccccccacacccccacccccaccccccgactccctcacccccccacacccccacccccaccccggccgggagaccccctccccgcccagtgctgcagccggcctctgccttccttgcgctcccgggccctcggtcgccccggacccgcccaggctgccaactcgccgggcgcctgcagcctggggcctggggaggcgagaaggagccgcagagccggacgggcactggaggggcgtgcgggtgcgagccggcgccttccccaactcggacggaccccgcagcccgcgccccgaggcctctgggggagtcggaccccagcccgcacgtgcgcgcacaaaggccgagcggcgcgcgccccttcctcccctccgcgtccccgccggggcgcgcggccccactcacccgagccgtggcgcactagcaggctcgggcccggggcccgcgggccgcagcgcagcccccgcagcgcggagcgccagaagaggccgcccatgacgcccggcccgcgggccgctgtgagcgcgaggagcgggcgcggagggcggtgccagcccgagacccgcccccgcccgcccgggagccccccgccgccccggagccccccgccgccccggacccccgtggcccggcgctcacgggggaaatgttcaacgccaatttctgttaaaaatcagaagaaaaaacaaaataataatgaatccttctcgaattgcattcgtctttacaccgacgcaaccgttaactatcgttttaacgctttcccacggaggaaggcccactcgggaggctgaggcaggaggatcgcgtgagcccaggagattgaggctgcagtgagctgtgactgcaccgctgcactccagcctgagcaatagagcaagactctgtctcaaaaataaattcacggaccaaaaggaggtctagaagccctggtctgagccccctccaatggagggtgaaattcccacgtgagccccagggcgggagaaggaggcgctccggagacgctgactctgcggccaggacgagtaggcgggactacagacccgcgccaccacaaccagctaatattttaattttttgtagagatggggcctccctatgttgcccatgctggtctcaaactcctgggatcaagaaatcctcctgccttggcttcccaaggtgctgggattacagatgtgagcctggtctgtgaatttgaatggggaaaaatccgacctttattctcaaatggcctctgatgtgactgcattcctctaattcattcaattgcggatataaggaagaagccacattcatagttgcagggcctgtgactttgtcaccaacagaattcacaggtacggtaatatttgggtagatagcacagcatgctactatttgaaatggttaggtctcccactgctagaacttacttaatgagtcttgaaaaagcctgttctttttgctgctattgtgaatggaattgttttcttatttgaattgtccattgcaagtgtataacagacaattgaggtttgtttgttttcagacagagtgtcgctcttgttgcccaggctggagtgcaataatggcatatctctgctcactgcagcctccgcctcccaggttcaagcagttatcctgcctcaggctcccgagtagatggaattacaggagcttgccaccacacctggctggtgtttttttttatttttagtagagacggggtttcgccatgttggccaggctggtctcaaactcgtggcctcaggtgatccacccgccttggcctcccaaagggctgggattacaggcgtgagccaccacgcctggccaacaattgagctttgtgtattgatcttgtatcctgcaagccttccaaatgcatttattagttctaatagtttttaattaattccttgggaatttctttgtataagattgtgtcatatggagcggggcacactggctcatgtctgtaatcccagcactttgggagcccgaggcgagcggatcacgaggtcaggagttcaagaccagcctggtcaacgtggtgaaaccccgtctctactaaaaatacaaaaattagctggacatggtggtgcatgcctgtaatcccagctactcaggaggctgaggcaggagaatggcttgaacccaggaggtggagctcacaatgagccgagagcatgccactgcactccagcctgggcaacagagcaagactctgtctcaaaaaaaaaaaaaaaaagaaaagaaaaaacatcatgtcatatgggaatagagacggtttcagttctttctttccaatctgaatgccttttattttattttcttgtctagttgctctgactagaatttgcagtactatggtataaagaagtgactttctttctttttagaggctggactcttgctcaggcctattatcccaacaatttgggaagctgaggcaggaggatcacataagcccaggagtttgagactagccagggcaatatagcaagaccctgtctcttgaaaaaaaatagtaaataaacaaaaaatatatgagtgaagtgtatagtatgtcaattgtatcccaataaagctattgcaaaaaggaaaaagcagatattactatagcgtactctgttttttttttgagacgaagtctcactctgtcacccaggttggagtgcagtggcgcgatctcggctcactgcaagctccgcctcccgggttcacgccatcctcctgcctcagcctccagctgggactataggcgcctgccaccacgcctggctaatttttttttttttttgtatttttagtagagacggggtttcaccatgttagccaggatggtctcgatctcctgaccttgtgatctgcccgcctcagcctcccaaagtgctgggattacaggcatgagccaccgcgcccggccactatatcgtacattttttaatgttttatttttgtttttttagcaacagg

SEQ ID NO: 1243145 - DNA, 4001 bp, Homo sapiens
tacctgctgatgtggacgctgaagtcaccccttatggttcctggggcagcctcagccgagtcggtgtgtccaatcatggccctcgaggcgcggacgacattgtacccttcccagacctgcagcgagagataatggttggggagaagtggggaacaccaagggcccctgggctcaatccagggcccctccctttgctggggggaaagacacacccacacgccctttacccacaggcccttccaccacccctgccctgccgtaccatggccaccacaggcccagagctcatgtagcggatgagggcagggtagaagggcttcctccgcaggtcctggtagtgctcggcaaggacgctctctggtgcctgggtggcattgaggtaaggaggagccgcagacagtaaacgtgggcactagcacagcagctgtgatgccctgacctcaggcaccttgcagataacaccagcatgggcagcacccccaccgcagaatagatccctcctgccccttcaactgccaaagccaggccctgccccggcgctggctgggatgtgaaaggccgagaaggatcccccaaccccatccccacagggacacccacaagcccagagtcccactacctgcagcatcttcatccccaccagcgtgaagccccgcctctcaaagcgctggatcacgtccccaacgagccgccgttgcacgccatcgggcttcaccgccaccagggtccgctcccgggtccaggagggccctccttcaaaaggcaagaggtcagaggcactgccacctcaccctttcacgtccccacgacccgggtttcccagccagagcccaggggtcaccaggcttcagggtgtctgcctctatgcagggcactctggaagggacagggatggtgcccacagccacaaacacccccatgatagtccctgtcagggacacccaaggcaatgtgtccccagggcttctagcctctcccaggggccatggctcctcccagcagaggcagaggctgcctgagatcgccccgaggttcagggaggcactgcccagctcagggaccaccaccgcaaggtccatagaggcagagccagctcagggaccacctcaaggtccagggagggacagcccagctcagcgaccaccctgaggtccacagaggcacagcccagctcagtggcctcagggaagtctggagatcctgcaaaactccagcctcacttttgactccatcccttctggatgacgacagacatggtctgaagccccgactttccacatgaggaagaacccagagcccaccctgtgtctgaggtgaatgagtggcagggaaccagggagaaacacactttccccaccaggtgagccctggaaacacggacaaaaaggggcctgaagattgaagagggaaggtagcagggttctgtccgagccaggagacggggcctgtgctgctgtggagtttcaaggcctgtcgcttccagacccagggtcagcgctgagctccgccccagccgtcctcctctggaggggacgctgccagggaaacagaagacgtcctcaccttcctatagtcccaggctgctccagagccaagctaccctccggcatcgggtccctggtttccagaggagcccagaccctgtatgtcccacagaatctggacagagccaaaggggctccgccaggccaggaggaaaagttaaccccagcaggcggctgaagcccacgggaggaagaccccctggttggtttgttcccccaaaacccagtttgcagggcgccttgtgtagcctggggctctgctgcggctggtgcgggcattgcaggcggcggctcacttttcagagccgatggagggagccctgggacatggatcgtcctgtgaggtggcagctgggggggccgggcagcggcggggccggggacttggggcctgacgtcccagtcagattctggcctaacttggccttcagcgaacgccccagcggagcggctccccccacccccaccccccgactccctcacccccccacacccccacccccaccccccgactccctcacccccccacacccccacccccaccccggccgggagaccccctccccgcccagtgctgcagccggcctctgccttccttgcgctcccgggccctcggtcgccccggacccgcccaggctgccaactcgccgggcgcctgcagcctggggcctggggaggcgagaaggagccgcagagccggacgggcactggaggggcgtgcgggtgcgagccggcgccttccccaactcggacggaccccgcagcccgcgccccgaggcctctgggggagtcggaccccagcccgcacgtgcgcgcacaaaggccgagcggcgcgcgccccttcctcccctccgcgtccccgccggggcgcgcggccccactcacccgagccgtggcgcactagcaggctcgggcccggggcccgcgggccgcagcgcagcccccgcagcgcggagcgccagaagaggccgcccatgacgcccggcccgcgggccgctgtgagcgcgaggagcgggcgcggagggcggtgccagcccgagacccgcccccgcccgcccgggagccccccgccgccccggagccccccgccgccccggacccccgtggcccggcgctcacgggggaaatgttcaacgccaatttctgttaaaaatcagaagaaaaaacaaaataataatgaatccttctcgaattgcattcgtctttacaccgacgcaaccgttaactatcgttttaacgctttcccacggaggaaggcccactcgggaggctgaggcaggaggatcgcgtgagcccaggagattgaggctgcagtgagctgtgactgcaccgctgcactccagcctgagcaatagagcaagactctgtctcaaaaataaattcacggaccaaaaggaggtctagaagccctggtctgagccccctccaatggagggtgaaattcccacgtgagccccagggcgggagaaggaggcgctccggagacgctgactctgcggccaggacgagtaggcgggactacagacccgcgccaccacaaccagctaatattttaattttttgtagagatggggcctccctatgttgcccatgctggtctcaaactcctgggatcaagaaatcctcctgccttggcttcccaaggtgctgggattacagatgtgagcctggtctgtgaatttgaatggggaaaaatccgacctttattctcaaatggcctctgatgtgactgcattcctctaattcattcaattgcggatataaggaagaagccacattcatagttgcagggcctgtgactttgtcaccaacagaattcacaggtacggtaatatttgggtagatagcacagcatgctactatttgaaatggttaggtctcccactgctagaacttacttaatgagtcttgaaaaagcctgttctttttgctgctattgtgaatggaattgttttcttatttgaattgtccattgcaagtgtataacagacaattgaggtttgtttgttttcagacagagtgtcgctcttgttgcccaggctggagtgcaataatggcatatctctgctcactgcagcctccgcctcccaggttcaagcagttatcctgcctcaggctcccgagtagatggaattacaggagcttgccaccacacctggctggtgtttttttttatttttagtagagacggggtttcgccatgttggccaggctggtctcaaactcgtggcctcaggtgatccacccgccttggcctcccaaagggctgggattacaggcgtgagccaccacgcctggccaacaattgagctttgtgtattgatcttgtatcctgcaagccttccaaatgcatttattagttctaatagtttttaattaattccttgggaatttctttgtataagattgtgtcatatggagcggggcacactggctcatgtctgtaatcccagcact

SEQ ID NO: 1243146 - DNA, 4001 bp, Homo sapiens
aaagtagattggagctttctaggggttggctgggaggagtaagaatggggagtaactgttcacgggttcatggagttcttttttttttttttttttttgagatcaggtctcactctgttgcccaggctggagtgcagtggcacaatcaggtcactgcagccttgacctgctggactcaggtgatcctcccacctcaacctcctaggtagctataggtgcatgacaccacgccccactaatttttgtatttttttgtagagacgagattttgccctgttgttcaggctggtctcaaacacctcagctcaagcgatctgcccatttggtccaactaaagtgctgggattacagggttgagccactgcacctgggccagagtttctttttggagtgatggaaattttctaaaattgattgtggtgatggttgtacaattctatgaatacactagaaaccagtgagttgcacactttaaacaggtagattgtatagtacgtgaattatatctcaataaagctgttagagatattaaatatgtataaataagaaaaaataggaatgaaataatatgctatcatttgaaaaaatgataacatgttatctactctggcaggatattcaagaaacttggtaacagcaatagatgaggtggaagaggaggctaggaagaagatttaattttggtatcatgttcaagtactcctattcaaataagttaagtaactcatttttttttaatttggaaagcaggtctggcgtggtggttcatgcctgtaatacctgcactttgggaggccgaggcgggtcatcacctgaggtcaggagtttgagaccagcctgaccaatatgatgaaaccccgtctctactaaaaatacaaaaattagccgggcgtggtggcatgcccttgtaatcccagctactcgggaggctgagacaggagaatcgcttcaacccgggaggcaaaggttgcaatgagccgagatcgtgccatcgcactgcagcctgggtgacagagcaaaactccgtccaaaaaaaaaaaaattggaaagcaatttgggcctcgttcctgcgaccacagccccaacctgggtcgggggtcccagtgaccttacccctccctgcagaccccaggacgggcggtcttcagggctaggcgccctggctctgcaagggccccagtctggggtttggctcacctgtgcctccgaaaaccaccaccagtttcttgtccaccatgaggacgagaatgggacgaatccggtccagagatctgggggtaatgggaggcgtggagttgggggtggggccggggttcccgccaggagcgacaaaggacacccccattgtctatgcatcgagtatgtgtcgaagggggcggctgggcccggagcggcaagacgcctgtcccgagatatcggggtcccgcgacccacctcgtgtcccttgggcccgatcccctcctccttcccgcctcccccggttccagtcacccgccccccggcccgggtcccaccggctggagtgacctcctcgccgcggcctgggcgggacaagttccaggagcccgggaccccgattctgcggccgagtccactgcagaggcggggatggagctgcgcgctaggcgccaactccctccccgcagctccggccccacctggcagagcgccgctcacggaagcccagcgtcggaggacccctggctgcagccgccaatcccgacgtgtcggccgaaacccctcctccggcgcagttggctcctcctggatcccgcgggactcggcgtcgtttccgggtttgcccgccccaggcacgtgcacagtgagtttgtgtaaatccagttagaccaaaatgagcgaggtggagagcctcttaaccggatgctacgggtgatgactgggaggaggagaaaaattacctctttatcttgcatgaacatcttaattttcaggtattgggcgtcaggcaaagataattaaagctatgtccatgagtcttatcccttgaggccttgtccgcttgatattttctttgcctaactcacttttaaaattttattatttttatttttttgagacagtgtcttggtccgtcgcccaggctggtgtgcagtggcgcgatctcggcttactgcaacctccgccccccgggttcaagagattctcctgcctcagcctcccgagtagctgggattacaagcatgtgccaccaagcccggctaatttttgtattttttagtagagacggggtttcaccaggttgaccaggcaggtctcgaactcctgacttaaagtgatccacccacctcagcctcccaaagtgctgggagtacaggtgggagccaccgtgcccagccctaactcacttctgaagttgctgctacttgcactgatttcagtttttttttgtttttgttttttgttttcaaggtggagtcttgctctgtggcccaggctggagtgcagtggtggtgcgatcttggctcactgcaacttccgcctcttgggttcaagtgattctcctgcctcagtttcctgagtagctgggattacaggcaggagccaccatgcccggctaaaatttttttgtatttttggtagagacggggtttcaacatgctggccaggctggtctcgaactgctgacctcaagtgatcttcccgcctcaggctcccaaagtgctgggattacagacatgagccaccacacccggcccacgatttcagtaatttctttgtgttcagtaaaactaaaaaatgactctgggctgggtgcggtggcctgtaattgcagtgatttgggaggccgaggcgggtggatcacctgagctcaggagttcgagaccagcctggccaacatggtgaaacccccgtctctactaaaaatacaaaaattagccgggcgtggtggcaggcgcttgtaatcccagctattcgggaggttaaggcaggagaatcgcttgaacccgggagaagggggttgcagtgagccgagatcacgtcattgcactccagcctgggcgacgagcaaaactcggtctcaaaaaaagaaaaatcattctgtcattctggccgctgtttgaagaatgcgaataatgcaacagggagatcagatacaagactggtaaccgaggtgtcagagttgagactcagtttcgcagattgcattggcaagtgaccaagtgggtggtgccacggttgacaaccctatttcttacatcactgagtggatgtacaaggattaaaccacactggggaagaaaagtgctcaaccctgaggcaccctcacacacctcggctcttgtgaacactagtgttcctgccgaagcacgcctacttaccccgctgagcagagcctgagcctgcaacctccagagacctggggaaagccacatactccgcttcccgcccccggcaagggcgtgtcagctacaaggggcgtgtcatctctaggccccgccccgcgctgcgtgcccacgttgcgccggcctcgcgccagtccgctgggctgcagggactgcggcgcctgagggagtcgctgacgggcacgctgactggaggctggcggacaggcgacagcgacctgcggcaggtgagctgtccgcgccctcccggggccttccttccgcccggcttctcggaccgcgctgcgtccttcgcgggccctgcctcggtccaggccttcggacctgggcttggccgggccacagccctttgggtcccctgcgccggtctgaggggagacccggccgggggcggccggaagctgggtgaggccgggcagaaggacgaagaagggcgtggaggggctgtcaggggagggcgaaaccgcggacgccgctctccagaagtcgtctccccgggggcgcggggaggcctgaatggctctctttggcgtccccgttgggcccaccctctcccagcgtcacggctatgctgggcgaggtgacccccggggtcgtagctgggggcgtcggcggtgcagacaggggatgccggca

SEQ ID NO: 1243147 - DNA, 4001 bp, Homo sapiens
cacctcactacaggaggctgaggtgggtagatcacttgaggtcaggagttccagaccagcctggccaacatggtgaaaccccttgtctcctaaaaatacaaaagttagccaggtgtggtggcgtgtgcctgtagtcccagctactggggaggctgaggcagaagaattgctggaacccaggaggtggaggctgcagtgagccaagatcgtgccactgcactccaggctaggcaacacagccagactccatctcaaaaaaaaaaaagtttcagatttaggagcattctggatttcagattcagtatgctcaacttgtaattgtagtagtctatgaggaaacaaaaagcatgtgcttaatgcataatacatgtcagactgctgttattctccagagtcatccataataaacacttaaaatttcctgaaattaacagaaagatgtctcctgctaccctggtacaaggaacactaggtatattgctcttatttcctaaaaaacagacattagcagcaacgaaaatttactgtgcacttactgtgtactaggcactgcattaaaagctttatgtgttaatgcatttcatcctttgccattcttcaaaagtactattagtatttcctcggaaagatttagtaagttggcaaagatcacagagctactaagttggtggagaaaatcgtagaaatcacaaacagaggaggtaacatcatctccactatcagcctctaacctctaaaacacttccaaccactgaggggcctttcctgggtatcaccttgattcccaacaagagaacaacgctgactcctaagccaagagacaattctttaattttctttatttcttattttttttgagacagagtctcgctctgtcgcccaggctggagtgcagtggtacgatctcggctcactgcaacctccacctccaggttcaagcaattctcctgcctcagcctcccaagtagctgggattacaggagcacaccaccacgcccagctaattttgtatttttagtagaggcagggtttcaccatgttggtcaggctggtctcaaactcctgacctcaggtgatgcgcccgcctcggtctcccagtgctgggattacaggccgtaagccaccgcgcccagcttaattttctttcacatttaatacaatgcaaagcattccctttttaaagctctgccaggtgcagatctttgtatccagtcatcagcccaatctactgaaaagaaatggacgagagtaatagcaagagatccaaactcttattttaaatccaaataaatttattgcttgtctgcaaagtgcttgacactgagctgactgccatattcctcagttcatgctcacagcaaccttggagacagatacaattattattcccattttgcggatgaggtaaacgaggcccaaatttgaatgctatgcccgagagcatacagctagttactggaggactccagacccaggaagcctctctcctaccacaatctcctagaaagtgctggctctaaatctactgctctgataaggcagctagaccccaactcgcacccaactgggtgccatctgcgccctggaccccagcttcccgtcaacgctagggcagaggcactcacccagccgcacgtattccggtaagggctccttgaaccgcagctcgtagggcaggacagcgagccgcctgcgtgtggccttgtcccgaatctcagtgaccacctcccggatggtgtaaatgttcttcccgatgtcctgcggacagaacgccccagctcagacccacccgcaccaagcaacgctccgcgcgactccacgcactccgggaggggcggccagcccagatctctctcgtcccggagggagctccccgtacctgcagagccgcatgccgcaggaaagccccagcatccgccacaacgtgctccactggagccatgttggctgcgtgagaggggagcgcgcatgcgcacggagcttgcgccggctcctatgtccaagtctgggcctctgggaaccaggaagagcagccgcgacttagctgcgcctcctggcggccgcgccagcacctccctgctctactcgcgcgcatgcgcagcgacgccgcccgcatagccagagaagtgtgggcggggtcaaaccttgggggacacctgggaaatcggcttcagcatctagaccttagtgccttcttcacctttgaagataaaacctgccaggtgtagtggtgcgcgcctagagtcccagctattaaggaggctgaggcgaaaggattgcctgagccctggaatgtgaaaccagcctgggcaacatagagagacccccatctcttcaataaataaataaatttaaaacctgtatatattcttatggttaaaagtcaatcaatacagattacctaatttcgttatcacagcacccctatgagataggtactgtttttttttaaaggcttaaaatgtattttaataggtcgatgctgcattactgctccagttctcagaaaaactccaaatatatcagagacaaatcaaatacaatacaccaatggaaaaaaaaggcacagcatgactacctaagataggcgagtctaagagctactgtcagaccttcagtatacagtaaccctgttcccaagattgtactaggcctatcaagaaaagctgtgaacagcagtatcatagacacaaaagggtcattcctgggtgtcctcacccaagaaaaagatggaggcaagttaacacaagatttttttttaaagatatactaaaatgaaaatctctaagagaaaatgtcttctttaggacatgaaggggtaatatatgggatataatagaaccgtatgtacgttgcctgtgacctttgtggacgtttacctgaattctcacctgggagtgaatggagcaatgcggctaaggtcattgggggatgtttggtttttgtggtgtatgtggcagtttctctgggactgggggagtgtaaggataagaaagcaagtgaggttgggcacggtggctcacccctgtaatcccagcattttgggaggctgaggcaggggatcacgaggtcaggagttcaagatcagcctggacaagcttgaacccgagaggcagagattgcagtgagccgagatcgtgccactacactccagcctgggcgacagagtaagactccatctcgggggcagggcaagcaaatgaaacaagatggacaaaaaaaaaaaaaaaaaaaaacaacaaacaaaccaaaaaaacagaatgatcaagattaatgggctctaactggatctactttgccatggtttccccaggccctcaacaatcacatttgagacttcaggaatgcaccacacagaactgattaaataatatactacatagaattgacttgtttaataccacccctcccttgtcctctgcctccagcatactccctagagtagtacaggcagggtagatctaactattggaaggaatccctaacacttttccagggtagaattctggctggtccaaaaagggtccttcttttaagggttttgagaaactagacactgcaacttattagtatcggcgacgtttgtttggagcaaattcagctccaggagctgcatggttgaatgcaggaggagtttcaccaattgccccaattccttccattgtagcagcctgaccaaagcgttcagttgttggtggggtcaatcccaaagttccatccggcatcatagtggcaggtcctggaggagctggggtaccagctggcacaggagcaggggtcaaggcacctctgctgtttatgcccatagcacctcccatagccatctgacccatccaaatctcctgctctctcacatcagggaaggttcccttgaatccttcctgctgtggctgcatcatttcttcttgctgccgccgcatctcttcttcagggcgcctgcgctcttcctcctgcctgagctccagttgctttcgtttttgcacctcttggttgtgcagctc

SEQ ID NO: 1243148 - DNA, 4001 bp, Homo sapiens
aaaatgttccccaacccagcccattttaacactgcagtgtcattctaattcaatcattcattcagtaactcacttatttcatcaacaaatgtttatggagtacctaccgtgtgcaaagctctatgaacacaacaaactttaagcaaatatgtatgaagcacctaatagattctggctgaataaatgaatgatggatgaataagtcaatgaccagtgctggccaattggtccagcactggccccctcattaactactgtgagcttattcaaactactttccttggtctcaacttcccgatttataaagtggaatgttaatgattgttccatctgcctctcaggagccctaagaatcactatttggaagaaaacaaaagagtttcaaaaatactcagtggtcatttctctgaccttctggtctctgctgagttactacattctcaggggctgttatataccaactctgaacatctatgatctaatgcaatttcatgtcagaaatcctacataaacatttaagctatattagtttataatatgctatgttaattataaaataaattcaatatactgcagtgttatggtctgttgtgctgttaatttaaaacagacagaaataaaagtgtacaagtacagagtatcactcataacagaaataataaatagcagccagtggtaatagacactatcctaagcattactcaaattaactcactgaatcctcccaagagccttataggataggcaccatttgactattaacattgttttgtagatgaggaaactgaaacaagggagactgaggctggagaggctccatagggaagcctgagatcacacagggttgaccttgagcctgcaccattctggctccagaatctgagttcctggccaccacacacttcctctcggcagaagtgttctgttggccaggcaaagtggctcatgcctgcaatcccaacagtttgggaggccaaggcgggaggattgcttaaagccaggagctggagaccagcctgggcaacatagcaacaccccatctctaaaagaaaaaaaaaaaattagctgttcatggtggtacagcagccgtagtcccagctactctaaggccagaagatcacttgagcgcaggaattcaaggctacagtgagctatgattgtgccactgcattctagccagggtaacagagtgagaaaaagaaaagaaaagaagaaagaaagagttgtacgtttcctgccaagagtcaagagcaaattttacctgcctggctacctttttaggggaaatcccatggaccaagttaccccacaggctgacttcatgaggacaaatcagtcttggtgactaagcacccctttcctgagaactctgtgatgcacaccaggagtgcctcaccctctgggacggtgtgaagatcggcaacctgatttcatcacattcatactggctgacgaaaccccgctcccatgccaggtccagcatgttctccacatggctgtggagcctcctgacaatggctggccggtgactctgcaggtctcgggctgggtggagcgagtgggggtcccagcagccatgcagcttgggggactggctgtcggcctgggcttcttgggcagccgcgatgagcttctgacaggcccaagtacccttattccagacggtgtccagaaggcgcctggccaagtgggagagaggctggcccaggaggtggaagccctcgtagtcctcccaggagaggacctcccaggacagcagccagtccaggacactctcgaagccttccagggaccctgagaccagcagctcgaccagctggctcctctgtgcctgaaaagcctcctgcgagcacatttcacaacctggggaggagaacaaggtcagtgcgggacttctccagaagccagatgcagggtggtcagggaaggccagggcaagtcagccccagcagaacccgagttggccatggttctagcctcagacattacccaatccaagctccccaccatatagatgtgaaaattgagacccagagaaggcaagaaacacctcaaggttccacagagtttgaagcaaccaagaattaaatcaagacccctaactcccatatccatgcttggtctccggcttaaaacgtttaaaaaggcttgaggtaatattaggagcaagagatctcccaaggtcacttgagatcaggagcgctagaccagcccggccaacacggtgaaacgctgtctctactaaaaatacaaaaattagccaggcgtggtggcgagcgcctgtaatcccagctactcaggaggctgagacaggagaatcacttgaacccgggaggcagaggttgcagtgagccaagatggcaccattgcgctccagcctgggcaagagagcaagaccgtttctcaaaaaaaaaaaaaaaagacagagagagagagagagatcttccaaacaatcagggaattcattctcttcgaagcagggtgagaggggctctttcatgctggctggattcaggctacagcagtttcagtaacggctaatattaattaagcataaactacacaccaagtgccattctaagtgctctcctgcaggaattcactgaaccctcccagccactctgaagtagtgcctatgatctacccattctacagaggaagacactgaggcaccaagaagctaagtgatttgtacgatgtgtcacagctagacaggcagagtcaggatttcaacacgagccatgtatgactccggaatgcatgtctctaactcttacatttgggttccccacgggggccccaagcccgtgctgtgtgttttgcacactgctactccaaggggtagactcagaatattgctctaaaggtcctgtcctaggcgaagtgaaaaattacggtgcaaactaagttgtttccgagcgttctggtgccttgtcccccatcaacacttcccacacacacttgccctagggccctcacctccctcccacgccctcgaaaccaccgtgcacagactgctgccactgctatcatcagtgacctgctgtgcgttctgggaatttgagggcaagtgaccctccaggagcttcaagccctggcagggtccctgagcagccaagaaaatctctcagcatggtcagttctgcgattgtcatggggtctgtggacaagggctgctgcagtgccccgaagaaacgaaagtgaaagggtgtaggcatggacaacaaagagggccgtcagcttctttttataaatcagggacattcccagacactcaagggagcagatgccaagtggcctggggattttacctctttcctgatggttgtttatgtgtctctctccctgcctgggccacgtgggagcctgggtcttactcgtcctggcatccctgagcctggcacagcattgtcccccacaaagacactgagggaatgttcatgaatcaaatatcccctgggctgggggtggggggaacactctgtatccgtcctcatacggtagccaaggtaagcaaaaggagaaagctccaatctctcagaacgctgctggggcacagggggccctgtgctggtcagatggggaaactgaggcaatgaggttacttgtgtgtctggctgcttgggagagagggtgtacccccctgcagaggccactggaagccaggatctaaggtagttctctcaggccaaggagttctcctccttgtgcccacatctaagcagaggagccaagagggtggggtggccgaggacaggggaagagaggacaaaaaagggtagaataagctctgggcttggccctggagtggttctcagctgtggaaacaccagccaaggatgcgacagcggcccccaccattgaccctgcccaggtcctggggaaaaaaacccgccgacccattctccccagaaaacagcccagaaacagagtcagcactccccatctgaccccaggcctgggagcatgtcgcggccaaggatgaaagaaggctgaggatc

SEQ ID NO: 1243149 - DNA, 4001 bp, Homo sapiens
cccggccaacacggtgaaacgctgtctctactaaaaatacaaaaattagccaggcgtggtggcgagcgcctgtaatcccagctactcaggaggctgagacaggagaatcacttgaacccgggaggcagaggttgcagtgagccaagatggcaccattgcgctccagcctgggcaagagagcaagaccgtttctcaaaaaaaaaaaaaaaagacagagagagagagagagatcttccaaacaatcagggaattcattctcttcgaagcagggtgagaggggctctttcatgctggctggattcaggctacagcagtttcagtaacggctaatattaattaagcataaactacacaccaagtgccattctaagtgctctcctgcaggaattcactgaaccctcccagccactctgaagtagtgcctatgatctacccattctacagaggaagacactgaggcaccaagaagctaagtgatttgtacgatgtgtcacagctagacaggcagagtcaggatttcaacacgagccatgtatgactccggaatgcatgtctctaactcttacatttgggttccccacgggggccccaagcccgtgctgtgtgttttgcacactgctactccaaggggtagactcagaatattgctctaaaggtcctgtcctaggcgaagtgaaaaattacggtgcaaactaagttgtttccgagcgttctggtgccttgtcccccatcaacacttcccacacacacttgccctagggccctcacctccctcccacgccctcgaaaccaccgtgcacagactgctgccactgctatcatcagtgacctgctgtgcgttctgggaatttgagggcaagtgaccctccaggagcttcaagccctggcagggtccctgagcagccaagaaaatctctcagcatggtcagttctgcgattgtcatggggtctgtggacaagggctgctgcagtgccccgaagaaacgaaagtgaaagggtgtaggcatggacaacaaagagggccgtcagcttctttttataaatcagggacattcccagacactcaagggagcagatgccaagtggcctggggattttacctctttcctgatggttgtttatgtgtctctctccctgcctgggccacgtgggagcctgggtcttactcgtcctggcatccctgagcctggcacagcattgtcccccacaaagacactgagggaatgttcatgaatcaaatatcccctgggctgggggtggggggaacactctgtatccgtcctcatacggtagccaaggtaagcaaaaggagaaagctccaatctctcagaacgctgctggggcacagggggccctgtgctggtcagatggggaaactgaggcaatgaggttacttgtgtgtctggctgcttgggagagagggtgtacccccctgcagaggccactggaagccaggatctaaggtagttctctcaggccaaggagttctcctccttgtgcccacatctaagcagaggagccaagagggtggggtggccgaggacaggggaagagaggacaaaaaagggtagaataagctctgggcttggccctggagtggttctcagctgtggaaacaccagccaaggatgcgacagcggcccccaccattgaccctgcccaggtcctggggaaaaaaacccgccgacccattctccccagaaaacagcccagaaacagagtcagcactccccatctgaccccaggcctgggagcatgtcgcggccaaggatgaaagaaggctgaggatcaagctgggacgggacaatgcctgctcctcttacccggagaatgtccgaggaggacacttgctctttcctcctcatcgtgagaggctgaaccaccctcttcccccatcaaagcccattaggctgggggagcaggcatggcatctgcgggtaggccttgtgcagaacgccaaaagcccagtggcacaggactggtgagcctggatctgtctaccaaccccaccttcaagggaaattcccaaaggaaaagccggaggccagagttggccaaccagccttccagaactaggcaattccaagcaattctggcacaaagccttgtgcatcctggagaccatgaccctcactgaaaaaccccactggggacatgagacacattcacgaggggacaggccacaagtaagtaggggcccctcccttgcacaccaagcctagggcagcctggcctacgtgtgagccatacacaccccagctagtgacgttgggcttctgtggacaccaggaaggggaggcccgcccaagccacgtgactcggagctctgtcctcccagcagctacatcaccacacctctgccctggccttcttccagaaacctcagagcagagagaatcctgagggccaattcagccaggccctgtctctgagcaggcattgtcctgtctcatcttaaacatctggggaggagaacctggccttagtgctgttctcactaaccagctcaggaagctcaccagcttgggaagttaatcattatgtctagcttcagtttctcctgcttcagtttaaattgggaaagagagagaaaaaatattcactcattatctgtttcctaaaattgtccttaacatccttcctcttactcctttattacctggtcgggcttcccctcttcaggcgaaatctgtcagtctatctgcattgccttttgatctctacttcagttactacaacttcaaagacaccattgtcctccccaaggtgaggcccatgtagagaaaggatcacttccttgctgaaagagagggtcaaggggcgacccacgtgggccctccctgaaacccaggcccaggcctgagcctggacacctccttccttcctgagaccacagccagcccggtttctctggggccaagagcaaatgctttgcttaagtgctgaaatctcagcccactgaccccttgcagacaggagaggaggggaagcccagggaagctcaacttcccaagtgtcctgagtctctgctggggccaagccccccaccctcccccagctatcctgcattctccctccctaacactgttctctccctaagagatcaaatccccccaccagtgcacaatgcactctaattctccattgtaaaagtaaagcactctcttgacactccccttcttcatttggctccaatcccatttatctgctccctttacagcaggcccccttgtctgttgcctgtactgctgtccccaagtcctcccatcccctcccattccctctagttccccatccagctccagtgaaactgtcaccagtgacctcccattgctcaatcctcagccctcagcctgcttgctctgccaggggcattggtcatatttgttccctccttcctctttggggcattttcttcatttcctccaggacaccccaactctctgattttcactctttctgtcttcttggctggttcctaacactgggggccccagcactcaatggttagaccccttctcttctccatatcactccatccctagatgagcccacctgctcttgtggctttaaataccagttatatggtgatgatgcccaaagttttattttcaactccaacctccgcccttaacttttcccaactgcttactcatcattgatgcctaatgggcagctcaaactccacaagcacaaaaccaaactcttgatctctccgctaagcaactcccatttcagttcatggcagcttcaaacctccagaagctcgagccaaacactcagaatcatctttgactctacctttctcttgcaccccaaaccctatcgacacggcctttgaaatatatcccaaatctgaatgtctggttttcttttttttaaccacctctgggccatgggcaagacaccatggtctctcccgagaatgacagcaatgatccgctcaacgggctctccttctgcccttaccccaccccccccatgatccattctccacccca

SEQ ID NO: 1243150 - DNA, 4001 bp, Homo sapiens
accaggtgaggtgcagaggtggttgctgcttccagtttcccttcagacttagctgtgtgaaccccactcctatcctttggccttagttttcccatctgtaaaactcagaaacgcagttggaaagtccttattcatttagtaagcgaatatattataatatgtatagagcgccttttgtgtaagtcactggtcagaatcctcactgagctcccagtccagagagaagccagacaattaaaacagtaatgacaatgatgtgtgtggcctttgtctactcaaggtccctttctgctcccctcttctagtctcacttcccaaggctgtgagctctaagccctccctatgtggagagaagtcaccctccccttgctccatgttcagctcaggaacttgcgtggggttgagctggtacctacatatgctgccaagtggctcaccaggggaaatgggttgtgtatgcgggcaggagggtcaggtccttgtcccactagggggctaggtttgggatctccagggtgcagcctggactcctaagggcagattagggctgaggactggatgatgctcgtggtgggcttgggcctgcccaggtccctgggactcagaggtacccaccctaagttcctgggcaaacagccagaatcgtggagagagcccaggtcccgtccgaccctccggagtttattcacttccagcggtactgggctggaccgagccttggtggcatccgattcagctccagcagcatcccaggtcctatccagcatgggcggggcaccgcctgtcagagctctggccttcaggaatctagagatgacgggaacagtggtcaaagaggtggggtccggcatccgcttcccaggccatgccctcccgccaagccggctcagggtttgggcggactcacaccttcggactcgtccctttcctcgaagtcgggctcgggctctgggtccggttctggctccagttccggctctggttctgcttcagcctcgggttccagctctggctctggctccggctccggttcagcctctttagaggcctcagcttccagctctggctctggctcctccggggtcccggattgcaccgcctcggagccctcagggcccccggcctcgtcagggtctgaagctctgggcaacccggggcatgtggtccccgagccgggtgcctccggcgtccagtggcctgggcatggagggtcatagctgcggtcccggtagcctggggcggaagtgggagtgactgaggctcaatttacccctgtgcggtttcacactcgcctacttctagcggagacgacaaccctgccctccccgggccttttgtctgccccagccccgtccctgctctgccctaggccccgccccgcgcgctcacccggacccacgtgctgccagtcccaagcggggtccggcgcgcccgcggtacgctgggcacagcgtagcagctcctggcaggcggcctcgcccttgccctgcaccagcagcagtaggcggcgcaccctgcgctcggcatcaggcagtgcatccaatgcctcgtactctggcccggtgagcacgccccgcgccagcagcgcgtccaacagcagtcccgagtccgcctgcagcgtctcgaccaggcgtttccgctcgcggtcgatagtctctgacggccgctcctgcgcgttgcccattgtcggggctgcatggggaaaggggagagaagtaatggggggttgccctccccgctgccctcgccgcctctgaccactccctcaatgcccccagtgaacacccaggctggggtttaagttcacctcgatcccagccgccggacggctccgcaagcacaggacctggaggccaacacggggaactcggtgtcctcctgcctctccagacgctctgtcctgtctcctcctcaggctcctccttctgtccccaagcgtcagccgtggctctcctctcctcccctgcctttcccaggactggcatctactctctgaatgccctccccaaccaggacgtcctgagctccacccccggcaaatccgaggcgagttcagaccccgtttatccaaactaaggtctttctctcaaatctgcttccccacctaaccaggcagaaaaacctaggattgatgctgatactccacacccagcttgcagacaagtcctttccagtctgactgctgaatatttctctcaccatcctcaccacttactaagtccagccttctgcctcctgctttggccctgcagaacccaggatcagagctccctgcttccatactctatcctccagtcccctctgaacccagagcacaaagtgctgagagcctccctgcccctctccccttaccttgaccctgatatccaactttccaggacaagccccgcctctacaccctcccaccaacaccaccaccatagtgcaaccccaatgtagtctcctggcccttcctggtcccctgattcctgagcagagataccagaatcttcttcaggcctagctctgaccaagatctcttgacatcacctgagacccacctgtctccctactgaagccctaactcctaatgtgactgtctctctgctgacccacctggctccctgctgacctgggaattacctacagacatttgttgtttgatcttgaagtacccaaggcctagctcatacaggataccgacaaatacttgccgaacttggactgattttcctccatggatcgcactattttgagagacttttttttttttttttttgagatggagtctcgctgttgcccaagctggagtgcagtggcgcaatcttggctcactgcaacctccgcctcccaggctcaagtgattctcgtgcccagcctttttttttttttttttttttagaggtggggtcttgctatatatattttttgtatttatttattttagtggagacggggtttcactatgttggccaggctggtcttgaactcctgacctcgtgatccacctgccttggcctcccaaagtgctgggattacaggcgtgagccaccgcgcctgtcctggtcttgctatattgatcaggctggtctcgaactgctggcctcaagcaatcctcccatctcagccttccaaagtgctgggattaccagcactttgtgaaccaccatgtgaaccaccatgcctggctcttgagagactatctctaccaacagcggctattagggagagtcaatctgctttatccattttttttttttttttttgacagagtctcactctgttgcccaggctggagtgcagtggcacattctctcatcactgcaacctctgcctcctgagttcaagcgattcttctgcctcagcctcccgagtagctgagattacaggtgcccgcaccacgctcagctaattttttgtgtttttagttgagacggggtttcactatgttggctaggctggtctcgaactcctgacctcgtgatccacccaccttggcctcccaaagtgttgggattacaggcatgagccaccgcacccagctgctttgtccatttattgtcaaccaaggattatggcccattcctgtgagtggcctgacccagccagcaagacccccggcattaggaggcaaagacatcaggccttgaaccatgccctcagcccacccccaccctgataataacttcttctcctccccgccttggctttgttcacacggcatcctcccatctcttcttccctttgctgtccctcctctgcctccttctctggctctaggaggctcggccttctctgggagagaggatttagtcctagccgccatcctgcctcccaggtctttctcagtaccctctggtgtcacactatacctcccccgtcacttcacaccctggcttcctcccattgaagcccttccccaccaggccgagaccaggactaccccctgcccctccatctccctttatgtcccgtatgtgatgaatcttgcttctccacttctcagtgagtctccatcagct

SEQ ID NO: 1243151 - DNA, 4001 bp, Homo sapiens
ctgagattacaggtgcccgcaccacgctcagctaattttttgtgtttttagttgagacggggtttcactatgttggctaggctggtctcgaactcctgacctcgtgatccacccaccttggcctcccaaagtgttgggattacaggcatgagccaccgcacccagctgctttgtccatttattgtcaaccaaggattatggcccattcctgtgagtggcctgacccagccagcaagacccccggcattaggaggcaaagacatcaggccttgaaccatgccctcagcccacccccaccctgataataacttcttctcctccccgccttggctttgttcacacggcatcctcccatctcttcttccctttgctgtccctcctctgcctccttctctggctctaggaggctcggccttctctgggagagaggatttagtcctagccgccatcctgcctcccaggtctttctcagtaccctctggtgtcacactatacctcccccgtcacttcacaccctggcttcctcccattgaagcccttccccaccaggccgagaccaggactaccccctgcccctccatctccctttatgtcccgtatgtgatgaatcttgcttctccacttctcagtgagtctccatcagctcctgccttgccaccccaccatcgtcacctcatgtcctgtaacagtccctctgagcccctctcactcccattctgccaggcccgatagcacagtgactttgacaaccctctgggctaggattgctgttcccattttacagatgaggagacaggctcagagattcagtggtaaaactggaatcttacttgctccagcctgaactatgaggaactgaactatattttcctgtctagcagaattccatcctaaatacctatctacctcccccccacaccccactgcccatcagagacaacccaaaatatctggtctggctactctagcctcctcccaccaccctggacagccaggcccttcccagcttccctccaccagccagggatcggagaactcactatgcctctggcacctcggagcctttgctgatgctgatcgctaagactggaatccttttctcctccctccgctccgtggacctatccatcgtccaggactcaaatgttcccttgtctacaccaatgcctaagtgtcccaagggctggtggttccttcttctgtgtaccgtgaacaacacatgccctcactagtgcattaactgacatcattgcactgtgtacacgcagactctccgctttcttcaactgagttttccagagtgtccctccaatcggtgggcaaaggaagggagagggggacagcacctactcgggacagacacagggagggtgcagattggattggcccctccttctctccaacctaagttgttttcatgttagccgcctcctcctatgaccccaagtcctgccctttatcctgtctgggggtagagactccagctggtctgggccctccctttgaggctcacacagctctcaataccgaagttatttagcggccagtccttcgagggtgacaggtccgattcttcccagagagccaggtggcggggcacggagctgggtcccagcccccaaccccacctcgctgcgcgggctctttggccaggaagccagggtcttgggacagtgaagagcctttgcgcatgtgcgactgcacggattttccccccccgccccttacctccctccacccagtcccagagcttgagagtcctgcggcagggcggggcccacagtcctacccaccccgcccccccgacccccgagcgccgcagcgggtggtggggcgctgattctgcccaatctcggtttcccttccctcccacagccgggagtggggctcccggtctggcccgttttgggcgtccccactcacgggtcaagcctcggcggggcaggagatgacggtgcagaaagggccgggcagggtgggggtgggtgcagcagctgcggcgggggcggggcggccagggctgctgggaatagggagggtgagggttcttccccgggcactaggagccacaccgcggaggccgcgcgctggctggggacgtgcatgtagtcagctttccctccccacccggggcgcaccaggagatgaggccaggagggggcagttcggcccgcggccccacacgtccagcgcccactcagggcctgccaatttccaggtgctttccatctatcttgtcatcgacccctcttctctgcctgtcacagaggaagttcagagaaggataccaactcaccaggatcacagaacgcatgcattgcagagctgagcgcgacccagaagcccccgcttcccagagattgcagcggccccgcgccagccctggacccgggcctaagcaagggagctaggcaccggatccccaagcacctccaccctcctggggttcctctattaaaaacctagtatctggacgcttctacaaatgcaaaatcaccccccacccataactcctgtgctccctggtcgatagagaaaagagaccagaaacagaaaaaaaaaaaacggagtttatgtgcagggatagtcggggtagtggagagaggccatttagtagtgggggcttcgctcacccccgatagggggcgccaggaagccaagaaggatgtgcagcggcggactggttccaagccccttcagaggcgcggggtcttagggggagggactggcttccgggcccaagtaggaggcagtccggctctcaggagtgctataaatggttaaagccccaggcaggcccagggctgggcctcccaaggccgcctggacatccagcaggagtggggccccgagcgtggggtccttccctaggagaagtgggactgcgctcaccaggggaaatgttccccctcctttcttcagggaaggagagccctgcccgcctgccttctgctcagttaggataaaacatccattcttaacctccccactctcgcccaatggtgagggcatgggtggctcaaggaacgctctgcagtgcagcctgaactcaggatttccctgcaaattgcagattgccccctcactcaatcaaggtagctcagcccaatcacggcgtcctcccaggtaggagtcatcacaaccattacctgggcttggagaatttaaccccttgaccgccagctcaggctcaccccgctctggaaccaagggctgcatctgcgtgagaaccgcagggagcagctggggaggggacctagcagctgagggggacagctgggaaatcactgtgacaattcttctagagacacggctttggctcacagagaacagctatggaccagagggcttgactcagccacccctggcctctgccctccccgacccacttcttaccaaggacagctccatgtccaagtccatcagggtccattctcgcccttggagactggggcccagcacctgaggagagctctgggtcagtggtgccctccccaggctccacagagagctagaccccaccaggtctcatgcccctgtttcagcagaaggggtactcacatctagaggccctgcaggttccacactttcttgagggggctgaagcagcatcggaggcagcagactctctgggctcctgtccccgctttccaggcccagaggccccctgtgcagacagaactgcttttggcctgcagtgtccaccccgcattaagttcccaaggaacccagatgcatcaagattttaatcccccaatctttagaaaatgataggagaggatccccatcctctctccacccccaacctccccactcctgccataaatggcacagagaaagtgcctctgcttcctacctgggacctgaagtttgggtggtggagctggggctttgggacccttcccctccctatgcaagtatcaatatccatgcttctttctcttctttctttatttctttctttcttcctttcttttttctttctctctctctctctcttt

SEQ ID NO: 1243152 - DNA, 4001 bp, Homo sapiens
aaacacaatcaagaaataaccgtgaaatatcatgattatttctacatctttcataaagtacaatcaggacacaggatggcaatgtaatctacatcaagatggccagtatgaaatgtctgatttcagaatctgaattacttatgaaagaatgagtgtcccacaccatctggacaggcagcccttgggcttaaggaacacactttgaaatgggtcacaaaacctgttctctgctctcaaggtcactattagtatgagggtgagggtggaggggggtgcctgtcttttccttccttccagaacccctggaaactacaagttgcaagaggccttagcggcctcttgcatttcagcttctgaaatgccctgtgccgtctacagccataccaccctgaacgcgtcctgtccccagtgcagacctaggcggtggcatgggcacccagaaacatgtacccaggaaatcctaggagccctgccgctgccagtgggtagattcattcaatgcctgacctctgacctcttcagtctgaaaaagcagtaaacaagggggccttgaagaagatcacggatccgcttgttaaagaaatgtatctgctgggttccactgtttctctcccaacaccatcctataggtacaaaaactgaaacctagagcaagggcaggtcgcagagctggtggggtgtggaactgactccctacccctcccccaatcctcagcagcccgctttgcagaacacagagcttcacccttcactgccagccctggaacagctcaaaggtgctttcagacgatctttggggtcttattccccaatccctctctttggcatttcccagcctcttccttcgttttctcctaaattacctccgaggcacccgctcttttcctcttccttgtcctaccccaccataaatcccctcccaaaaatgaggcccaggccttgctctggtcccctcccatctaccgggacaaatgacattctgcccctacctccatccatccctttcctctttacgggaacctttctgggtcataatcccaccgggctgataaacatttaacaggactttacaacttaatttaaaaaaaaaaaaaaaaaaccttcagcacaaatctctagggtaattccattaactactcattaaggcaatcagggcagctggcaactctccattttcagaagtggaggggagccggagaaataaaaaatagctttccggccccagggttgccaatactgatctactaggtcagaatctatgggatgggaattgatgctctttaaaatcatgccgcggggtttggaggagcagtggattagaacttcggggggttctgggctgtggagtttgggggataagacatgtggtctctaggttctggaatgtgggtttggggaaatctgagtttcagggggtctgattcgaggagatctcaggtctaagttttaaagaaatggagtctgggctccagggaatttagggtctgggttttgaggatctggggtctgtgttccggggatctggagtcggggttttgaagaacctgaggtctggcacccctcagtccttagacgaccccatgataagaacctcccctccagcgcgactggggaggggctgcagggagcccgcggacagcatagcctcggaagaggtaagggctccaaggactccacaccgcccggtgtcagagacgaggccagcgcggcccagagaggctgaaccaccggcccggcgactcggcgccgggcggcggggcgggcgctcacctcgatgagagagtagttgatctccacgtccgacttgacgaagccaccgcagcccaccacgatgtcctccgagccgtgcgccggccccacgccgctcagcagcagcaccaccgcggcggtgaccaccgcgggccccagcggccccgcgccctggcccaccagcatggcccgacctcccccagctagacccaccgccggcagccgggtcccgcccctcacactgcacgccgcaggctccttcctcctcctaggccggctgacagcccaggccccgccccaccgccgccgccagagccgccgcgcacgcgcgcttcgaccccacgttcacagccccagaagagagaactaaggcgcatgctcggcaaggaaacgagaccatctctgccttctagaggcctggaggactccgcgcgacatctggcaggcgcaacgcaaggtgcatgcctacagggagaagctccaaagatgaattctactttagaattcaccatcacagctggaaaggacgggagattttgttggtggaattatctaacaactttctcaaatctttctgacccatatatttcgcaggtaaaatatataatctcacaaaaagctttagggccgggtgtgtggctcacgcctgtaatcccagcactttgggaggctgaggtgggtggatcgcttgagcccaggagttcgagaccagcctgggcaatatggcgaaaccccatctctacacacacacgcgcacacgcacacacacgcacacacacacacacacgaaaaacacacacgaaaaacgctttaagaatttgtgtaagctggtgtatttttccatgataaatgatcgatacttttttaagcaaaacgtgttaatgttagcatattaaagaaagtatgtaagatttattttaatcctagctctaataacatatgcctagaaacaaattttgatgagttttcttcccctaagcaagaagtgcatgcagtcagtatactttgaattagctctgcaagatgaaacatgatttgcctaaaaacaagctcaaatccagcatattttgtcccaagagtgaattcatatgtacactgaatttaactaccagtcaccacatcaaaatacacaccaaagaggccgggcacagtggctcacgcctgtaatcccagcactttgggaggccaaggctggcagatcatgaggccacgagatcgagaccatcctggctaacacagtgaaaccccgtctctactaaaaatataaacacttagccgggcgtggtggcgggcgcctgtagtaccagctactcgggaggctgaggcaggagaatggcgtgaacctgggaggcggagcttgcggttagccgagatcgcaccactgcactccagcctgggcgacagagcaagactctgtctcaaaaaaataaataaataaaattaaaaaaacaccaaaaaattgcttttcttacctaatattaggatttcttccattttgtctcaaaaaaaaaaagctagtgctttattttgataggttttgtattttgtttccaaatgacaaagtaagactgaatttcccgctgcaatttgccattgtggctaaaacttaagcaataaacaactaagaagcacaggttcaaaccatacagtagtcaaactttcatgggggcaaggagggaatgaagggaatgacacattgacctcagggtcataatcatgagtgcatctgatttcagtttctcgtgctgcattttcactcaaatacagtagactctcaactattcagtgataatgagaaaccatttaaataattcgtctacttattggggtttgttatttataaccacaattgaaatagatgccttttatgcaaatcaccagaggattgaaagccaccaattagaaagtgtaggcctatggaaacctctcatcttacagaatgggaaactgaggcccagagaggaaaaggaagttgtctaagactctgcatgcagccataggttttcccggagctagagagcaggaattggggccagaagccgtggcttactactgtaatatgaacatgttgggagtccgaggtgggcagatcatttgaggtcaggagttcgagaccaaattggccaacatggcaaaaccctgtctctactaaaaatacaaaaattagctaggtgtggtggcgcatgcctctaatcccagctactcaggaggctgaggcaggagaatcacttgaaccagggagccacaggttg

SEQ ID NO: 1243153 - DNA, 4001 bp, Homo sapiens
aaccgtgaaatatcatgattatttctacatctttcataaagtacaatcaggacacaggatggcaatgtaatctacatcaagatggccagtatgaaatgtctgatttcagaatctgaattacttacgaaagaatgagtgtcccacaccatctggacaggcagcccttgggcttaaggaacacactttgaaatgggtcacaaaacctgttctctgctctcaaggtcactattagtatgagggtgagggtggaggggggtgcctgtcttttccttccttccagaacccctggaaactacaagttgcaagaggccttactggcctcttgcatttcagcttctgaaatgccctgtgccgtctacagccataccaccctgaacgtgtcctgtccccagtgcagacctaggaggtggcatgggcacccagaaacatgtacccaggaaatcctaggagccctgccgctgccagtgggtattcattcaatgcctgacctctgacctcttcagcctgaaaaagcagcaaacaacggggccttgaagaagatcacggatccgcttgttaaagaaatgtatctgctgggttccactgtttctctcccaacaccatcctataggtacaaaaactgaaacctagagcaagggcaggtcgcagagctgatggggtgtggaactgactccctacccctcccccaatcctcagcagcccgctttgcagaacacagagcttcacccttcactgccagccctggaacagctcaaaggtgctttcagacgatctttggggtcttattccccaatccctctctttggcatttcccagcctcttccttcgttttctcctaaattacctccgaggcacccgctcttttcctcttccttgtcctaccccaccataaatccccgcccaaaaatgaggcccaggccttgctctggtcccctcccatctaccgggacaaatgacattctgcccctacctccatccatccctttcctctttacgggaacctttctgggtcataatcccaccgggctgataaacatttaacaggactttacaacttaattaaaaaaaaaaaaaaaaaaaaaaaaaaaaaaaaaacctttacaaatctctagggtaattccattaactactcattaaggcaatcagggcagctggcaactctccattttcagaagtggaggggagccggagaaataaaaaatagctttccggccctagggttgccaatactgatctactaggtcagaatctatgggatgggaattgatgctctttaaaatcatgccgcggggtttggaggagcagtggattagaacttcggggggttctgggctgtggagtttgggggataagacatgtggtctctaggttctggaatgtgggtttggggaaatctgagtttcagggggtctgattcgaggagatctcaggtctaagttttaaagaaatggagtctgggctccagggaatttagggtctgggttttgaggatctggggtctgtgttccgcggatctggagtcggggttttgaagaacctgaggtctggcacccctcagtccttagacgaccccatgataagaacctcccctccagcgcgactggggaggggctgcagggagcccgcggacagcatagcctcggaagaggtaagggctccaaggactccacaccgcccggtgtcagagacgaggccagcgcggcccagagaggctgaaccaccggcccggcgactcggcgccgggcggcggggcgggcgctcacctcgatgagcgagtagttgatctccacgtccgacttgacgaagccaccgcagcccaccacgatgtcctccgagccgtgcgccggccccacgccgctcagcagcagcaccaccgcggcggtgaccaccgcgggccccagcagccccgcgccctggcccaccagcatggcccgacctcccccagctagacccaccgccggcagccgggtcccgcccctcacactgcacgccgcaggctccttcctcctcctaggccggctgacagcccaggccccgccccaccgccgccgccagagccgccgcgcacgcgcgcttcgacgccacgttcacagccccagaagagagaactaaggcgcatgctcggcaaggaaacgagaccatctctgccttctagaggcctggaggactccgcgcgacatctggcaggtgcaacgcaaggtgcatgcctacagggagaagctccaaagatgaattctactttagaattcaccatcacagctggaaaggacgggagattttgttggtggaattatctaacaactttctcaaatctttctgacccatatatttcgcaggtaaaatatataatctcacaaaaagctttagggccgggtgtgtggctcacgcctgtaatcccagcactttgggaggctgaggtgggtggatcgcttgagcccacgagttcgagaccagcctgggcaatatggcgaaaccccatctctacacacacacacgcacacgcacgcacacacacacacacacacacacacacgaaaaacgctttaggaatttgtgtaagctggtgtatttttccatgataaatgatcgatacttttttaagcgaaacgtgttaatgttagcatattaaagaaagtatgtaagatttattttaatcctagctctaataacatatgcctagaaacaaattttgatgagttttcttcccctaagcaagaagtgcatgcagtcagtatactttgaattagctctgcaagatgaaacatgatttgcctgaaaacaagctcaaatccagcatattttgtcccaagagtgaattcatatgtacactgaatttaactaccagtcaccacatcaaaatacacaccaaagaggccgggcacagtggctcacgcctgtaatcccagcactttgggaggccaaggctggcagatcatgaggccacgagatcaagaccatcctggctaacacagtgaaaccccgtctctactaaaaatataaacacttagccgggcgtggtggcgggcgcctgtagtaccagctactcgggaggctgaggcaggagaatggcgtgaacctgggaggcggagcttgcggttagccgagatcgcaccactgcactccagcctgggcgacagagcaagactctgtctcaaaaaaataaataaataaaatttaaaaaacaccaaaaaattgcttttctaacctaatattaggatttcttccattttgtctcaaaaaaaaaaaagctagtgctttattttgataggttttgtattttgtttccaaatgacaaagtaagactgaatttcccgctgcaatttgccgttgtggctaaaacttaagcaataaacaactaagaagcacaggttcaaaccatacagtagtcaaaccttcatgggggcaaggagggaatgaagggaatgacacattgacctcagggtcataatcatgagtgcatctgatttcagcttctcttgctgcattttcactcaaatacagtagactctcaactattcagtgataatgagaaaccatttaaataattcgtctatttattggggtttgttatttataaccacaattgaaatagatgccttttatgcaaatcaccagaggattgaaagccaccaattagaaagtgtaggcctatggaaacctttcatcttacagaatgggaaactgaggcccagagaggaaaaggaagttgtctaagactctgcatgcagccataggttttcccggagctagagagcaggaattggggccagaagccgtggcttactactgtaatatgaacatgttgggagtccgaggtgggcagatcatttgaggtcaggagttcgagaccaacttggccaacatggcaaaaccctgtctctactaaaaatacaaaaattagctaggtgtggtggcgcatgcctctaatcccagctacttcaggaggctgaggcaggagaatcacttgaaccagggagccacaggttgcagtgagctgaggt

SEQ ID NO: 1243154 - DNA, 4001 bp, Homo sapiens
atcaagaaataaccgtgaaatatcatgattgtttctacatctttcataaagtacaatcaggacacaggatggcaatgtaatctacatcaagatggccagtatgaaatgtctgatttcagaatctgaattacttatgaaagaatgagtgtcccacaccatctggacaggcagcccttgggcttaaggaacacactttgaaatgggtcacaaaacctgttctctgctctcaaggtcactattagtatgagggtgagggtggaggggggtgcctgtcttttccttccttccagaacccctggaaactacaagttgcaagaggccttagcggcctcttgcatttcagcttctgaaatgccctgtgccgtctacagccataccaccctgaacgtgtcctgtccccagtgcagacctaggaggtggcatgggcacccagaaacatgtacccaggaaatcctaggagccctgccgctgccagtgggtagattcattcaatgcctgacctctgacctcttcagtctgaaaaagcagcaaacaagggggccttgaagaagatcacggatccgcttgttaaagaaatgtatctgctgggttccactgtttctctcccaacaccatcctataggtacaaaaactgaaacctagagcaagggcaggtcgcagagctggtggggtgtggaactgactccctacccctcccccaatcctcagcagcccgctttgcagaacacagagcttcacccttcactgccagccctggaacagctcaaaggtgctttcagacgatctttggggtcttattccccaatccctctctttggcatttcccagcctcttccttcgttttctcctaaattacctccgaggcacccgctcttttcctcttccttgtcctaccccaccataaatcccctcccaaaaatgaggcccaggccttgctctggtcccctcccatctaccgggacaaatgacattctgcccctacctccatccatccctttcctctttacgggaacctttctgggtcataatcccaccgggctgataaacatttaacaggactttacaacttaattaaaaaaaaaaaaaaaaaaaaccttcagcacaaatctctagggtaattccattaactactcattaaggcaatcagggcagctggcaactctccattttcagaagtggaggggagccggagaaataaaaaatagctttccggccccagggttgccaatactgatctactaggtcagtatctatgggatgggaattgatgctctttaaaatcatgccgcggggtttggaggagcagtggattagaacttcggggggttctgggctgtggagtttgggggataagacatgtggtctctaggttctggaatgtgggtttggggaaatctgagtttcagggggtctgattcgaggagatctcaggtctaagttttaaagaaatggagtctgggctccagggaatttagggtctgggttttgaggatctggggtctgtgttccggggatctggagtcggggttttgaagaacctgaggtctggcacccctcagtccttagacgaccccatgataagaacctcccctccagcgcgactggggaggggctgcagggagcccgcggacagcatagcctcggaagaggtaagggctccaaggactccacaccgcccggtgtcagagacgaggccagcgcggcccagagaggctgaaccaccggcccggcgactcggcgccgggcggcggggcgggcgctcacctcgatgagagagtagttgatctccacgtccgacttgacgaagccaccgcagcccaccacgatgtcctccgagccgtgcgccggccccacgccgctcagcagcagcaccaccgcggcggtgaccaccgcgggccccagcggccccgcgccctggcccaccagcatggcccgacctcccccagctagacccaccgccggcagccgggtcccgcccctcacactgcacgccgcaggctccttcctcctcctaggccggctgacagcccaggccccgccccaccgccgccgccagccgccgccgcgcacgcgcgcttcgaccccacggtcacagccccagaagagagaactaaggcgcatgctcggcaaggaaacgagaccatctctgccttctagaggcctggaggactccgcgcgacatctggcaggtgcaacgcaaggtgcatgcctacagggagaagctccaaagatgaattctactttagaattcaccatcacagctggaaaggacgggagatttcgttggtggaattatctaacaactttctcaaatctttctgacccatatatttcgcaggtaaaatatataatctcacaaaaagctttagggccgggtgtgtggctcacgcctgtaatcccagcactttgggaggctgaggtgggtggatcgcttgaacccaggagttcgagaccagcctgggcaatatggcgaaaccccatctctacacacacacacgcacacacacacacacacacacacacgaaaaacgctttaggaatttgtgtaagctggtgtatttttccatgataaatgatcgatacttttttaagcgaaacgtgttaatgttagcatattaaagaaagtatgtaagatttattttaatcctagctctaataacatatgcctagaaacaaattttgatgagttttcttcccctaagcaagaagtgcatgcagtcagtatactttgaattagctctgcaagatgaaacatgatttgcctgaaaacaagctcaaatccagcatattttgtcccaagagtgaattcatatgtacactgaatttaactaccagtcaccacatcaaaatacacaccaaagaggccgggcacagtggctcacgcctgtaatcccagcactttgggaggccaaggctggcagatcatgaggccacgagatcgagaccatcctggctaacacagtgaaaccccgtctctactaaaaatataaacacttagccgggcgtggtggcgggcgcctgtagtaccagctactcgggaggctgaggcaggagaatggcgtgaacctgggaggcggagcttgcggttagccgagatcgcaccactgcactccagcctgggcgacagagcaagactctgtctcaaaaaaataaataaataaaattttaaaaacaccaaaaaattgcttttctaacctaatattaggatttcttccattttgtctcaaaaaaaaaaaagctagtgctttattttgataggttttgtattttgtttccaaatgacaaagtaagactgaatttcccgctgcaatttgccgttgtggctaaaacttaagcaataaacaactaagaagcacaggttcaaaccatacagtagtcaaaccttcatgggggcaaggagggaatgaagggaatgacacattgacctcagggtcataatcatgagcgcatctgatttcagtttctcgtgctgcattttcactcaaatacagtagactctcaactattcagtgataatgagaaaccatttaaataattcgtctatttattggggtttgttatttataaccacaattgaaatagatgccttttatgcaaatcaccagaggattgaaagccaccaattagaaagtgtaggcctatggaaacctctcatcttacagaatgggaaactgaggcccagagaggaaaaggaagttgtctaagactctgcatgcagccacaggttttcccggagctagagagcaggaattggggccagaagccgtggcttactactgtaatatgaacatgttgggagtccgaggtgggcagatcatttgaggtcaggagttcgagaccaaattggccaacatggcaaaaccctgtctctactaaaaatacaaaaattagctaggtgtggtggcgcatgcctctaatcccagctactcaggaggctgaggcaggagaatcacttgaaccagggagccacaggttgcagtgagctgaggtcttgccgctgc

SEQ ID NO: 1243155 - DNA, 4001 bp, Homo sapiens
acaggatggcaatgtaatctacatcaagatggccagtatgaaatgtctgatttcagaatctgaattacttatgaaagaatgagtgtcccacaccatctggacaggcagcccttgggcttaaggaacacactttgaaatgggtcacaaaacctgttctctgctctcaaggtcactattagtatgagggtgagggtggaggggggtgcctgtcttttccttccttccagaacccctggaaactacaagttgcaagaggccttagcggcctcttgcatttcagcttctgaaatgccctgtgccgtctacagccataccaccctgaacgtgtcctgtccccagtgcagacctaggaggtggcatgggcacccagaaacatgtacccaggaaatcctaggagccctgccgctgccagtgggtagattcattcaatgcctgacctctgacctcttcagtctgaaaaagcagcaaacaagggggccttgaagaagatcacggatccgcttgttaaagaaatgtatctgctgggttccactgtttctctcccaacaccatcctataggtacaaaaactgaaacctagagcaagggcaggtcgcagagctggtggggtgtggaactgactccctacccctcccccaatcctcagcagcccgctttgcagaacacagagcttcacccttcactgccagccctggaacagctcaaaggtgctttcagacgatctttggggtcttattccccaatccctctctttggcatttcccagcctcttccttcgttttctcctaaattacctccgaggcacccgctcttttcctcttccttgtcctaccccaccataaatcccctcccaaaaatgaggcccaggccttgctctggtcccctcccatctaccgggacaaatgacattctgcccctacctccatccatccctttcctctttacgggaacctttctgggtcataatcccaccgggctgataaacatttaacaggactttacaacttaattaaaaaaaaaaaaaaaaaaaaccttcagcacaaatctctagggtaattccattaactactcattaaggcaatcagggcagctggcaactctccattttcagaagtggaggggagccggagaaataaaaaatagctttccggccccagggttgccaatactgatctactaggtcagtatctatgggatgggaattgatgctctttaaaatcatgccgcggggtttggaggagcagtggattagaacttcggggggttctgggctgtggagtttgggggataagacatgtggtctctaggttctggaatgtgggtttggggaaatctgagtttcagggggtctgattcgaggagatctcaggtctaagttttaaagaaatggagtctgggctccagggaatttagggtctgggttttgaggatctggggtctgtgttccggggatctggagtcggggttttgaagaacctgaggtctggcacccctcagtccttagacgaccccatgataagaacctcccctccagcgcgactggggaggggctgcagggagcccgcggacagcatagcctcggaagaggtaagggctccaaggactccacaccgcccggtgtcagagacgaggccagcgcggcccagagaggctgaaccaccggcccggcgactcggcgccgggcggcggggcgggcgctcacctcgatgagagagtagttgatctccacgtccgacttgacgaagccaccgcagcccaccacgatgtcctccgagccgtgcgccggccccacgccgctcagcagcagcaccaccgcggcggtgaccaccgcgggccccagcggccccgcgccctggcccaccagcatggcccgacctcccccagctagacccaccgccggcagccgggtcccgcccctcacactgcacgccgcaggctccttcctcctcctaggccggctgacagcccaggccccgccccaccgccgccgccagccgccgccgcgcacgcgcgcttcgaccccacggtcacagccccagaagagagaactaaggcgcatgctcggcaaggaaacgagaccatctctgccttctagaggcctggaggactccgcgcgacatctggcaggtgcaacgcaaggtgcatgcctacagggagaagctccaaagatgaattctactttagaattcaccatcacagctggaaaggacgggagatttcgttggtggaattatctaacaactttctcaaatctttctgacccatatatttcgcaggtaaaatatataatctcacaaaaagctttagggccgggtgtgtggctcacgcctgtaatcccagcactttgggaggctgaggtgggtggatcgcttgaacccaggagttcgagaccagcctgggcaatatggcgaaaccccatctctacacacacacacgcacacacacacacacacacacacacgaaaaacgctttaggaatttgtgtaagctggtgtatttttccatgataaatgatcgatacttttttaagcgaaacgtgttaatgttagcatattaaagaaagtatgtaagatttattttaatcctagctctaataacatatgcctagaaacaaattttgatgagttttcttcccctaagcaagaagtgcatgcagtcagtatactttgaattagctctgcaagatgaaacatgatttgcctgaaaacaagctcaaatccagcatattttgtcccaagagtgaattcatatgtacactgaatttaactaccagtcaccacatcaaaatacacaccaaagaggccgggcacagtggctcacgcctgtaatcccagcactttgggaggccaaggctggcagatcatgaggccacgagatcgagaccatcctggctaacacagtgaaaccccgtctctactaaaaatataaacacttagccgggcgtggtggcgggcgcctgtagtaccagctactcgggaggctgaggcaggagaatggcgtgaacctgggaggcggagcttgcggttagccgagatcgcaccactgcactccagcctgggcgacagagcaagactctgtctcaaaaaaataaataaataaaattttaaaaacaccaaaaaattgcttttctaacctaatattaggatttcttccattttgtctcaaaaaaaaaaaagctagtgctttattttgataggttttgtattttgtttccaaatgacaaagtaagactgaatttcccgctgcaatttgccgttgtggctaaaacttaagcaataaacaactaagaagcacaggttcaaaccatacagtagtcaaaccttcatgggggcaaggagggaatgaagggaatgacacattgacctcagggtcataatcatgagcgcatctgatttcagtttctcgtgctgcattttcactcaaatacagtagactctcaactattcagtgataatgagaaaccatttaaataattcgtctatttattggggtttgttatttataaccacaattgaaatagatgccttttatgcaaatcaccagaggattgaaagccaccaattagaaagtgtaggcctatggaaacctctcatcttacagaatgggaaactgaggcccagagaggaaaaggaagttgtctaagactctgcatgcagccacaggttttcccggagctagagagcaggaattggggccagaagccgtggcttactactgtaatatgaacatgttgggagtccgaggtgggcagatcatttgaggtcaggagttcgagaccaaattggccaacatggcaaaaccctgtctctactaaaaatacaaaaattagctaggtgtggtggcgcatgcctctaatcccagctactcaggaggctgaggcaggagaatcacttgaaccagggagccacaggttgcagtgagctgaggtcttgccgctgcactccagcctgggcgacagagtgagactccatctcaaaaaaaaaaaaaaagcaggaagtggga

SEQ ID NO: 1243156 - DNA, 4001 bp, Homo sapiens
gagtgggtgtttggagtcaccgcggggccacagaggacgaggcccgcccgcacccttctccacattctccttgcttgagtctgctgacggcggggccgctctaagaccggttcggggcttcctctaggtgcggagaccaagcacgggctcctggcccgccctgcccgcggtgcttctggcccagtcttgccacacggtcaagccgcagtggtggcgtgaggggtggggttaggcgcataccgctgctccctagggacgggcctccctcccggccttggcccggggccgcctcctccaggtagggcgctggaaaccaggcggtctgccggtcttcgttctccaccagccaccagcctgtgcgcaagaagcgggcagggactcaaatctcgaggctccctcgggtccaggagcagaggagcaaatccctgggttcttggggggccctacctgaggggtgccgcagcagcacgtccaggctctcctgggcctgcgcctgaaaaggcctatcccgcgtgtcctgggtacagaagggctgcaggcagcgcaggctctgagcctccagactgtggatggagaggcggcccgcagcgcgagaaagaggctgctcctctggggtgggcaggatcacccggctgggaagggcagcccgtacgagtgagaggtaggcggatggggagggtgaaactgggggcgccaccccggcaagaccgccagcctcccactctctgcccctattcgctggctgttcccccccaccctggacctctcccagctccaaacgccgctgcatgctgggagtttggggcgagtcaggcacctgccgggtggcagcgcgggctccaggtccaggggttgcggtgcgaagaagccagtgatcgtcgggctccgtgccacgcgctctgcagtcgccagcagcctccgagaataggtttccaacagctgcaggcgcgccaggccgcggctcgtgcgccccacgcgtcccaacagtggtgcatcttaaggcaccacaaaaacgtactgtgatacgccgctttgggcttcactggtccctggcgcccccaggcaagccaccgccttccccgctcccgtacccaggctggcctgaccgagaagctttgggagaacgcggtcagatctccgcagcaggcccgcctccaccgggaaggtctccttgagggtcttctgagggcgggaaccagggcattggtcttccagagcccactgtgcacccttgagagggcggggtccctcacccggatggcaggggctgggagcttcagcagggacgaagggcctccagtgggagtcactgatgggaggcagtccagtgggaggcagccgcgtggggaagccgccaccgcggcatcagggtggcccagggtcactcaccttgagctgcctgaattcgtcccaactcctgcgcacgaaggtgtcgctgccgtctgaccagcgcacagagaaggcaaacgtctgggggacaaaaagttgggagtgccgtggaggtgctggtccaggcacccccttcctatcccttggggccactaaggacccagccaggtcttacttggagcctcttgatctgcaccagggctgccccttgcactgaaactgggtatcgggggcctgccatggctgtggcttccaggctgcagattcctgaaatgggcgaggacccttctgcctccccgtgcttgagagggctctgggggacccagaaaaccccctgggatagaatcctggcaacacctcaagcctgtggggtccttgtggagccgccccagctgagtcctttgcagctttcttgctgtcccccaagcccacgatctgggggcaggagcacagggattgggggacttccaggcagagctgctgggaggaagaagaagaatgagctttccagccctggaggcgtgcaagactgaagaaggggcgaagggtaggcgggactgctgcctggggccctcctgcctgcctctggccacaggaggagggaggagaaggcagggctaatcaaagcgccacctgtcctgcccacctctctggattcccctaccctgtgaggtaattgccctgccagggtgcgcccaacaactttgaactggcctggggatttctgtgcagaaccaaggactcagtgcttacagctttaagtgctttgtctgacttaatcctaatgctggaggaaaggtctcttaatgtccccaactcatagaggaggaaatgtgtgttaaatgcgtaattattgtgagctgttctatacatgctgggggaggggcagacctcacaggctcaccccaggggttcccctgcagtgaggagacttggggtaggagaaagagggcccatctgtgcagtcactggcatttggtgggtgggggtggtggtcagggaagtggtcactagggctgttttgagaaccacctctcaattcacgatttgccatgacttactgcaaacatggcctgggcagaggctcgcccaggtgccccacctctctggctgcttccttatagttcgggcttcggaagccacattcaaccctggcacacagtggtttttcctcgtgctggggccaccagttctgtgttgggatgcacctactccagccccttcagggagcagtcagcctctaaggcatccctccaggaagctgccctggctgcaacaaagggcctttgtgtgtctgtcccaccagcactctctctcatgccctcaagctgtccctggtcttggcatgggcaatgaacacctgctcacatagggctgatttgcagggttcccccagccagctgtcaccttctccctgtctcagctgagggcccagctgacctggtggggtccagcgtgtgaacccaggggagaccttgctcccctggaagacaggagaagctggggaggatttattcacaagcagaggcctagagggattctgaggccacctgcctaccccagctgacagctcctgccccacaccccatcagccctgcatggtttccactttttcctcccctaccctcttttcttgcctgaatagtacaccccaccctccatctgtatgctcctcacttgcccctacaaaatccactccaaggacagacacagtgcctcacctgtaatccaagtactttgggaggccgaggcagggggattgcttgagctcaggagttcgagaccagtctgggcaacatgttgagacctccatctgtgccccccaaaaatacaaaaattagctgggcgtggtggcgtgtgcctgtagtctacttgggaggctgaggtgggagatcacttgagcctaagcagtcgcggctgcagtgaacaagatcgcgccactgcactccaccctgggtaacggaacaagaccctgtctcaaaaaaaaaaaagaaatccactccccatatgatagccagcggaatctgcagcaaactgaaatgggatcagattgggtaaccttgcccaaaactgtctagcatcttccctcctaccgttataataaattcccaatccccgaagctgccgaccaagtctttggtgggcccctgtccgtccctggatctcccctcccaccttacaaccctccctagcgtcccactggcgtttttgttcctgcaaaatgccaagaccctgccaccttgggcttggtctcgaaggcgctcctcagctgattcctcatccttcagaaagggtcacctcctcaaggaggccttccagatttactacacccttgcatggacccaccagtttgtacgtgaacatttatgagtgtgagtccttgtttttttttcctgtcttgaccactggattatgaacagagaaggtcagggaacagaattgtgttccctgctctgcccagcacttggaacagcgcttggaacagagcggtcactgcgcaaataatagcggaatggataaatgaacgcaaggaggcacaggaatcccagaggccgctccaaccgggagcccgacccctcatcccaggctctaggatccgcgacagccggcga

SEQ ID NO: 1243157 - DNA, 4001 bp, Homo sapiens
actttctggggtgacataatagtgtagatcttggctgggcacggtggttcacgcctgtaatcccaacactttgggaggccgaggcaggcggatcacctgaggtcgggagttcaaaaccagcctgaccaacatggagaaaccctatctctactaaaaatacaaaattagctgggagtggtggcacatgtctgtaatcccagccactcgggaggctgaggcaggagaatcgctcgaacctgggaagcagaggttgcggtgagctgatattgccccattgcactccagcctcagcaacaagggagaaactgtctcaaaaaaataaataaataaataaaataatgtagatcttgaaagggggttggtttatgctggtgtatgtactttccaaagttagtaaacttacacttaaggttatatattttggccaggcgcggtggctcacgcctgtaatcccagcactgggaggccgaggcaggcagatcacgaggtcaagacatggagactatcctggcgaacacggtgaaacccagtctctactaaaaatacaaaaattagccaggcgttgtaatctgagctgctcaggaggctgaggcaggacaattgcttgaaccccggaagcggaggttgcagtgagccgagatcttgccactgcactccagcctgggcgacagaatgagactctgtcttaaaaaaaaaaaaaagtcatcaaaccagatgacacaaatcaaatgacatttcactttgttttggtccgttttgtttgttagagacaagagtgcagcggggccatctcggctcactgcaacgtccagctcctgggcccaagcgatcctcccacctcagcctctccagtaactgggataacaggtacgcaccaccaggcccgactaatcttttttggaattttttgtagagatggggtttcgctatgatgccctggctagtcttcaactcctggactcaagtgatctgcccacctcggccccctaaagtgctgggattacaggcctgagctgtgtaatttcatgccgcgtgacacagcccagtaaaaaggaagaaaccccgcgggtccagcgtctactcacacaggtggactgatggctgataaatcccagcaggagccaaaagagcagccacagcacccatctactcacacaggtggactgatggctgataaatcccagcaggagccaaaagaggagccaaaagagcagccaccgcacccgcatgtcctggtcctttcagggcacccggaggtggccaggacagaggtggaggtggcttagggcaggggggagggaaggggacggggaccgggccggatctgagttggggagggggaggggagggggaggggaaggggaggggaaggggggaagtaagggaagggaaaggaggagaagggggctgttggggaggaggaggaggagaagaagaaaggggtctgggaaaggatccggttcaaattaagttctcaagcgctggtggaaggtttagctacaggtcacggagaagatcagggaagcaacaggacacgcggggcaagggagcgtgaggcttaggagcaattagagggagacaaaggttctgctttccaccaaaccttcttcggtctgggccctcccttagcaaccctggggctttagactctctctccaccaatccctgatgaccccggtggtgcctcacaatggacattccaagtagcgcccgcatcatcccaatgacccctcccccatctcagtcccccacgctcctcccaaggccaggtcctctctggaaccttcacaaacctgatttctggtcctccccaaccagctccctgtccctgcttctgggcgctccttccttcctgagctcccagggttcctcaaggtcacttttggcgacaaaacataaaaaacaaatgatggcaggatggcaggaagaacctcatacccaagcagagtgccaggttttacagcctccgctcagccattcatatcctaagcaacaaaacatcagcaggatgcggaaggtcccgatagtaaaccatctccatcacatccatgtagccatccgtccatcaacctgtatctcaggaacaaatgtacatacattcattttaagcatgcatggtacatttacaaaaattaacctgacttattttgttccagcaaatctcaatatatttgagagcaatcaaatcacacagcatgtttctgatcataaaactgtgctagaagtcaatgattaaaagctaattcaaaattattatttgcttggaaattcaaagtgcccttataagacataaacataagaaagaatccaaaatgaaacaagattgcctttcaactcaatgatgagatcataacatggcaataaaatgtctccctctggcctgggaattcctctttgtggcacaaggttgcgtgatctcaaatcacccctaacccacctagacattttaacatccgaaaccgagtgatgatgtccttatctatattatcttactgcccgtgtgtgtggactttaaattctgaacccaaatgagggggagaaaaccaagctgactttcatgactggcctctcagggatgtccaaggaatctgtgcatttcaagaaacaaagctcatcagcttctctcctaaggtatttgcccacaatacccagagggcttggcagcatcatgtgtgatgggtggggagctccaagcaggtgggcaggacccaggggcctggtgaccaggacagacccccactgtccatcacctttcctggccctgtcctcagctaaacttcccacaggccttctgcccgatcacacagagtgtgcccaaactcaggcctctggcagctgaaaaccactgctttaaatccctttaccatttactatgacataaggttattgtaaacaggaaatattctattgatgctacaaatggaaagccaatgcctttaccataaatagaaaaacaaccctaagaaacaagcaaaacaaaaacaaaacaggggctgggggtggtggctcacgcctgtaatcccagcactttgggaggccgaggtgggcggatcacaaggtcaggagttccagaccagcctggccaatatggtgaaaccctgtctctaataaaatacaaaaattagccgggtgtggtggtgggcgcctgtagtcccacctacttgggaggctgaggcaggagaacagtttgaacccgggaggcagagtctgcagtgagccgagattgcaccactgcactccagcctaggcgacagagcgagactctgtctcaaaaacagcaacaactacaaacaaacaaaaaacagggttaacaaaactatggaattcaattctatttatatgctgcagccatgttccagccctagatttggctgggcatggtggctcacgtctgtaatcccagcactttgggaggctgaggcaggcggatcacgaggttaggagttcgagaccagcctcaccaacatgctgaaaccccgtctctaccaaaaatacaaaaattagccaggcatggtggcacacgcctgtaatcccagctactcaggaggctgaggcaggacaatcccttgaacctgggaggcggaggttgcagtgagccgagatcgtaccattgcactccagcctgggtgacagaatggaatgagactctgtctcaaaaaaaaaaaaaaaaaaagaagaagccctagatttcggttgtgttggttgtaaaaggagagacccagtaagtgggggtcgtgccgcagattgctacccacaatggacgggtcactgagcaggtccggctaactgggcgttccctcgctggagggccagcacaccagactgcaggtggcgcgggtcagcaaggtaccaggggatgtgtcacacacacagcccacccccgtccagtcacgcacggacaccctgggcttccgagcaaacctgctcccaggtggtgtgaccacatggagccacagacacccagcaaggacacgcagcccgcacacccccggcactccaga

SEQ ID NO: 1243158 - DNA, 4001 bp, Homo sapiens
cactttctggggtgacataatagtgtagatcttggctgggcacggtggttcacgcctgtaatcccaacactttgggaggccgaggcaggcggatcacctgaggtcgggagttcaaaaccagccggaccaacatggagaaaccctatctctactaaaaatacaaaattagctgggagtggtggcacatgtctgtaatcccagccactcgggaggctgaggcaggagaatcgctcgaacctgggaagcagaggttgcggtgagctgatattgccccattgcactccagcctcagcaacaagggagaaactgtctcaaataaataaataaataaataaaataatgtagatcttgaaagggggttggtttatgctggtgtatgtactttccaaagttagtaaacttacacttaaggttatatattttggccaggcgcggtggctcacgcctgtaatcccagcactgggaggccgaggcaggcagatcacgaggtcaagacatggagactatcctggcgaacacggtgaaacccagtctctactaaaaatacaaaaattagccaggcgttgtaatctgagctgctcaggaggctgaggcaggacaattgcttgaaccccggaagcggaggttgcagtgagccgagatcttgccactgcactccagcctgggcgacagaatgagactctgtcttaaaaaaaaaaaaaaaagtcatcaaaccagatgacacaaatcaaatgacatttcactttgttttggtccgttttgtttgttagagacaagagtgcagcggggccatctcggctcactgcaacgtccagctcctgggcccaagcgatcctcccacctcagcctctccagtaactgggataacaggtacgcaccaccaggcccgactaatcttttttggaattttttgtagagatggggtttcgctatgatgccctggctagtcttcaactcctggactcaagtgatctgcccacctcagccccctaaagtgctgggattacaggcctgagctgtgtaatttcatgccgcgtgacacagcccagtaaaaaggaagaaaccccgcgggtccagcgtctactcacacaggtggactgatggctgataaatcccagcaggagccaaaagagcagccacagcacccatctactcacacaggtggactgatggctgataaatcccagcaggagccaaaagaggagccaaaagagcagccaccgcacccgcatgtcctggtcctttcagggcgccctgaggcagccaggacagaggtggaggtggcttagggcaggggggagggaaggggacggggaccgggcccgatctgagttggggagggggaggggagggggaggggaaggggaggggaaggggggaagtaagggaagggaaaggaggagaagggggctgttggggaggaggaggaggagaagaagaaaggggtctgggaaaggatccggttcaaattaagttctcaagcgctggtggaaggtttagctacaggtcacggagaagatcagggaagcaacaggacaggcggggcaagggagcgtgaggcttaggagcaattaggagacaaaggttctgctttccaccaaaccttcttcggtctgggccctcccttagcaaccctggggctttagactctctctccaccaatccctgatgaccccggtggtgcctcacaatggacattccaagtagcgcccgcatcatcccaatgacccctcccccttctcagtcccccacgctcctcccaaggccaggtcctctctggaaccttcacaaacctgatttctggtcctccccaaccagctccctgtccctgcttctgggtgctccttccttcctgagctcccagggttcctcaaggtcacttttggcgacaaaacataaaaaacaaatgatggcaggatggcaggaagaacctcatacccaagcagagtgccaggttttacagcctccgctcagccattcatatcctaagcaacaaaacatcagcaggatgcggaaggtcccgatagtaaaccatctccatcacatccatgtagccatccgtccatcaacctgtatctcaggaacaaatgtacatacattcattttaagcatgcatggtacatttacaaaaattaacctgacttattttgttccagcaaatctcaatatatttgagagcaatcaaatcacacagcatgtttctgatcataaaactgtgctagaagtcaatgattaaaagctaattcaaaattattatttgcttggaaattcaaagtgcccttataagacataaacataagaaagaatccaaaatgaaacaagattgcctttcaactcaatgatgagatcataacatggcaataaaatgtctccctctggcctgggaattcctctttgtggcacaaggttgtgtgatctcaaatcacccctaacccacctagacattttaacatccgaaaccgagtgatgatgtccttatctatatcatcttactgcccgtgtgtgtggactttaaattctgaacccaaatgagggggagaaaaccaagctgactttcatgactgagctctcagggacgtccaaggaatctgtgcatttcaagaaacaaagttcatcagcttctctcctaaggtatttgcccacaatacccagagggcttggcagcatcatgtgtgatgggtggggagctccaagcaggtgggcaggacccaggggcctggtgaccaggacagacccccactgtccatcacctttcctggccctgtcctcagctaaacttcccacaggccttctgcccgatcacacagagtgtgcccaaactcaggcctctggcagctgaaaaccactgctttaaatccctttaccatttactatgacataaggttattgtaaacaggaaatattctattgatgctacaaatggaaagccaatgcctttaccataaatagaaaaacaaccctaagaagcaagcaaaacaaaaacaaaacaggggctgggggtggtggctcacgcctgtaatcccagcactttgggaggccgaggtgggcggatcacaaggtcaggagttccagaccagcctggccaatatggtgaaaccctgtctctaataaaatacaaaaattagccgggtgtggtggtgggcgcctgtagtcccacctacttgggaggctgaggcaggagaacagtttgaacccgggaggcagagtctgcagtgagccgagattgcaccactgcactccagcctaggcgacagagcgagactctgtctcaaaaacagcaacaactacaaacaaacaaaaaacagggttaacaaaactatggaattcaattctatttatatgctgcagccatgttccagccctagatttggctgggcatggtggctcacgtctgtaatcccagcactttgggaggctgaggcaggcggatcacgaggttaggagttcgagaccagcctcaccaacatgctgaaaccccgtctctaccaaaaatacaaaaattagccaggcatggtggcacacgcctgtaatcccagctactcaggaggctgaggcaggacaatcccttgaacctgggaggcggaggttgcagtgagccgagatcgtaccattgcactccagcctgggtgacagaatggaatgagactctgtctcaaaaaaaaaaaaaaaaaaagaagaagccctagatttcggttgtgttggttgtaaaaggagagacccagtaagtgggggtcgtgccgcagattgctacccacaatggacgggtcactgagcaggtccggccaactgggcgttccctcgctggagggccagcacaccagactgcaggtggcgcgggtcagcaaggtaccaggggatgtgtcacacacacagcccacccccgtccagtcacgcacggacaccctgggcttccgagcaaacctgctcccaggtggtgtgaccacatggagccacagacacccagcaaggacacgcagcccgcacacccccggtactccaga

SEQ ID NO: 1243159 - DNA, 4001 bp, Homo sapiens
acataatagtgtagatcttggctgggcacggtggttcacgcctgtaatcccaacactttgggaggccgaggcgggcggatcacctgaggtcgggagttcaaaaccagcctgaccaacatggagaaaccctatctctactaaaaatacaaaattagctgggagtggtggcacatgtctgtaatcccagccactcgggaggctgaggcaggagaatcgctcgaacctgggaagcagaggttgcggtgagctgatattgccccattgcactccagcctcagcaacaagggagaaactgtctcaaataaataaataaataaataaataaaataatgtagatcttgaacgggggttggtttatgctggtgtatgtactttccaaagttagtaaacttacacttgaggttatatattttggccaggcgcggtggctcacgcctgtaatcccagcactgggaggccgaggcaggcggatcacgaggtcaagagatggagactatcctggcgaacatggtgaaacccagtgtctactaaaaatacaaaaattagccaggcgttgtaatctgagctactcaggaggctgaggcaggacaattgcttgaaccccggaagcggaggttgcagtgagccgagatcttgccactgcactccagcctgggcgacagagtgagactctgtctaaaaaacaaacaaacaaaaaaaagtcatcaaaccagatgacacaaatcaaatgacatttcactttgttttggtccgttttgtctgttggagacaagagtgcagcggggccatctcggctcactgcaacgtccagctcctgggcccaagcgatcctcccacctcagcctctccagtaactgggataacaggtacgcaccaccaggcccgactaatcttttttggaattttttgtagagatggggtttcgctatgatgccctggctagtcttcaactcctggactcaagtgatctgcccacctcggccccctaaagtgctgggattacaggcctgagctgtgtaatttcatgccgcgtgacacagcccagtaaaaaggaagaaaccccgcgggtccagcgtctactcacacaggtggactgatggctgataaatcccagcaggagccaaaagagcagccacagcacccatctactcacacaggtggactgatggctgataaatcccagcaggagccaaaagaggagccaaaagagtagccaccgcacccgcatgtcctggtcctttcagggctccctgaggcggccaggacagaggtggaggtggcttagggcaggggggagggaaggggacggggaccggggccggatctgagttggggagggggaggggagggggaggggaaggggaggggaaggggggaagtaagggaagggaaaggaggagaagggggctgttggggaggaggaggaggagaagaagaaaggggtctgggaaaggatccggttcaaattaagttctcaagcgctggtggaaggtttagctacaggtcacggagaagatcagggaagcaacaggacaggcagggcaagggagcgtgaggcttaggagcaattagagggagacaaaggttctgctttccaccaaaccttcttcggtctgggccctcccttagcaaccctggggctttagactctctctccaccaatccctgatgaccccggtggtgcctcacaatggacattccaagtagcgcccgcatcatcccaatgacccctcccccatctcagtcccccacgctcctcccaaggccaggtcctctctggaaccttcacaaacctgacttctggtcctccccaaccagctccctgtccctgcttctgggcgctccttccttcctgagctcccagggttcctcaaggtcacttttggcgacaaaacataaaaaacaaatgatggcaggatggcaggaagaacctcatacccaagcagagtgccaggttttacagcctccgctcagccattcatatcctaagcaacaaaacatcagcaggatgcggaaggtcccgatagtaaaccatctccatcacatccatgtagccatccgtccatcaacctgtatctcaggaacaaatgtacatacattcattttaagcatgcatggtacatttacaaaaattaacctgacttattttgttccagcaaatctcaatatatttgagagcaatcaaatcacacagcatgtttctgatcataaaactgtgctagaagtcaatgattaaaagctaattcaaaattattatttgcttggaaattcaaagtgcccttataagacataaacataagaaagaatccaaaatgaaacaagattgcctttcaactcaatgatgagatcataacatggcaataaaatgtctccctctggccggggaattcctctttgtggcacaacgttgtgtgatctcaaatcacccctaacccacctagacattttaacatccaaaaccgagtgatgatgtccttatctatatcatcttactgcccgtgtgtgtggactttaaattctgaacccaaatgagggggagaaaaccaagctgactttcatgactgagctctcagggacgtccaaggaatctgtgcatttcaagaaacaaagttcatcagcttctctcctaaggtatttgcccacaatagccagagggcttggccgcatcatgtgtgatgggtggggagctccaagcaggtgggcaggacccaggggcctggtgaccaggacagacccccactgtccatcacctttcctggccctgtcctcagctaaacttcccacaggccttctgcccgatcacacagagtgtgcccaaactcactcaggcctctggcagctgaaaaccactgctttaaatccctttaccatttactatgacataaggttattgtaaacaggaaatattctattgatgctacaaatggaaagccaatgcctttaccataaatagaaaaacaaccctaagaaacaagcaaaacaggggctgggggtggtggctcacgcctgtaatcccagcactttgggaggctgaggcgggcggatcacaaggtcaggagttccagaccagcctggccaatatggtgaaaccctgtctctaataaaatacaaaaattagctgggtgtggtggtgggcgcctgtagtcccacctacttggaaggctgaggcaggagaatagtttgaacccgggaggcagagtctgcagtgagccgagattgcaccactgcactccagcctaggtgacagagcgagactctgtctcaaaaacagcaacaactacaaacaaacaaaaaacagggttaacaaaagtatggaattcaattctttttatatgctgcagccatgttccagccctagatttggctgggcatggtggctcacgcctgtaatcccagcactttgggaggctgaggcaggcggatcacgaggttaggggttgacacgagcctggccaatatggtgaaaccccatctctgctaagaatacaaaaattagctgggcatggtggtgcacacctgtagtcccagctactcagaggctgaggcagaggaattgcttgaacccgggagacggaggttgcagtgagccaagattgtgccattgcactccagcctgggggacagagtgaaactctgtctcaaaaaaaaaaaaaaaatatatatatatatatatatgtgtgtgtgtgtgtgtctgtctgtgtgtgtgtgtgtatctatataaatctcaaaaataaaagatcatttttgagattatcattttaaaagacaagataatgttcaacttaatgaataatttaattattactactggactttttgtagactgcacagagcattcaaaacaaatgaaggagaataaaaaatatgtattacatgttgtaaaataaatatgatgtggttaattcttttattcaaaattatagaacatatatatgtactgtagaatgtatttcttattatgagtcatgttaaaaagtagtttagaagctgttgatttgaat

SEQ ID NO: 1243160 - DNA, 4001 bp, Homo sapiens
acataatagtgtagatcttggctgggcacggtggttcacgcctgtaatcccaacactttgggaggccgaggcgggcggatcacctgaggtcgggagttcaaaaccagcctgaccaacatggagaaaccctatctctactaaaaatacaaaattagctgggagtggtggcacatgtctgtaatcccagccactcgggaggctgaggcaggagaatcgctcgaacctgggaagcagaggttgcggtgagctgatattgccccattgcactccagcctcagcaacaagggagaaactgtctcaaataaataaataaataaataaataaaataatgtagatcttgaacgggggttggtttatgctggtgtatgtactttccaaagttagtaaacttacacttgaggttatatattttggccaggcgcggtggctcacgcctgtaattccagcactgggaggccgaggcaggcggatcacgaggtcaagagatggagactatcctggcgaacatggtgaaacccagtgtctactaaaaatacaaaaattagccaggcgttgtaatctgagctactcaggaggctgaggcaggacaattgcttgaaccccggaagcggaggttgcagtgagccgagatcttgccactgcactccagcctgggcgacagagtgagactctgtctaaaaaacaaacaaacaaaaaaaagtcatcaaaccagatgacacaaatcaaatgacatttcactttgttttggtccgttttgtctgttggagacaagagtgcagcggggccatctcggctcactgcaacgtccagctcctgggcccaagcgatcctcccacctcagcctctccagtaactgggataacaggtacgcaccaccaggcccgactaatcttttttggaattttttgtagagatggggtttcgctatgatgccctggctagtcttcaactcctggactcaagtgatctgcccacctcggccccctaaagtgctgggattacaggcctgagctgtgtaatttcatgccgcgtgacacagcccagtaaaaaggaacaaaccccgcgggtccagcgtctactcacacaggtggactgatggctgataaatcccagcaggagccaaaagagcagccacagcacccatctactcacacaggtggactgatggctgataaatcccagcaggagccaaaagaggagccaaaagagtagccaccgcacccgcatgtcctggtcctttcagggctccctgaggcggccaggacagaggtggaggtggcttagggcaggggggagggaaggggacggggaccggggccggatctgagttggggagggggaggggagggggaggggaaggggaggggaaggggggaagtaagggaagggaaaggaggagaagggggctgttggggaggaggaggaggagaagaagaaaggggtctgggaaaggatccggttcaaattaagttctcaagcgctggtggaaggtttagctacaggtcacggagaagatcagggaagcaacaggacaggcagggcaagggagcgtgaggcttaggagcaattagagggagacaaaggttctgctttccaccaaaccttcttcggtctgggccctcccttagcaaccctggggctttagactctctctccaccaatccctgatgaccccggtggtgcctcacaatggacattccaagtagcgcccgcatcatcccaatgacccctcccccatctcagtcccccacgctcctcccaaggccaggtcctctctggaaccttcacaaacctgacttctggtcctccccaaccagctccctgtccctgcttctgggcgctccttccttcctgagctcccagggttcctcaaggtcacttttggcgacaaaacataaaaaacaaatgatggcaggatggcaggaagaacctcatacccaagcagagtgccaggttttacagcctccgctcagccattcatatcctaagcaacaaaacatcagcaggatgcggaaggtcccgatagtaaaccatctccatcacatccatgtagccatccgtccatcaacctgtatctcaggaacaaatgtacatacattcattttaagcatgcatggtacatttacaaaaattaacctgacttattttgttccagcaaatctcaatatatttgagagcaatcaaatcacacagcatgtttctgatcataaaactgtgctagaagtcaatgattaaaagctaattcaaaattattatttgcttggaaattcaaagtgcccttataagacataaacataagaaagaatccaaaatgaaacaagattgcctttcaactcaatgatgagatcataacatggcaataaaatgtctccctctggccggggaattcctctttgtggcacaacgttgtgtgatctcaaatcacccctaacccacctagacattttaacatccaaaaccgagtgatgatgtccttatctatatcatcttactgcccgtgtgtgtggactttaaattctgaacccaaatgagggggagaaaaccaagctgactttcatgactgagctctcagggacgtccaaggaatctgtgcatttcaagaaacaaagttcatcagcttctctcctaaggtatttgcccacaatagccagagggcttggccgcatcatgtgtgatgggtggggagctccaagcaggtgggcaggacccaggggcctggtgaccaggacagacccccactgtccatcacctttcctggccctgtcctcagctaaacttcccacaggccttctgcccgatcacacagagtgtgcccaaactcactcaggcctctggcagctgaaaaccactgctttaaatccctttaccatttactatgacataaggttattgtaaacaggaaatattctattgatgctacaaatggaaagccaatgcctttaccataaatagaaaaacaaccctaagaaacaagcaaaacaggggctgggggtggtggctcacgcctgtaatcccagcactttgggaggctgaggcgggcggatcacaaggtcaggagttccagaccagcctggccaatatggtgaaaccctgtctctaataaaatacaaaaattagctgggtgtggtggtgggcgcctgtagtcccacctacttggaaggctgaggcaggagaatagtttgaacccgggaggcagagtctgcagtgagccgagattgcaccactgcactccagcctaggtgacagagcgagactctgtctcaaaaacagcaacaactacaaacaaacaaaaaacagggttaacaaaagtatggaattcaattctttttatatgctgcagccatgttccagccctagatttggctgggcatggtggctcacgcctgtaatcccagcactttgggaggctgaggcaggcggatcacgaggttaggggttgacacgagcctggccaatatggtgaaaccccatctctgctaagaatacaaaaattagctgggcatggtggtgcacacctgtagtcccagctactcagaggctgaggcagaggaattgcttgaacccgggagacggaggttgcagtgagccaagattgtgccattgcactccagcctgggggacagagtgaaactctgtctcaaaaaaaaaaaaaaaaaatatatatatatatatatatgtgtgtgtgtgtgtgtctgtctgtgtgtgtgtgtgtatctatataaatctcaaaaataaaagatcatttttgagattatcattttaaaagacaagataatgttcaacttaatgaataatttaattattactactggactttttgtagactgcacagagcattcaaaacaaatgaaggagaataaaaaatatgtattacatgttgtaaaataaatatgatgtggttaattcttttattcaaaattatagaacatatatatgtactgtagaatgtatttcttattatgagtcatgttaaaaagtagtttagaagctgttgatttga

SEQ ID NO: 1243161 - DNA, 4001 bp, Homo sapiens; identical to SEQ ID NO: 1243159

SEQ ID NO: 1243162 - DNA, 4001 bp, Homo sapiens; identical to SEQ ID NO: 1243160

SEQ ID NO: 1243163 - DNA, 4001 bp, Homo sapiens
gaggcgggcggatcacctgaggtcgggagttcaaaaccagcctgaccaacatggagaaaccctatctctactaaaaatagaaaattagctgggagtggtggcacatgtctgtaatcccagccactcgggaggctgaggcaggagaatcgctcgaacctgggaagcagaggttgcggtgagctgatattggcccattgcactccagcctcagcaacaagggagaaactgtctcaaataaataaataaataaataaaataatgtagatcttgaaagggggttggtttatgctggtgtatgtactttccaaagttagtaaacttacacttaaggttatatattttggccaggcgcggtggctcacgcctgtaatcccagcactgggaggctgaggcaggcggatcacgaggtcaagacatggagactatcctggcgaacatggtgaaacccagtctctactaaaaatacaaaaattagccaggcgtggtggcctactaaaaatacaaaaattagccaggcgtggtggtctactaaaaatacaaaaattagccaggcattgtaatctgagctactcaggaggctgaggcaggacaattgcttgaaccccggaagcggaggttgcagtgagccgagatcttgccactgcactccagcctgggcgacagagtgagactctgtctaaaaaacaaacaaacaaaaaagtcatcaaaccagatgacacaaatcaaatgacatttcactttgttttggtccgttttgtttgttggagacaagagtgcagcggggccatctcggctcactgcaacgtccagctcctgggcccaagcgatcctcccacctcagcctctccagtaactgggataacaggtacgcaccaccaggcccgactaatcttttttggaattttttgtagagatggggtttcgctatgatgccctggctagtcttcaactcctggactcaagtgatctgcccacctcggccccctaaagtgctgggattacaggcctgagctgtgtaatttcatgccgcgtgacacagcccagtaaaaaggaagaaaccccgcgggtccaacgtctactcacacaggtggactgatggctgataaatcccagcaggagccaaaagagcagccacagcacccatctactcacacaggtggactgatggctgataaatcccagcaggagccaaaagaggagccaaaagagcagccaccgcacccgcatgtcctggtcctttcagggctccctgaggcagccaggacagaggtggaggtggcttagggcagggcggagggaaggggacggggaccggggccggatctgagttggggagggggaggggagggggaggggaaggggaaggggaggggaaggggagaagtaagggaagggaaaggaggagaagggggctgttggggaggaggaggaggagaagaaaggggtctgggaaaggatccggttcaaattaagttctcaagcgctggtggaaggtttagctacaggtcacggagaagatcagggaagcaacaggacaggcggggcaagggagcgtgaggcttaggagcaattaggagacaaaggttctgctttccaccaaaccttcttcggtctgggccctcccttagcaaccctggggctttagactctctctccaccaatccctgatgaccccggtggtgcctcacaatggacattccaagtagtgcccgcatcatcccaatgacccctcccccatctcagtcccccacgctcctcccaaggccaggtcctctctggaaccttcacaaacctgatttctggtcctccccaaccagctccctgtccctgcttctgggcgctccttccttcctgagctcccagggttcctcaaggtcacttttggcgacaaaacataaaaaacaaatgatggcaggatggcaggaagaacctcatacccaagcagagtgccaggttttacagcctccgctcagccattcatatcctaagcaacaaaacatcagcaggatgcggaaggtcccgatagtaaaccatctccatcacaaccatgtagccatccgtccatcaacctgtatctcaggaacaaatgtacatacattcattttaagcatgcatggtacatttacaaaaattaacctgacttattttgttccagcaaatctcaatatatttgagagcaatcaaatcacacagcatgtttctgatcataaaactgtgctagaagtcaatgattaaaagctaattcaaaattattatttgcttggaaattcaaagtgcccttataagacataaacataagaaagaatccaaaatgaaacaagattgcctttcaactcaatgatgagatcataacatggcaataaaatgtctccctctggcctgggaattcctctttgtggcacaaggttgcgtgatctcaaatcacccctaacccacctagacattttaacatccgaaaccgagtgatgatgtccttatctatattatcttactgcccgtgtgtgtggactttaaattctgaacccaaatgagggggagaaaaccaagctgactttcatgactggcctctcagggatgtccaaggaatctgtgcatttcaagaaacaaagctcatcagcttctctcctaaggtatttgcccacaatacccagagggcttggcagcatcatgtgtgatgggtggggagctccaagcaggtgggcaggacccaggggcctggtgaccaggacagacccccactgtccatcacctttcctggccctgtcctcagctaaacttcccacaggccttctgcccgatcacacagagtgtgcccaaactctctcaggcctctggcagctgaaaagcactgctttaaatccctttaccatttactatgacataaggttattgtaaacaggaaatattctattgatgctacaaatggaaagccaatgcctttaccataaatagaaaaacaaccctaagaagcaagcaaaacaaaagaaaacaggggctgggtgtggtggctcacacctgtaatcccaccactttgggaggccgaggtgggcggatcacaaggtcaggagttccagaccagcctggccaatatggtgaaaccctgtctctaataaaatacaaaaattagccgggtgtggtggtgggcacctgtagtcccacctacttgggaggctgaggcaggagaatagtttgaacccgggaggcagagtctgcagtgagccgagattgcaccactgcactccagcctaggcgacagagcgagactctgtctcaaaaacagcaacaactacaaacaaacaaaaaacagggttaacaaaagtatggaattcaattctttttatatgctgcagccatgttccagccctagatttggctgggcatggtggctcacgcctgtaatcccagcactttgggaggctgaggcaggcggatcacgaggttaggggttgacacgagcctggccaatatggtgaaaccccatctctactaagaatacaaaaattagctgggcatggtggcgcatacctgtagtcccagctactcagaggctgaggcagaggaattgcttgaacccgggagacggaggttgcagtgagccgagattgtgccattgcactccagcctgggggacagagtgaaactctgtctcaaaaaaaaataaaaaatatatatatatgtgtgtgtgtgtgtctgtgtgtgtgtgtgtgtgtgtgtgtgtatctctataaatctcaaaaataaaagatcatttttgagattatcattttaaaagacaagataatgttcaacttaatgaataatttaattattactactggactttttgtagactgcacagagcattcaaaacaaatgaaggagaataaaaaatatgtattacatgttgtaaaataaatgtgatgtggttaattcttttattcaaaattatagaacatatatatgtactgtagaatgtatttcttattatgagtcatgttaaaaagtagtttagaagctgttga

SEQ ID NO: 1243164 - DNA, 4001 bp, Homo sapiens; identical to SEQ ID NO: 1243158

SEQ ID NO: 1243165 - DNA, 4001 bp, Homo sapiens
tggttcacgcctgtaatcccaacactttgggaggccgaggcaggcggatcacctgaggtcgggagttcaaaaccagcctgaccaacatggagaaaccctatctctactaaaaatacaaaattagctgggagtggtggcacatgtctgtaatcccagccactcgggaggctgaggcaggagaatcgctcgaacctgggaagcagaggttgcggtgagctgatattgccccattgcactccagcctcagcaacaagggagaaactgtctcaaaaaaataaataaataaataaaataatgtagatcttgaaagggggttggtttatgctggtgtatgtactttccaaagttagtaaacttacacttaaggttatatattttggccaggcgcggtggctcacgcctgtaatcccagcactgggaggccgaggcaggcagatcacgaggtcaagacatggagactatcctggcgaacatggtgaaacccagtctctactaaaaatacaaaaagtagccaggcgtggtggtctactaaaaatacaaacattagccaggcgtggtaatctgagctactcaggaggctgaggcaggacaattgcttgaaccccggaagcggaggttgcagtgagccgagatcttgccactgcactccagcctgggcaacagagtgagactctgtctaaaaaacaaacaaacaaaaaaaagtcatcaaaccagatgacacaaatcaaatgacatttcactttgttttggtccgttttgtctgttggagacaagagtgcaacagcgccatctcggctcactgcaacgtccagctcctgggcccaagcgatcctcccacctcagcctctccagtaactgggataacaggtacgcaccaccaggcccgactaatcttttttggaattttttgtagagatggggtttcgctatgatgccctggctagtcttcaactcctggactcaagtgatctgcccacctcagccccctaaagtgctgggattacaggcctgagctgtgtaatttcatgccgcgtgacacagcccagtaaaaaggaagaaaccccgcgggtccagcgtctactcacacaggtggactgatggctgataaatcccagcaggagccaaaagagcagccacagcacccatctactcacacaggtggactgatggctgataaatcccagcaggagccaaaagaggagccaaaagagcagccaccgcacccgcatgtcctggtcctttcagggcgccctgaggcagccaggacagaggtggaggtggcttagggcaggggggagggaaggggacggggaccgggccggatctgagttggggagggggaggggagggggaggggagggggaggggaaggggggaagtaagggaagggaaaggaggagaagggggctgttggggaggaggaggaggagaagaagaaaggggtctgggaaaggatccggttcaaattaagttctcaagcgctggtggaaggtttagctacaggtcacggagaagatcagggaagcaacaggacaggcggggcaagggagcgtgaggcttaggagcaattagagggagacaaaggttctgctttccaccaaaccttcttcggtctgggccctcccttagcaaccctggggctttagactctctctccaccaatccctgatgaccccggtggtgcctcacaatggacattccaagtagcgcccgcatcatcccaatgacccctcccccatctcagtcccccacgctcctcccaaggccaggtcctctctggaaccttcacaaacctgacttctggtcctccccaaccagctccctgtccctgcttctgggcgctccttccttcctgagctcccagggttcctcaaggtcacttttggcgacaaaacataaaaaacaaatgatggcaggatggcaggaagaacctcatacccaagcagagtgccaggttgtacagcctccgctcagccattcatatcctaagcaacaaaacatcagcaggatgcggaaggtcccgatagtaaaccatctccatcacatccatgtagccatccgtccatcaacctgtatctcaggaacaaatgtacatacattcattttaagcatgcatggtacatttacaaaaattaacctgacttattttgttccagcaaatctcaatatatttgagagcaatcaaatcacacagcatgtttctgatcataaaactgtgctagaagtcaatgattaaaagctaattcaaaattattatttgcttggaaattcaaagtgcccttataagacataaacataagaaagaatccaaaatgaaacaagattgcctttcaactcaatgatgagatcataacatggcaataaaatgtctccctctggcctgggaattcctctttgtggcacaaggttgtgtgatctcaaatcacccctaacccacctagacattttaacatccgaaactgagtgatgatgtccttatctatgtcatcttactgcccgtgtgtgtggactttaaattctgaacccaaatgagggggagaaaaccaagctgactttcatgactgagctctcagggacgtccaaggaatctgtgcatttcaagaaacaaagttcatcagcttctctcctaaggtatttgcccacaatacccagagggcttggccgcatcatgtgtgatgggtggggagctccaagcaggcgggcaggacccaggggcctggtgaccaggacagacccccactgtccatcacctttcctggccctgtcctcagctaaacttcccacaggccttctgcccgatcacacagagtgtgcccaaactctctcaggcctctggcagctgaaaaccactgctttaaatccctttaccatttactatgacataaggttattgtaaacaggaaatattctattgatgctacaaatggaaagccaatgcctttaccataaatagaaaaacaaccctaagaaacaagcaaaacaaaaacaaaacaggggctgggggtggtggctcacgcctgtaatcccagcactttgggaggccgaggtgggcagatcacaaggtcaggagttccagaccagcctggccaatatggtgaaaccctgtctctaataaaatacaaaaattagccgggtgtggtggtgggcacctgtagtcccacctacttgggaggctgaggcaggagaacagtttgaacccgggaggcagagtctgcagtgagccgagattacaccactgcactccagcctagacgacagagcgagactctgtctcaaaaacagcaacaactacaaacaaacaaaaaacaggattaacaaaactatggaattcaattctatttatatgctgcagccatgttccagccctagatttggctgggcatggtggctcacgcctgtaatcccagcactttgggaggctgaggcaggcggatcacgaggttaggagttcgagaccagcctcaccaacatgctgaaaccccgtctctaccaaaaatacaaaaattagccaggcatggtggcacacgcctgtaatcccagctactcaggaggctgaggcaggacaatcccttgaacccgggaggcggaggttgcagtgagccgagatcgtaccattgcactccagcctgggtgacagaatggaatgagactctgtctcaaaaaaaaaaaaaaaaaaaaagaagccctagatttcggttgtgttggttgtaaaaggagagacccagtaagtgggggttgtgccgcagattgctacccacaatggacgggtcactgagcaggtccggccaactgggcgttccctcgctggagggccagcacaccagactgcaggtggcgcgggtcagcaaggtaccaggggatgtgtcacacacacagcccacccccgtccagtcacgcacggacaccctgggcttccgagcaaacctgctcccacgtggtgtgaccacatggagccacagacacccagcaaggacacgcagcccgcacacccccggtactcc

SEQ ID NO: 1243166 - DNA, 4001 bp, Homo sapiens
ggttcatgcctgtaatcccaacactttgggaggccgaggcaggcggatcacctgaggtcgggagttcaaaaccagcctgaccaacatggagaaaccctatctctactaaaaatacaaaattagctgggagtggtggcacatgtctgtaatcccagccactcgggaggctgaggcaggagaatcgctcgaacctgggaagcagaggttgcggtgagctgatattgccccattgcactccagcctcagcaacaagggagaaactgtctcaaaaaaataaataaataaataaaataatgtagatcttgaaagggggttggtttatgctggtgtatgtactttccaaagttagtaaacttacacttaaggttatatattttggccaggcgcggtggctcacgcctgtaatcccagcactgggaggccgaggcaggcagatcacgaggtcaagacatggagactatcctggcgaacatggtgaaacccagtctctactaaaaatacaaaaagtagccaggcgtggtggtctactaaaaatacaaacattagccaggcgtggtaatctgagctactcaggaggctgaggcaggacaattgcttgaaccccggaagcggaggttgcagtgagccgagatcttgccactgcactccagcctgggcaacagagtgagactctgtctaaaaaacaaacaaacaaaaaaaagtcatcaaaccagatgacacaaatcaaatgacatttcactttgttttggtccgttttgtctgttggagacaagagtgcaacagcgccatctcggctcactgcaacgtccagctcctgggcccaagcgatcctcccacctcagcctctccagtaactgggataacaggtacgcaccaccaggcccgactaatcttttttggaattttttgtagagatggggtttcgctatgatgccctggctagtcttcaactcctggactcaagtgatctgcccacctcagccccctaaagtgctgggattacaggcctgagctgtgtaatttcatgccgcgtgacacagcccagtaaaaaggaagaaaccccgcgggtccagcgtctactcacacaggtggactgatggctgataaatcccagcaggagccaaaagagcagccacagcacccatctactcacacaggtggactgatggctgataaatcccagcaggagccaaaagaggagccaaaagagcagccaccgcacccgcatgtcctggtcctttcagggcgccctgaggcagccaggacagaggtggaggtggcttagggcaggggggagggaaggggacggggaccgggccggatctgagttggggagggggaggggagggggaggggagggggaggggaaggggggaagtaagggaagggaaaggaggagaagggggctgttggggaggaggaggaggagaagaagaaaggggtctgggaaaggatccggttcaaattaagttctcaagcgctggtggaaggtttagctacaggtcacggagaagatcagggaagcaacaggacaggcggggcaagggagcgtgaggcttaggagcaattagagggagacaaaggttctgctttccaccaaaccttcttcggtctgggccctcccttagcaaccctggggctttagactctctctccaccaatccctgatgaccccggtggtgcctcacaatggacattccaagtagcgcccgcatcatcccaatgacccctcccccatctcagtcccccacgctcctcccaaggccaggtcctctctggaaccttcacaaacctgacttctggtcctccccaaccagctccctgtccctgcttctgggcgctccttccttcctgagctcccagggttcctcaaggtcacttttggcgacaaaacataaaaaacaaatgatggcaggatggcaggaagaacctcatacccaagcagagtgccaggttgtacagcctccgctcagccattcatatcctaagcaacaaaacatcagcaggatgcggaaggtcccgatagtaaaccatctccatcacatccatgtagccatccgtccatcaacctgtatctcaggaacaaatgtacatacattcattttaagcatgcatggtacatttacaaaaattaacctgacttattttgttccagcaaatctcaatatatttgagagcaatcaaatcacacagcatgtttctgatcataaaactgtgctagaagtcaatgattaaaagctaattcaaaattattatttgcttggaaattcaaagtgcccttataagacataaacataagaaagaatccaaaatgaaacaagattgcctttcaactcaatgatgagatcataacatggcaataaaatgtctccctctggcctgggaattcctctttgtggcacaaggttgtgtgatctcaaatcacccctaacccacctagacattttaacatccgaaactgagtgatgatgtccttatctatgtcatcttactgcccgtgtgtgtggactttaaattctgaacccaaatgagggggagaaaaccaagctgactttcatgactgagctctcagggacgtccaaggaatctgtgcatttcaagaaacaaagttcatcagcttctctcctaaggtatttgcccacaatacccagagggcttggccgcatcatgtgtgatgggtggggagctccaagcaggcgggcaggacccaggggcctggtgaccaggacagacccccactgtccatcacctttcctggccctgtcctcagctaaacttcccacaggccttctgcccgatcacacagagtgtgcccaaactctctcaggcctctggcagctgaaaaccactgctttaaatccctttaccatttactatgacataaggttattgtaaacaggaaatattctattgatgctacaaatggaaagccaatgcctttaccataaatagaaaaacaaccctaagaaacaagcaaaacaaaaacaaaacaggggctgggggtggtggctcacgcctgtaatcccagcactttgggaggccgaggtgggcagatcacaaggtcaggagttccagaccagcctggccaatatggtgaaaccctgtctctaataaaatacaaaaattagccgggtgtggtggtgggcacctgtagtcccacctacttgggaggctgaggcaggagaacagtttgaacccgggaggcagagtctgcagtgagccgagattacaccactgcactccagcctagacgacagagcgagactctgtctcaaaaacagcaacaactacaaacaaacaaaaaacaggattaacaaaactatggaattcaattctatttatatgctgcagccatgttccagccctagatttggctgggcatggtggctcacgcctgtaatcccagcactttgggaggctgaggcaggcggatcacgaggttaggagttcgagaccagcctcaccaacatgctgaaaccccgtctctaccaaaaatacaaaaattagccaggcatggtggcacacgcctgtaatcccagctactcaggaggctgaggcaggacaatcccttgaacccgggaggcggaggttgcagtgagccgagatcgtaccattgcactccagcctgggtgacagaatggaatgagactctgtctcaaaaaaaaaaaaaaaaaaaaagaagccctagatttcggttgtgttggttgtaaaaggagagacccagtaagtgggggttgtgccgcagattgctacccacaatggacgggtcactgagcaggtccggccaactgggcgttccctcgctggagggccagcacaccagactgcaggtggcgcgggtcagcaaggtaccaggggatgtgtcacacacacagcccacccccgtccagtcacgcacggacaccctgggcttccgagcaaacctgctcccacgtggtgtgaccacatggagccacagacacccagcaaggacacgcagcccgcacacccccggtactcca

SEQ ID NO: 1243167 - DNA, 4001 bp, Homo sapiens; identical to SEQ ID NO: 1243158

SEQ ID NO: 1243168 - DNA, 4001 bp, Homo sapiens; identical to SEQ ID NO: 1243165

SEQ ID NO: 1243169 - DNA, 4001 bp, Homo sapiens; identical to SEQ ID NO: 1243166

SEQ ID NO: 1243170 - DNA, 4001 bp, Homo sapiens
aggtttcagttccagctctgcctcttattgactgcaacctcaggcttaactttcagtctctgagcctcagtttcaactctgtaaaatgaggtggctataccatctcaggttgcagagagaattaaatgaaatataagtgcatgtagagcattgaacccagggcctggcacacacagtgagtacacaatgttagccaggtagcttcataatgcatactgattgtcaatattcagacaatgcagtaaagtgttaccaaaaataaaagtaaacttatttgcatatgtattctttcaatctttatttttaaacagggtaaaactatgcatattctttcatagccagtgtttttctcttcatagtatattgttaaaataattttacttggaccgggtgcagcggctcacacctatagtcccagcactttgggaggccgcggtgggcagatcacgaggtcaggagttgacacgagcctggccaatatggtgaaaccccatctctactaagaatacaaaaattagctgggcatggtggcacacacctgtagtcccagctactcagaggctgaggcagaggaattgcttgaacccgggagacagaggttgcagtgagccaagattgtgccattgcactccagcctgggggacagagtgaaactctgtctcaaaaaatatgtgtgtgtgtgtgtgtgtgtgtgtgtgtgtgtgtgtgtgtgtgtgtgtgtgtgtgtatctatataaatctcaaaaataaaagatcatttttgagattatcattttaaaagacaagataatgttcaacttaatgactaatttaattattactattggactttttgtagactgcacagagcattcaaaacaaatgaaggagaataaaaaatatgtattacatgttataaaataaatgtgatgtggttaactcttttattcaaagttatagaacatacatatgtactatagaatgtattattatgagtcatgttaaaaagtagtttagaagctgttgatttgaatttccttttcaaattttgcaggataattttttttttttttttttgacagagtctcgctctgtcgcacagtctggagtgcaatggcgtgatctcggcccactaaaacccccacctcctgaatctaagcaattctcctgtctcagcctcctgagtagctgggactacaggctcacaccaccatgcccggctaatttttgtatttttagtagggacgaggttttgccatattggtcaggctggtctcaaagtcctggcctccggtgatccaccagcctcagcctcccaaaatgctgggattagaggcatgagtcaccatgcccagcctaaacttggcaagctaataaatcacctttttaagtgtcgttgggcacttgtctggttgtttttctttaggttaccatgccagcaatgattccttttgagtttctgacagaagatagtggttttcatccaaataagtcaactactctaccccatccctaagccacttgtatggaaagaaaaagaggaagaagccagtactgtgactgcgtaagcttcccccagcatcaccggctatgagatgtgtggcagctgagacccgggaactgctcaagggcaccaggccccatctgtctgcactcactcaccttcctcaggtactcgcatgggcatgtcactgactttacatgctgctgcagctccttggtgagctggccctggtcatgggacaggaactgtggggtcaggacaatagagagcttcaccatttgcagaatgagaacaggggctcatgatgagtgccaacctattagataatttaaaaaaaaaagtgttgaatgagtggaaaaacaaggtgatgtttgagtctatagtggtcaagggcttcagaaaaggacagaaccaagttcaaattcctgtactttgaatttctacttcatgccatgcaaaattactttaccccttttaacctcagttttcttctgtgtgaaacaggaacaatagtttcattcgtcattcagtttctctcaagatttcacgagatcatacctataaaacatccaagtcatttaaatgtatcatcatttctgtcataattagtgggatccatttcactattattggatatacagttctgtgcctgaaacctacaaaaaaacaaaatgttaagtctaaaaagcattagtgatttctcatttttatattactaattataaccctatttaatcacacaaggccttgtccgcggcaggtgctcaataaacacttgtcgaatcaatgcatgtgggctccggagccacactgtttagattctattctgcctccaccacttatcagctgtgtgatctgggtaagataattcacctctttatgtctgcacttccctctccataaactatatataatgagaatccttagctcattcggttgtggtgaggggtgaatgatttggcacacaggaggggcttgttaaacattagctgtgatgatctccttccaaatcttcattttcagagccacagatgaggccatagtgcaaccaggtgaccttagagtgtaagtacacatgatcgccagctatgctctatctccaccataggtccaagactgggtagttctggcctggaggtttctgctgcatctgccttctcagtgttcacctaaggacttttgtattttcctcctcgcatccccacagatggggttcaggctgccggacacagctgggtgatgccagggcagtggtcacctgtgccagccccgtgaggtagctggaggatcattgttccttccttctcgggctctgggcagatgccagggctggggtgacccatgccctcaagtttcttgctttggtgggccacattttcccttggcaaagagggtaaaggtcacaggatgccggagagctgtgacttctctgtgccctgggcccaaactatgaagacctgacacactatgctaaaagtccaacgctgggtgctccccagagcttcttgcctcaccgcttctgctgagggaggaatgaatactatgtcctcccagagctttgggagcttgtagcaagcagcctccccagcgcaaaatctcttggaaacctctaactgtgtctgaaacattagtgcaaatgttgcatcctatttcccatatgtccgcatgttttagaaaaaaaccctcaatttcctaaatatgcaagaaaaatcggtattgtaggacaatgtgactttttaaaaaatgttatttaaaaatcttccccacctccttttctgccctccaagactgccaaatacttgttgaacatatattattaaatgcctactacatgccagccatgattcatggtcttggggacacagcagagaacgaactgacaggactcctctcttatgtaactcacattcttatatgataatgataagggttaacattaattaagctgtcactgcatgttagtcacggtgcagtcattcccacacattattacacttaaacctgctagcaagcttgcaaggtagttagttgtttttcctttaaaaactgagtctcggaatgatgaagcactctgtccaatgtcacacagctagtaagtgtggagaccttgcatccaatcaatgcccgtctcattctaaaggccatgttatgtgttctccagcccatggagaataattttaacacagtcaatgaaatttctacacaacaatgttcttgtctcaagtccaagaatgcctcctacacctcctataatactggctttctggtgagtaaagatgccattctcatgtgtaatcaggtggcaaatggagatatgaccaaagtaaccacctgcctacactcataaccctgtacacactcttcctgtgtcgattcaattcaagtaccccttttgatcacttagcaaatctgacctttaaaagggttagggtttttatatccatgtaagtttctgtattgctttggaagtctctggttaaattaatactcttttaatagtgacctgtgattctgtttt

SEQ ID NO: 1243171 - DNA, 4001 bp, Homo sapiens
aactttcagtctctgagcctcagtttcaactctgtaaaatgaggtggctataccatctcaggttgcagagagaattaaatgaaatataagtgcatgtagagcattgaacccagggcctggcacacacagtgagtacacaatgttagccaggtagcttcataatgcatactgattgtcaatattcagacaatgcagtaaagtgttaccaaaaataaaagtaaacttatttgcatatgtattctttcaatctttatttttaaacagggtaaaactatgcatattctttcatagccagtgtttttctcttcatagtatattgttaaaataattttacttggaccgggtgcagcggctcacacctatagtcccagcactttgggaggccgcggtgggcagatcacgaggtcaggagttgacacgagcctggccaatatggtgaaaccccatctctactaagaatacaaaaattagctgggcatggtggcacacacctgtagtcccagctactcagaggctgaggcagaggaattgcttgaacccgggagacagaggttgcagtgagccaagattgtgccattgcactccagcctgggggacagagtgaaactctgtctcaaaaaatatgtgtgtgtgtgtgtgtgtgtgtgtgtgtgtgtgtgtgtgtgtgtgtgtgtgtgtgtgtgtgtgtatctatataaatctcaaaaataaaagatcatttttgagattatcattttaaaagacaagataatgttcaacttaatgactaatttaattattactattggactttttgtagactgcacagagcattcaaaacaaatgaaggagaataaaaaatatgtattacatgttataaaataaatgtgatgtggttaactcttttattcaaagttatagaacatacatatgtactatagaatgtattattatgagtcatgttaaaaagtagtttagaagctgttgatttgaatttccttttcaaattttgcaggataattttttttttttttttttgacagagtctcgctctgtcgcacagtctggagtgcaatggcgtgatctcggcccactaaaacccccacctcctgaatctaagcaattctcctgtctcagcctcctgagtagctgggactacaggctcacaccaccatgcccggctaatttttgtatttttagtagggacgaggttttgccatattggtcaggctggtctcaaagtcctggcctccggtgatccaccagcctcagcctcccaaaatgctgggattagaggcatgagtcaccatgcccagcctaaacttggcaagataataaatcacctttttaagtgtcgttgggcacttgtctggttgtttttctttaggttaccatgccagcaatgattccttttgagtttctgacagaagatagtggttttcatccaaataagtcaactactctaccccatccctaagccacttgtatggaaagaaaaagaggaagaagccagtactgtgactgcgtaagcttcccccagcatcaccggctatgagatgtgtggcagctgagacccgggaactgctcaagggcaccaggccccatctgtctgcactcactcaccttcctcaggtactcgcatgggcatgtcactgactttacatgctgctgcagctccttggtgagctggccctggtcatgggacaggaactgtggggtcaggacaatagagagcttcaccatttgcagaatgagaacaggggctcatgatgagtgccaacctattagataatttaaaaaaaaaagtgttgaatgagtggaaaaacaaggtgatgtttgagtctatagtggtcaagggcttcagaaaaggacagaaccaagttcaaattcctgtactttgaatttctacttcatgccatgcaaaattactttaccccttttaacctcagttttcttctgtgtgaaacaggaacaatagtttcattcgtcattcagtttctctcaagatttcacgagatcatacctataaaacatccaagtcatttaaatgtatcatcatttctgtcataattagtgggatccatttcactattattggatatacagttctgtgcctgaaacctacaaaaaaacaaaatgttaagtctaaaaagcattagtgatttctcatttttatattactaattataaccctatttaatcacacaaggccttgtccgcggcaggtgctcaataaacacttgtcgaatcaatgcatgtgggctccggagccacactgtttagattctattctgcctccaccacttatcagctgtgtgatctgggtaagataattcacctctttatgtctgcacttccctctccataaactatatataatgagaatccttagctcattcggttgtggtgaggggtgaatgatttggcacacaggaggggcttgttaaacattagctgtgatgatctccttccaaatcttcattttcagagccacagatgaggccatagtgcaaccaggtgaccttagagtgtaagtacacatgatcgccagctatgctctatctccaccataggtccaagactgggtagttctggcctggaggtttctgctgcatctgccttctcagtgttcacctaaggacttttgtattttcctcctcgcatccccacagatggggttcaggctgccggacacagctgggtgatgccagggcagtggtcacctgtgccagccccgtgaggtagctggaggatcattgttccttccttctcgggctctgggcagatgccagggctggggtgacccatgccctcaagtttcttgctttggtgggccacattttcccttggcaaagagggtaaaggtcacaggatgccggagagctgtgacttctctgtgccctgggcccaaactatgaagacctgacacactatgctaaaagtccaacgctgggtgctccccagagcttcttgcctcaccgcttctgctgagggaggaatgaatactatgtcctcccagagctttgggagcttgtagcaagcagcctccccagcgcaaaatctcttggaaacctctaactgtgtctgaaacattagtgcaaatgttgcatcctatttcccatatgtccgcatgttttagaaaaaaaccctcaatttcctaaatatgcaagaaaaatcggtattgtaggacaatgtgactttttaaaaaatgttatttaaaaatcttccccacctccttttctgccctccaagactgccaaatacttgttgaacatatattattaaatgcctactacatgccagccatgattcatggtcttggggacacagcagagaacgaactgacaggactcctctcttatgtaactcacattcttatatgataatgataagggttaacattaattaagctgtcactgcatgttagtcacggtgcagtcattcccacacattattacacttaaacctgctagcaagcttgcaaggtagttagttgtttttcctttaaaaactgagtctcggaatgatgaagcactctgtccaatgtcacacagctagtaagtgtggagaccttgcatccaatcaatgcccgtctcattctaaaggccatgttatgtgttctccagcccatggagaataattttaacacagtcaatgaaatttctacacaacaatgttcttgtctcaagtccaagaatgcctcctacacctcctataatactggctttctggtgagtaaagatgccattctcatgtgtaatcaggtggcaaatggagatatgaccaaagtaaccacctgcctacactcataaccctgtacacactcttcctgtgtcgattcaattcaagtaccccttttgatcacttagcaaatctgacctttaaaagggttagggtttttatatccatgtaagtttctgtattgctttggaagtctctggttaaattaatactcttttaatagtgacctgtgattctgttttgatcaagtgttttcaaacttgacatctttgatgggtttc

SEQ ID NO: 1243172 - DNA, 4001 bp, Homo sapiens
agggcacaggagagccatggaggatgtgcagcatgggcaggaaaagagccttcagtggtgtacatttccatcgtttggggctgtttcttacctacagtgatacctagcccatcctagcaggcatgcaccatctaccccacactctgtgatgcagactagcctgccgtcagaacaggaactggtggtcagacacacgtaggtttcagttccagctctgcctcttattgactgtaacctcaggcttaactttcagtctctgagcctcagtttcaactctgtaaaatgaggtggctataccatctcaggttgcagagagaattaaatgaaatataagtgcatgtagagcattgaacccagggcctggcacacacagtcagtactcaatgttagccatgtagcttcatgatgcatactgattgtcaatattcagacaatccagtaaagtattaccaaaaataaaagtaaacttatttgcatatgtattctttcaatctttatttttaaacagggtaaaactatgcatattctttcatagccagtgtttttctcttcatagtatattgttaaaataattttatcttggaccgggtgcagtggctcacacctatagtcccagcactttgggaggccacggtgggcagattacgaggtcaggagttgacacgagcctggccaatatggtgaaaccccatctctactaagaatacaaaaattagctgggcatgatggtgcacacctgtagtcccagctactcagaggctgaggcagaggaattgcttgaacccgggagacagaggttgcagtgagccaaggttgtgccactgcactccagcctgggcgacagagtgaaactctgtctctctctctatatgtgtgtgtgtgtgtgtgtgtgtgtgtgtgtgtgtgtgtatgtgtgtgtgtgtgtgtatctatataaatctcaaaaataaaagatcatttttgagattatcattttaaaagacaagataatgttcaacttaatgactaatttaattattactattggactttttgtagactgcacagagcattcaaaacaaatgaaggagaataaaaaatatgtattacatgttgtaaaataaatgtgatgtggttaattcttttattcaaaattatagaacatatatatgtactatagaatgtatttcttattatgagtcatgttaaaaagtagtttagaagctgttgatttgaatttccttttcaaattttgcaggataatttttttttttttttgacagagtctcgctctgtcgcacagtctggagtgcaatggcatgatctcggcccactaaaacctccacctcctgaatctaagcaattctcctgtctcagcctcctgagtagctgggactacaggctcacaccaccatgcccggctaatttttgtatttttagtagggacgaggttttgccatattggtcaggctggtcttgaagtcctggcctcaggtgatccaccagcctcagcctcccaaaatgctgggattacaggcatgagtcaccatgcccagcctaaacttggcaagataataaataacctttttaagtgttgttgggcacttgtctggttgtttttctttaggttaccatgccagcaatgattccttttgagtttctgacagaagatagtggttttcatccaaataagtcaactactctaccccatccctaagccacttgtatggaaagaaaaagaggaagaagccagtactgtgactgcgtaagcttcccccagcatcacccgctatgagatgtgtggcagctgagacccgggaactgctcaagggcaccaggccccatctgtctgcactcactcaccttcctcaggtactcgcatgggcatgtcactgactttacatgctgctgcagctccttggtgagctggctctggtcatgcgacaggaactgtggggtcaggacaatagagagcttcaccatttgcagaatgagaacaggggctcatcatgagtgccaacctattagataatttaaaaaaatagtgttgaatgagtggaaaaacaaggtgatgtttgagtctatagtggtcaagggcttcagaaaaggacagaaccaagttcaaattcctgtactttgaatttctacttcatgccatgcaaaattactttaccccttttaacctcagttttcttctgtgtgaaacaggaacaatagtttcattcgtcattcagtttctctcaaggtttcacgagatcatacctataaaacatccaagtcatttaaatgtatcatcatttctgtcataattagtgggatccatttcactattattggatatacagttctgtgcctgaaacctacaaaaaaagaaaatgttaagtctaaaaagcattagtgatttctcatttttatattactaattataaccctatttaatcacacaaggccttgtccgtggcaggtgctcaataaacacttgtcgaatcaatgcatgtgggctccggagccacactgtttagattctattctgcctccaccacttatcagctgtgtgatctgggtaagacaattcacctctttatgtctgcacttccctctccataaactatatataatgagaatccttagctcattcggttgtggtgaggggtgaatgatttggcacacaatcccagctactcgggaggctgaggcatgagaattgcttgaacctgggaggcagaggttgcagtgagccaaaattgtgccactgcactccagcctgggcgacagactgagactgtgtctcagaaataaaaataaaaataaacaaaaatcaatgaactaaaaaccaatttctagtggtttctaataaggaaaaaatggttcaaaaaactgctaagcgagatcaagcaaaacaaaaaaatctattacgataatgtttttataactggtatttaaaacattgttgattcattctttatttttattttgagacagagtctcactctgtcacccaggctggagtgcagtggcaggatctccgctcagttcaagcaattctcctgcctcaccctcccgagtagctgggattacaggcgcccgccaccacgcccagctagtttttgtatttgtagcagagaccggggtttcaccatgttggccaggctggtctccaactctcgatttcaggtgatcaccccctgcctgggcctcccaaagtgctgggattacaggcttgagccgccgcgcccggcccttgttttgttttctagattgaagaaaggtttttctcagaagttatctagaatttacaccgatttggtaaagcacacttttgtgaacaaaggtgggtggaagcgtttgtttttcctccctatctgatccttctaaagtttggaaactattcataaatattcttattttcatgtacatatgttctctttataagcaggctacaatcagaaagattggttatattatcaaggctttgactgaaacatcctatttaagaatatgcagaaaattcctggcttcgagtttgcagccttacgttacagtcagggggaaactgtcactccctgcaggcctgagaaccttagagcttttcggggagcaacttggcaagggggggtcccagcagctgctcgcgggccaggaaccatggggcacagccccgggcgaccctcgggccggcgggggccttccgcttcctggcgtctttcttccccgccccgccggctgctggggaagcggcgggcgcccagtgcctggaggtcgctccctcgcctcctctggctgcgggaacggagaggcggcggcggccggagcagggtgggcggcctgagccgagagcccggccggcccccgcgaggaatatggcgacctgcggcgaccggagcagcagcggcgtcagttgctgcaccgccgacttcttggagcagcgaaagcgactcgcgagaagacgccgccaagtggaacccgggccctgcggccctgggagggggcagcagcgacacagccatgaagccccgggcgcg

SEQ ID NO: 1243173 - DNA, 4001 bp, Homo sapiens
aggagagccatggaggatgtgcagcatgggcaggaaaagagccttcagtggtgtacatttccatcgtttggggctgtttcttacctacagtgatacctagcccatcctagcaggcatgcaccatctaccccacactctgtgatgcagactagcctgccgtcagaacaggaactggtggtcagacacacgtaggtttcagttccagctctgcctcttattgactgtaacctcaggcttaactttcagtctctgagcctcagtttcaactctgtaaaatgaggtggctataccatctcaggttgcagagagaattaaatgaaatataagtgcatgtagagcattgaacccagggcctggcacacacagtcagtactcaatgttagccatgtagcttcatgatgcatactgattgtcaatattcagacaatccagtaaagtattaccaaaaataaaagtaaacttatttgcatatgtattctttcaatctttatttttaaacagggtaaaactatgcatattctttcatagccagtgtttttctcttcatagtatattgttaaaataattttatcttggaccgggtgcagcggctcacacctatagtcccagcactttgggaggccacggtgggcagattacgaggtcaggagttgacacgagcctggccaatatggtgaaaccccatctctactaagaatacaaaaattagctgggcatgatggtgcacacctgtagtcccagctactcagaggctgaggcagaggaattgcttgaacccgggagacagaggttgcagtgagccaaggttgtgccactgcactccagcctgggcgacagagtgaaactctgtctctctctctatatgtgtgtgtgtgtgtgtgtgtgtgtgtgtgtgtgtgtgtgtatgtatgtgtgtgtgtgtgtgtgtatctatataaatctcaaaaataaaagatcatttttgagattatcattttaaaagacaagataatgttcaacttaatgactaatttaattattaccattggactttttgtagactgcacagagcattcaaaacaaatgaaggagaataaaaaatatgtattacatgtagtaaaataaatgtgatgtggttaattcttttattcaaaattatagaacatatatatgtactatagaatgtatttcttattatgagtcatgttaaaaagtagtttagaagctgttgatttgaatttccttttcaaattttgcaggataatttttttttttttttgacagagtctcgctctgtcgcacagtctggagtgcaatggcatgatctcggcccactaaaacctccacctcctgaatctaagcaattctcctgtctcagcctcctgagtagctgggactacaggctcacaccaccatgcccggctaatttttgtatttttagtagggacgagattttgccatattggtcaggctggtcttgaagtcctggcctcaggtgatccaccagcctcagcctcccaaaatgctgggattacaggcatgagtcaccatgcccagcctaaacttggcaagataataaataaactttttaagtgtcgttgggcacttgtctggttgtttttctttaggttaccatgccagcaatgattccttttgagtttctgacagaagatagtggttttcatccaaataagtcaactactctaccccatccctaagccacttgtatggaaagaaaaagaggaagaagccagtactgtgactgcgtaagcttcccccagcatcacccgctatgagatgtgtggcagctgagacccgggaactgctcaagggcaccaggccccatctgtctgcactcactcaccttcctcaggtactcgcatgggcatgtcactgactttacatgctgctgcagctccttggtgaactggctctggtcatgcgacaggaactgtggggtcaggacaatagagagcttcaccatttgcagaatgagaacaggggctcatcatgagtgccaacctattagataatttaaaaaaaaagtgttgaatgagtggaaaaacaaggtgatgtttgagtctatagtggtcaagggcttcagaaaaggacagaaccaagttcaaattcctgtactttgaatttctacttcatgccatgcaaaattactttaccccttttaacctcagttttcttctgtgtgaaacaggaacaatagtttcattcgtcattcagtttctctcaaggtttcacgagatcatacctataaaacatccaagtcatttaaatgtatcatcatttctgtcataattagtgggatccatttcactattattggatatacagttctgtgcctgaaacctacaaaaaaagaaaatgttaagtctaaaaagcattagtgatttctcatttttatattactaattataaccctatttaatcacacaaggccttgtccgtggcaggtgctcaataaacacttgtcgaatcaatgcatgtgggctccggagccacactgtttagattctattctgcctccaccacttatcagctgtgtgatctgggtaagacaattcacctctttatgtctgcacttccctctccataaactatatataatgagaatccttagctcattcggttgtggtgaggggtgaatgatttggcacacaatcccagctactcgggaggctgaggcatgagaattgcttgaacctgggaggcagaggttgcagtgagccaaaattgtgccactgcactccagcctgggcgacagactgagactgtgtctcagaaataaaaataaaaataaacaaaaatcaatgaactaaaaaccaatttctagtggtttctaataaggaaaaaatggttcaaaaaactgctaagcgagatcaagcaaaacaaaaaaatctattacgataatgtttttataactggtatttaaaacattgttgattcattctttatttttattttgagacagagtctcactctgtcacccaggctggagtgcagtggcaggatctccgctcagttcaagcaattctcctgcctcaccctcccgagtagctgggattacaggcgcccgccaccacgcccagctagtttttgtatttgtagcagagaccggggtttcaccatgttggccaggctggtctccaactctcgatttcaggtgatcaccccctgcctgggcctcccaaagtgctgggattacaggcttgagccgccgcgcccggcccttgttttgttttctagattgaagaaaggtttttctcagaagttatctagaatttacaccgatttggtaaagcacacttttgtgaacaaaggtgggtggaagcgtttgtttttcctccctatctgatccttctaaagtttggaaactattcataaatattcttattttcatgtacatatgttctctttataagcaggctacaatcagaaagattggttatattatcaaggctttgactgaaacatcctatttaagaatatgcagaaaattcctggcttcgagtttgcagccttacgttacagtcagggggaaactgtcactccctgcaggcctgagaaccttagagcttttcggggagcaacttggcaagggggggtcccagcagctgctcgcgggccaggaaccatggggcacagccccgggcgaccctcgggccggcgggggccttccgcttcctggcgtctttcttccccgccccgccggctgctggggaagcggcgggcgcccagtgcctggaggtcgctccctcgcctcctctggctgcgggaacggagaggcggcggcggccggagcagggtgggcggcctgagccgagagcccggccggcccccgcgaggaatatggcgacctgcggcgaccggagcagcagcggcgtcagttgctgcaccgccgacttcttggagcagcgaaagcgactcgcgagaagacgccgccaagtggaacccgggccctgcggccctgggagggggcagcagcgacacagccatgaagccccgggcgc

SEQ ID NO: 1243174 - DNA, 4001 bp, Homo sapiens
aaaagaaaaaagaaatacatacgcctgtattgacacagaaggtcctggaaagacacagaaaaatgggaacagtagttacccctatgatggaaactgagggctgggggccaatagtaggaaagaactttcttttcataatctaaactcctttgtatctttaaaactttctgccatatcaacaagtttaaaaataattttaaaacaaaatacaaaataaaaactgaacagtccgggtgcggtggctcacacctgtaatcccagtactttgggaggccgaggcaggtagatcatttgaggccaggagttcgagatcagcctggccaacatggcaaaaccccatctctactaaaaaaaaaaaaaaaaaaaaaaaaaattgcagggtgtggtgcacatgccctgtagccccagctacttgggaggctgaggcaggagaatcccttgagcccgggaggtggaggctgcagtgagccgagatcacgccactcaactccagcctgggcgacagagtgagactccgtctcaaaaaataaataaaataaaaacaaaaactgaacattcatgatgatgaaaaatcaaaagtaacctacatgccgtccacaggggaaggcagcagcctgcagccaagggtgaggttgatccctgcttgcaaaggcagacggagctccaaggccgactatgggaaaagggcgccacagaacaattcgtgcgatgaaaaacctcacgcgacgttcccttttcctgtggatagatctgcatctatgcacagggcagacaactcccaacacggccaggggtgatccctgtgcttgctagaactgggggtggcaaagacaacttcagatgttcacgtaacttttttttttttttttgagacggagtcttgctctgttgcccaggctggaatccagtggcgcgatctcggttcactgaaacctccgcctcccgggttcaagcaattctcctgcctcagcctcccaagtagctaggattatgggcacgcaccaccacgctcggctaatttgtttttttttatttttattttttcagtagagacagagtttcaaccatgttggccaggctggtctcgaactcctgacctcaggtgatccacccgcctcggcctcccaaagtgctgggattaccgccaccggccttgttcgtgtaattttgtattttctcatgatgaatacatcccaaactcattttattttattttactttattttttaaaggctggagactgatgaaatgtcagcagtagttgctttggtgtggtgaacaatgcatgattttaattttttttttcctttttctacttttcaaatactctacaacgagcagatctcgaatgcccagcaaaagctaagctccgcgaggcggccctggaatgaggcgaccccggaatgaggcggcccccgcgagcgccaggcccccgcccagcgctcacttacttgtctgggacgccgggtgctcctggcttctctggaaggggtacctgaacagcagcttattgcccctgctccccgagctcaccagaatcacgctgatggggctggtgttgtcccgcatcccgccgtggggccggggccgggggcggagggggccagaggaggacggagccggaggcggagggggcctgaggaggacggagccggaggcggagggggcctgaggaggacgaggcggggacgcagggggcctgaggagggcaggggtggaggcggagggggcctgaggagggcaggggtggaggcggagggggcctgaggagggcaggggtggaggcggagggggcctgaggagggcaggggtggaggcggagggggcctgagtagggcaggggtggaggcggagggggcctgaggagggcaggggtggaggcggagggggcctgaggaggacaggggtggtggtggacgcggagcagcgccacagttaccaacccacgtgccacgctccgggctcgcgagacttcggcgacaccgtccggaggaggtgctaaggcggcggccgggagaacggcgcaggcgcaggcgcaggcgcaggcagcggaatgcgcaggcgcggggccttctggaagccaccgagttccgcggtgctgtctggagccgtacggttcgcgtttggggcacaggggcccctcttgctggtgcggatgggaaaggcgcggggtcgagtcagcgtccctctcgatgttggtttcttcgttttacaaataacacttgggcggggcgcggtggctcacgcctgtaatcccagcattttgggaggccgaggcgggcggatcacgaggtcaggagatcgagaccatcctagctaacatagtgaaaccccatctctactaaaaattagaagaaattatccgggcgtggtggcaggcgcccgtaatcctagaggagaatcgcttgaacccgggaggcggaggttgcattgagccaagatcacgccattgcactccaccctgggcgacagagcgacgagaccccgtatcaaaaaaaaaaaaaagaaagaaagaaagaaaaaagaaaaaaaaaaggccgggcgcggtggctcacgcctgtaatcccagcactttgggaggccgaggcgggtgaatcacgaggtcaggagttcgagaccatcctggccaacatggtgaaaccccgtctctacaaaaaaaaaaaaaaaaattagccgggcgtggtggcgggcgcctgtaatcccagctactcgggaggctgagacaggaaaatcgcttgaacccgggaggcggagcttgcggtgagccgagattgcgccactgcactacagcctaggcgacagagcgagactccgtctcaaaaaaaaaaaaaaaaaaaaaaaacacttggaagccgacaggagatctttgagaccttgggcgaggcagtgacactaaaggcaggagcgactacagaagaataaattaaacttcatcagattaaaaactttactgcggccgggcgcggtggctcacgcctgaaatcccagcactttgggaggccgaggtgggcagatcatgagatcaggagatctagaccatcctggccaacatggtaaaaccccgtctctctactaaaaatacaaaaattagctgggtttggcggcgcctgcttctaatcccagctactcgggaggctgaggcaggagaatcgcttgaagccgggaggcggaggttgcagtgagccgagatcgtgccactgaactctggcctggcgacagagcgagactccatctcaaaacaaaacaaaaacttcggtgctttaaaggacaccatcaagaaaattaaaagtccacccacagaacgggagaaaatatttgtaagttacatatctgataagggaattgtatctagaatggaggaaacttacaactcaacaataaaaagacaattgaaaaatgcacaaaggatatgaatatttttccagtgcattatgcaaatggccaataagcaccagaagatgctcagctcaactggtagaggcttacgcctgtgaccccagcgctgagaggccaggaactccagaccagcctgggcaaaacagaaattaaaaatgctcaacattattaggcattagggagatgcaaatcaaaactacaaatagatgccacatcacacctcctacgatggctgtaatcaaaaagacaagcgtcagcaggggtgtggagaaacgggaatctctctcctgctggtgggaatgtaagaggctacactcgctatggaaaacaggctggcagttcctgaaaggttagagttaacacaacactcggcaaatcccccttttagatatatagccaagagaaatgaaagcatatgtccacacaaaaacatgtgtgttcttagtaatattattcataatagcccaaagtggaagcaatcctagggtatatcaattgatgaatgggtgaatatggtatagtttgtttaagggaatactattcagccataaaaaggaatgaagtacggcacatgaatccatcttgaagacacactaatatatgat

SEQ ID NO: 1243175 - DNA, 4001 bp, Homo sapiens
caactaaaaatacaaaaaattagctgggcgaggtgacgggcgcctgtagtcccagctactcgggaggctgaggcaggagaatggcgtgaaaccgggaggcggagctttcagtgagccgagattgcgccactgcactccagcctgggcgacatagccagactccgtctcaaaaaaaaaaaaaaaggcagaggagcagccaggggcagtggctcatgcctgtaatcccagcactttgggagggaggctgaggtgggcggatcacctgaggtcaggagttcaagaccagcacgtccaacatggtgaaaccctgtctctacaaaaatacaaaaattagctgggcatcatggtgggtgcctgtaatcccagctactcaggaggctgaggcgggagaatcgcttgaacctgggaagtggaggttgcagtaacccgagatcgcgccattgcactccagcctggacaacaaagagagactgcatctcaaaaaaaaaaaaaaaaaaaagcaagaagcaaggtggggctcaggtggaggggcccctcctcccggggcatgacccagaagaaggggaccaggggttcttaatcaatctgcggaagcctttggctaagggagggagggggtgccgggagatccaggtttgaaatgaatgctgagtgcccggcgcttcccctggtcggcgagggaggggcccctgacatttgccagggcgtgggcgcgcctgtctgcgccctgagctagacggcaaagtacacaagcagacgaaggggtcgcatgcgggggcgcaggagtcaggcggattttattgaccggacggcaggcggggtctatgagcggctcctggaagcgcgcggccactcctcctgggtcaggcgcggaggcgccacgggcgggcgggggacgctgtcagaacggtccgggggccaggcagggcaggccaaggcggtttgctgcggggtccaccgctgggcgggagacgtctctccgaagtctctaacgagaacacagcaaggccgtggggaggaggctgtggccctccaaccaccgcccccgggtgccagggtcgagcctgcccagggaaagctcttctgggcgcggagcagggaatggaagggcccgagggtgccccctgaacgcgcggctccgtgctccggctcagacctcccgagacccccttgcccgcggcggtccaggcctctcccctctcacgtacctggccagctccgctgaagtccagggactccggttccagcgcaggctctggggcgcgcgggctccggggcgcacggacggggatccctgcctgggagctcctgcgtcgcgtctcccacagctcctgaacccacgagggcagcaggagaggagcctcgcgggctgcgggttcgggggagagggtgtccctggccaggggcccggcggccgcgcgcagcgcgcggcgccacagatagggtgagcgacgcagccccatgagcaggccagcggcgcggcccaccgtgtggtagcggggactcgccacgtgcttgtaccacgcgccggagggcagcggcagcaggagcagaagcagcagcagtgccagccgcggccggctcgcgggagccccccgctcccctgggcgccacgccagggcgctcgcgtcgacggccgcccggcggggcgggccacgaaccggctcggctgggtttgggcgcgcagtggagttgggacgcccaggtaccggagcgcaggaggctggaggcgagccgtgggtcccctgcaggcccagctataaccgctcggtggccccgcctcgttccgccccctcagtaccgctgggctccccagatggggggagggacggagggaggagagggaaccctggcagctggcgggggacgtgggtacttgagcacctcactgagtgggccgctggctggaactgggctcgaggctcctctgaggggacacgtcccattctctgcctgctcagcctcctccctctaggagtggaagtgccagggagtgggtactgggaacactgatgagggagtagggctgagggatgcccctttagccagactcctgccggtgggacgacagcagagcgaaggcccaggtgcaggcagagctacagtggctattgcaggagggctgtcgggggccttcagcaccattcaagacccctctgggtgagtccccccaagagttgtcccttgtccttgcctagcatagctcccaaagctgtccccacaccctgtcctgtccactgccacccccagcttctccccaccaacccatctccccgcagaagccttagaagcctcatgttggcaacaccaagccatccgtggggtctgcagttctgtgaggcttccaggagaaaaagtcagcccctcctggaacctctacccctggaggggcaggacaaggccttgcagacctccagcgcctcctctctggtgatggtcccccaagaccactttatccagccagtctcaatttttgcctaaaccaacagcctgtggctttgcctgcctctgtgcgtctgtgcctaacacctactcatccttcaagactccacttaaatggcccagatccttggccgggcgcggtggctcacacctgtaatcccagcactttgggaggccgaggcgggcggatcacctaaggtcatgaattcaagaccagcctggccaacgtggtgaaaccccatctctacgaaaaacacaaaaaattagctgggtatggtggcaggcacctgtaatcccagctacttgagaagctaaggcaggagaatcgcttgaacccgggaggcggaggttgcagcgagccaagattgcatcattgcactccagcctgggcaacaagagcgaaactgcatctttttttttttttttgagacggattctggctctgttgcccaggctggagtgcagtggcgcgatctcggctcactgcaagctccgcctcctaggttcacgccattttcctgcctcagcctcccgagtagctgagactacaggtgcccgccactacgcccggctaattttttgtatttttagtagagacggggtttcaccacgttagccaggatggtcttgatctcctgaccttgtgacttgtgatccgcccgcctcggcctcccaaagtgctgggattataggcgtgagccactgtgcccggccgaaactgcatcttaaaaaaaaaaaaaggcgcagggccagacagtccctcagaatttccctctgtggccatctgggcttaacaaccccctcccagagggcagagcctgacacagtctttcctgacctcccagcaagggtgaatccagccctccctcagcaaccatgtcagtcatggggcagcccctgggtcccagacaccagggatctcgttttgggtcatcatgaactatctcatcttgacctccagacaatgtcatgagtggaactattattgactccactcaccaacgagtaaactgaggcccagggagaactgacctgccccagatcatgttgggtaaatggtggaggtgagatacatcctagcacctgagcccaagagcctcagcttgggggaacagggtactcctgtccagaagggcacagaaaggctgggggcaggctgggcacagtggctcatgcctgtaatcccagcacttcaggaggctgaggcaggtggattacttgaggccaggagttcaagaccagcctggccaacatggcaaaaccccatctctattaaaaatacaaaacttgccaggcacagtggctcatgcctgtaatctcagcactttgggaggtcgaggcaggcatgtcacgaggtcaagaatttcagaccaacctgaccaacatagtgaaatcccatctctactaaaaatacaaaaattagccgggtgtggtggcatgcgcctgtagtcccagctactcaggaggctgaggcgggagaattgcttggtcctcggaggcggaggttgcagtgagccaagactgtgccattgcactccagcctgggtgacagagtgaga

SEQ ID NO: 1243176 - DNA, 4001 bp, Homo sapiens
gtcaaggctgaagtgagccctgatcatgccactgcactccagcctgggcaacaaagcaagaccctgtctcaaaaagaaaaaaagaagtatgataaagataagcctttgtatcagtttcatgcattctccttctgccttctcttctcacttgagtgctccagggaacatgagtgcaaatcagatgcatctattagttgcaaacaaaaaacctggatgctttagttaacctcaagatttggttagctgggtacagctaaaactaattatacaagatccaagtcttcccttttcacctcattaccaccgcccttttttgtgtttaagctacacgtaaatacagaacattctgtaagattgaaaagtcaggaaatagttcctgccctagtattggaggagagggtgccagtgcctcgacgctgaagaatgaaatacaagggaaacagcaaccaccgtgtatgcggcaagcctctcagctgtcagaatctattccctgctgtctctgccagtaactcatgctgggctaccaatccccagcttagtccctttctcagagatcctgataatttcagtttgtcaactgcaagggcagtctgttcctccactcactttgaccaagatgggcttctttgtgtacaggcgcatttttagaggcaggaccaggtccacagggaaggaaattacaaaacacaggattctgccccagatgaggcaacagctttctaaatcttagtactgtccaatctcagagtgagattatttgggaaacagctctcaatccctgcagttgtctcagctggttatttatgccttgggtggagctggggtgacctctgagttcccctagggtcgatggccgagtgggaaggctctatcactgaagtggacccaatactagaaacggatccagtacgatctgatcaggtttgcctaatccaagggcctcaatggaaaatgcctcccaaggccaggcacggtggctcacgtcagtaatctcagcacttggggaggctgaggtgggtggatcacctgaggtcaggagttcaagaccgcgctggccaacttggcgaaacccgtctgtactaaaaatataaaaattagccgcgcatgatggcgcactcctgtaatcccagctactcgggaggctgagatgggagaatcgcttgaacccgggaggcggaagtttcgctgagctgagatagcgccattgcactacagcctgggcgacaagagcaaaactccgtctcaaacaaaacaaaacaaaacaaaacaaaacaaaacctgtgcctggcagcctggagccggttctggtctccgtcaaaccaaaggcatcagtttcctccactcctgtccaccaatcgccagatattctcattttcttcagaagctcggaatccacatttttaagtgaaatcacccattttaatgttagcaacttatttcaaagtgttttagatactatagaccaaaagaggtatgggctgtgaccgtaagcctgatttggcctctgacggccagtttctgaccacagttttggagggaatttctgcttccaaggtcaagtttctcctaaatgcccactagagttcgtggggtggagtgaggaaggatccgcgacaccggatacaaacagaagctctccttctcccggagtccgatcaaggctcatcccaggtccctaatctcttccctttgtgggttttgagtcaaggaacaaaattcagggccaagcccctacaacctcctccacaggcaccagtgctcgagagacgaccgccaagcaccccgccctttgcagcactcaccgaccatggctctggtgcagtccggggcgctgattggctgggctcgtggttgccggggcgaccctggccggaactaggctctcggtgagctgggcggctccggctgcaaccttgtgggagtcgcgtgtgtagtgcacggtgcattctctcttatatatcctgtccggcccgtttgaggtggacagcctacaagggcgggacccaacgcctgaatcctggggtgctgggcggaggatgctgaggctgcagctccaggaagggagggagcctgggggatgaaggaggggcctctccactctcacccgccggagcaactggtggaagtcaagaaaagtctctcggggctgggggaggggattgtaggggtgtgtgtgacagaggcctcaaaaatctggctgggggtgctaaggcaagcccatctgcgcactgtgccctgaggtgcaagaggatgcagggtggaagtcgtcccaagagagtccagggatcaagtgggcatgcccttttagccttggcacgaaatggagcagaaaaagagccggatgcggattactgtggtgccctaggctcagattctgctgagtcactgtgactgcggatttggaaggctgagagtcctggggagacatgctccgtggagacgaatttgtttcttcctttgcaagattcagattctgcacttgggggcccatacaacacacttccctgggtgcatgccactgcaccacccctgctcctcaaggcaggtaatgggggaactaattggttttgtttcccatgagctaaggcaaggctggtgtggagatagcagttatagggaagcatattaaagaatagccaaaacgggaccaggcgcggtggctcacgcctgtaatcccagcaatatgggaggccgaggtgggtggatcacctgaggtcaggagttcgagaccagcctggccaacctggtgaagccccgtctgtactgaaaaattagctgggcgtgatggcgggcgcctgtaagtcccagctactcgggaggctgaggcaggagaatcgcttgaacccggaaggcggaggttgcagtgggtcgagatcgtgccactgcactcccgcctgggtgacgaagtgagactccgtctcaaaaaaaactctataaagtaaaagttactgtaaagaaggagatatactctcagtaggtgaaggaaaaagaactagagctttaaagtggtaattaaccatcagaagaatcacagatgggggaggtgaggatgacacagggcccttccgttgtccctccagtgcaaaagttaaggaggcaccagaaaactggtttccaactcccgacctcaggtgatcctaccgcctcggcctcccgaagtgctgggattacaggcatgagccaccgcgcccggccccatcgtgacatttttgcattcattttgatgcaacaagagaggactatattatttacacgtatttacaaattactttgggaggctgaggcaggaggatcacttgagcccaagagtttgagaaaagcctgagcaacaaagtgagaccccatctgacaaaatagtataaaaggacgttttaaaaaagggctaggtaggcagccctgtccaatagaactttccctatctgtgctgcccaagtaaggtagccacaagcttcaagtagctattgagcactggaaatgtggccagcagccaggcgtggtggcaggcgcctgtgtcccagctactcaggatctgaggcaaaaagatcgcttgagcccaggaattcaaggccgcagtggtggactcaataaaagaaaaaaaatggaaattaaaaaaaaaaaagtggccagtggactgaggaagtgaagttttaattgtaattaaattaattttttaaaaatttattttttgaggcggggtttcactgtgtcgcccaggctggagtgcagtggcaggatcttggctcactgcaatctccatctcctgggtttaagcaattcttgtgcctcagcttcctgagtagctaggactacgggcatgcaccaccacagtcagccactttttgtattattcgtagagatgagtttcaccatgttagccaggctggtctcaaactcctgacctcaggtgatctgcccacctcggcctcccaaagtgctaggattacaggcatgtgccactgcgcctggctttaattaaatttagatagccacatgtcactagt

SEQ ID NO: 1243177 - DNA, 4001 bp, Homo sapiens
ccagcctgggcaacaaagcaagaccctgtctcaaaaagaaaaaaagaagtatgataaagataagcctttgtatcagtttcatgcattctccttctgccttctcttctcacttgagtgctccagggaacatgagtgcaaatcagatgcatctattagttgcaaacaaaaaacctggatgctttagttaacctcaagatttggttagctgggtacagctaaaactaattatacaagatccaagtcttcccttttcacctcattaccaccgcccttttttgtgtttaagctacacgtaaatacagaacattctgtaagattgaaaagtcaggaaatagttcctgccctagtattggaggagagggtgccagtgcctcgacgctgaagaatgaaatacaagggaaacagcaaccaccgtgtatgcggcaagcctctcagctgtcagaatctattccctgctgtctctgccagtaactcatgctgggctaccaatccccagcttagtccctttctcagagatcctgataatttcagtttgtcaactgcaagggcagtctgttcctccactcactttgaccaagatgggcttctttgtgtacaggcgcatttttagaggcaggaccaggtccacagggaaggaaattacaaaacacaggattctgccccagatgaggcaacagctttctaaatcttagtactgtccaatctcagagtgagattatttgggaaacagctctcaatccctgcagttgtctcagctggttatttatgccttgggtggagctggggtgacctctgagttcccctagggtcgatggccgagtgggaaggctctatcactgaagtggacccaatactagaaacggatccagtacgatctgatcaggtttgcctaatccaagggcctcaatggaaaatgcctcccaaggccaggcacggtggctcacgtcagtaatctcagcacttggggaggctgaggtgggtggatcacctgaggtcaggagttcaagaccgcgctggccaacttggcgaaacccgtctgtactaaaaatataaaaattagccgcgcatgatggcgcactcctgtaatcccagctactcgggaggctgagatgggagaatcgcttgaacccgggaggcggaagtttcgctgagctgagatagcgccattgcactacagcctgggcgacaagagcaaaactccgtctcaaacaaaacaaaacaaaacaaaacaaaacaaaacctgtgcctggcagcctggagccggttctggtctccgtcaaaccaaaggcatcagtttcctccactcctgtccaccaatcgccagatattctcattttcttcagaagctcggaatccacatttttaagtgaaatcacccattttaatgttagcaacttatttcaaagtgttttagatactatagaccaaaagaggtatgggctgtgaccgtaagcctgatttggcctctgacggccagtttctgaccacagttttggagggaatttctgcttccaaggtcaagtttctcctaaatgcccactagagttcgtggggtggagtgaggaaggatccgcgacaccggatacaaacagaagctctccttctcccggagtccgatcaaggctcatcccaggtccctaatctcttccctttgtgggttttgagtcaaggaacaaaattcagggccaagcccctacaacctcctccacaggcaccagtgctcgagagacgaccgccaagcaccccgccctttgcagcactcaccgaccatggctctggtgcagtccggggcgctgattggctgggctcgtggttgccggggcgaccctggccggaactaggctctcggtgagctgggcggctccggctgcaaccttgtgggagtcgcgtgtgtagtgcacggtgcattctctcttatatatcctgtccggcccgtttgaggtggacagcctacaagggcgggacccaacgcctgaatcctggggtgctgggcggaggatgctgaggctgcagctccaggaagggagggagcctgggggatgaaggaggggcctctccactctcacccgccggagcaactggtggaagtcaagaaaagtctctcggggctgggggaggggattgtaggggtgtgtgtgacagaggcctcaaaaatctggctgggggtgctaaggcaagcccatctgcgcactgtgccctgaggtgcaagaggatgcagggtggaagtcgtcccaagagagtccagggatcaagtgggcatgcccttttagccttggcacgaaatggagcagaaaaagagccggatgcggattactgtggtgccctaggctcagattctgctgagtcactgtgactgcggatttggaaggctgagagtcctggggagacatgctccgtggagacgaatttgtttcttcctttgcaagattcagattctgcacttgggggcccatacaacacacttccctgggtgcatgccactgcaccacccctgctcctcaaggcaggtaatgggggaactaattggttttgtttcccatgagctaaggcaaggctggtgtggagatagcagttatagggaagcatattaaagaatagccaaaacgggaccaggcgcggtggctcacgcctgtaatcccagcaatatgggaggccgaggtgggtggatcacctgaggtcaggagttcgagaccagcctggccaacctggtgaagccccgtctgtactgaaaaattagctgggcgtgatggcgggcgcctgtaagtcccagctactcgggaggctgaggcaggagaatcgcttgaacccggaaggcggaggttgcagtgggtcgagatcgtgccactgcactcccgcctgggtgacgaagtgagactccgtctcaaaaaaaactctataaagtaaaagttactgtaaagaaggagatatactctcagtaggtgaaggaaaaagaactagagctttaaagtggtaattaaccatcagaagaatcacagatgggggaggtgaggatgacacagggcccttccgttgtccctccagtgcaaaagttaaggaggcaccagaaaactggtttccaactcccgacctcaggtgatcctaccgcctcggcctcccgaagtgctgggattacaggcatgagccaccgcgcccggccccatcgtgacatttttgcattcattttgatgcaacaagagaggactatattatttacacgtatttacaaattactttgggaggctgaggcaggaggatcacttgagcccaagagtttgagaaaagcctgagcaacaaagtgagaccccatctgacaaaatagtataaaaggacgttttaaaaaagggctaggtaggcagccctgtccaatagaactttccctatctgtgctgcccaagtaaggtagccacaagcttcaagtagctattgagcactggaaatgtggccagcagccaggcgtggtggcaggcgcctgtgtcccagctactcaggatctgaggcaaaaagatcgcttgagcccaggaattcaaggccgcagtggtggactcaataaaagaaaaaaaatggaaattaaaaaaaaaaaagtggccagtggactgaggaagtgaagttttaattgtaattaaattaattttttaaaaatttattttttgaggcggggtttcactgtgtcgcccaggctggagtgcagtggcaggatcttggctcactgcaatctccatctcctgggtttaagcaattcttgtgcctcagcttcctgagtagctaggactacgggcatgcaccaccacagtcagccactttttgtattattcgtagagatgagtttcaccatgttagccaggctggtctcaaactcctgacctcaggtgatctgcccacctcggcctcccaaagtgctaggattacaggcatgtgccactgcgcctggctttaattaaatttagatagccacatgtcactagtgtttggaaagacctgagctggttcagatcgaggccgca

SEQ ID NO: 1243178 - DNA, 4001 bp, Homo sapiens
ttctagaacaggcctccctcagatagaccagaaaaccagaggaagggactgagcacatagtctgtgctatgccttgaaggctgaggtgacaggcagagagaggaggaggtgaaatggtcaggagcccagaggctggggagggggtggagctgagatcaagggcacttcaccagctcacctggcccccaggggccaggatagaaggggtaggcagtgctaggagtgcagggctgagaccccaccctcccgatctcaacccgcacaggaaggtagaggaagactgtgcattctggcagatctccagtctccactggaggagctcttggggcctgcatgaaatggaaagctttgcgctgccactgggaaatgagtgtttgtaaggaggaagattgagggcccctgtggtggccctcagccccgcccattccatccaagcaaaggatcagtttctaggagtccctggccccagccgcaagcaaggccacagccaggagaaaggaaggagcttactacaaatataaatacctttaatgaaaagccctgctgcgctctgcagagcctggacaaccaccgccagagcagggctggaggtacgggcgctgctacccaacccaacaagctaggccagaggcctcaggaggtaggccagagccagagcagccgccagcagtgggggcgcaggggccatggggagtgcaggcgctgtagcccgcagcgtctcctggttggtttcggagcctgtgccgcgctcccgaacatgcaccggggcaccgcacagagtgtgcaagttattcggacggggggcctggcgagcttcttgctgtagtgattcccacactgcagctgcctcctccggacagcctgacaggacctgagaggcacaggcatggaagtcattccaagacctgttaagggagtgggattagggggattaggtgaggcaaggagactttagcttgggaaataaaaggttcagtccccaatggtggcacaggttgggccactgcctcacacccgccggtacctgcagatggtctccagctcgcctccgcggcccatgctgtcccccaagcggatgagacactcggcgaagccctggtatatggtgtcacatcggtttgggcccgctgcagctgctgccaggggaggtaaaaggactagaagtggggcgggggtggggtggggaaggaatggtagataggatgagccaggctcatcccccagcccccaggggcttgtttacctgggagcactctggggatgtgactcagcggaaaaagggtgccccagggaactaaagggcaagtctggggattacctacccaggcccccttcaaggtaggacccagactgggatttgtacaggggaagggggtgttgtgtaccccaggtcagctcttcctttgagcttctggggccgcaggtggggtgacaagggtccatgtaaaggagtcaggacagggtggaggggagggaggtccagaggccccggaccaggagcaggtgcatctctctgcggtttagacaagctttgcttggccctccgaactctctctaaagataaatatttttggagagacaaggcaggatgcagaggtattgggatccaggccagaccctcagagaggacttagggatcctacgactggtctataagtcctgccattggcatgtctccctttatcataagaggggatgcaaattttggagtccttctcccataactggggctgtttgtgcctctcactttctgtcctgaagtcaccagcacaccttcctggagcccttacaactcttctccaccctggcacccagcgttcccacacaccctatgcccagcctggcttggctgggcgagaagggggtgtggcccgggccccggatgcccgcactcaccgaggggcagcaacagcaacggcctcagggcatggggtggttgccggcagcagcagcggcggcggcagcagcgcatcatccctggctgagagcctagtgcaggagctagctgcttggagtgcagcccgtccgcccagcccccggagggagggacggtgattggatgggagctgggggtggggctccgaacccagccggcggctccgcctccaacacccagatgggaaaaggagcgaggagacctcagagagcagaaattcgcaggagcacaggctggtgctgggcaggcccctggaccctcactccatagaaggagggagaagggagatctgggaaggcagttggagcagatgagtgggtaacccggccccttggctgggttggcctcgacagagctccacgggcaagagatgggcagagaacgaacagacggcagttatgagagtcacaccaaagacaaaccaaaagcacacacatactccattttattccaaaagcatttaattgaatttctcaatgtttttcaaaaacaaaaagatccaaattagaggtaaaaaggaacatggaaaattccactcaagtggtgtcacgatctcagggtcatgctccaggcatggcagaacccaagcaggcgcaatacctgccctgggcccagctaaaccttctgactaccacacgctgtagaccacggccagtgctccctgctccctgacccccaaacaccccagagatgggggcctgagcaggtaaaggccagccgtgaccctgccccagcctaggcctgtctgctggccttcagtgccatcccacccctgggcaaggcaggcttagcagctaagggaggctgggggtcacgaggccatgcagcatgaggctgagacgccgagctgctttgccaagtgagttgtgtggctcagcctgcaggaactgaaaaagcttttggcgcacctgggccataacggagcccatgtggtcccgagtgatggggtcactgtggtccaggtgcatcacggcctcttccaggtagctggggatgggggggaaaggacaggctacaggtgggtgccagcagacgggagcgccccctggtggcaccgaggcccagagggaaccctctgggtgaaggcagaaaggactggtggagaaaattagggagaggattcaggcagaagtgggcgtcagcttcaaactgctccctcccactgccccactccccagctcatctccccatccctggctgtccccacttacctgagcttgaggtcagttcgagtgccaaggtcagatgccagctgctggatgagggaaaggagcacaggctgggagagcgggcagggtggctgcccaaaaacctgggctgggtccacagtttcacacacatacagcaccaggttcaggtcagcagctgtcagcgcctggaggagaaaaaagcagcagtgtttatagcaaatatcaggatggaatgtctgcttgtctgaactgtgtggcctgggggaggatgaccacagggtgggctagtgagagctccagagggactcagagagagcctgtagggctgtgtagttaccctaggggattgggaaatgggttcctgagaagggtagttgtaaagcaaggtgggctaggtgggaagaaaggggtccaggaagaggaagcagcagggacaatggcctggaggccaaagggaaccaagaacagtctgctggggccagaaggtgcaaaggtggtgggtggagtagaatgtatggtatgtgggccttgtcaagagacacgtgacccttagcagggcctaatgcctatcgtacctgctggaaggcctgattgaggtggccctgctgcagcagctgcaggatatgggcttgctgggcctggcagtcaaggtgggcagaggggacaggtgtgccagcagctgagcgcatggcctgcatgatgctggaggtgacggcggcctgctgctccttgagcgccacactcacctcacccttaacgatgcgctgtacctgtgctaaaatggactcctgcaggctgcaaagggaagtgagtgaggtgaagtggacagggagcctagtctggcctttctcaagcccaccaccttgcccagtact

SEQ ID NO: 1243179 - DNA, 4001 bp, Homo sapiens
cagattttttttctaagtatatgcctttttattcaagaacaaaaactccctaaattcaatgtttagaactgaattttttttaactaagcccagaaaactggggctcataaaataaggcataatgtgggcagcaaaagaaaaaaggagaaaaaaaatgggagaaaaattggttttaatcccatgtataatataggttggctggttttgtttttgttttagccaatttaaggcagaattatctctctgcaaccttgcagataaatcctagtgttttagccataagtttcaagagttcatatatacagataaaccaattaaaaaaaccttttcgaaggcttttgaagcattatataaatctttaaaattcctatcacccacattttaagaaatacatctatacgtttaaatttattattaaattaattaaatgcattaattaaatcaatttatttaaatttaataattttaaaatagaaatgtttgtggaataagtaaatctcagtcataccattcgtgcgggtgctaacacaattctagtgcttcacatgcccgacctcatttaacccaaaccagaacaaccttatgagcaaagggtcactgaccccatcttacagatgaggaaactgagactaagagggcacaaggtgacacacaagagttggtggcagagatagacgtgaccatacaacagcacagttcctgttttcaaggacactctctatccagcgagagtgagaaaagtgagtgaacagaacaactacaatccaggtccctcatctgcaaccctcaaatctaaaaaggtatgaatactagtggatgatcggatgcaggggaaaaaaaaaaaaaagtctgaataccaaaacttgtttaagttggaaaacttgacctgacttaaggtgaggctatttatggttatttatcccaacagtgtaaatatatgcatttttttttttgagacggagtttcgctcttgttgcccaagctggagtgaagtggcacgatcttgattcactgcaacctccgcctcccgggttcaagcgattctcctgcctcagccttccgtctcagcctcccgagtagctgggattacaggcacgcaccaccacgcccggctaattttttgtatttttagtagagacagggtttcaccatattagccaggctggtttcgaactccgaacctcaggtgatccgcccccctcagcttcccaaagtgctggaattatagccgtgggccaccgcgaccaggtcaatgtaatatatgcgtatcttcataactttagctgtggaaagggtcgtgtatttgattacaagccgctgctccagccccctctgagggtgaaacctaacatagaacatagggactttacctttccaaactccgagaactcctcgattttaaacgcatctggcctcggggctgtaacataagcggctgcggacttgtacaaagtaagaaactccgtacacaaaacagaggggagcacggagggcggcgggacaaagagggtggtcggcaaaggctgtattttccatagatgtaatcacagtttgaatcgaattttatattttgctttttcacctgttacaatgaaaagtatctttacctgttaaatcgtaattacgattaaaaatatttttcactaaatagtaagatttttagatgtctgcgtgtgtgttgcgggaggacatcccagtccgctgttttctgcggcccctgtctgggcctcagtttccccatcaagaagggggaaaccccaagaccccagtccccgagttccacagcccacggggaccgaccccggggccggaccccactgcctgtctcgcccaccccaccttccgtcctcccctcgccttccttgaagtccctcttctttcccctccaacccctagctccccacgttacccaccagggagcccaagcgcatcccaggccgcgctagcggatacggtcgcaaggtggactcttcttcctttgaggcggggcgaacgcgaacgcggcgttcccattggtggcctgcggcttattcgcccgtccgttgagtgacgcacttccggttctccgtttgcgccattgccctggtggttccgcctcgtgggttagatcccaaattacgcccgctctcgatccttaataatgggaaggggcttccacttgtcgccctccgcctcctgcacctcagtgacttccctgaccaaggaggaagaattggcgtgcagcctgggcttccctcaatggccaccattccgctggcacaatgtagtgccctgccccgggcctcagtttccccatctgtggaactgagtgtggcctcgacgtcaaaaatgtggactctggtccggtcgcggtggctcacgcctgtaagtaatcccagcactttgggagaccaaggcgggccgatcacttgaggtcaggagttcgagaccagcttggccaacatggtgaaacccccgtccctactaaaaatacaaaaagtagccgggcgtggtggtgtgtgcctgtaatcccagctacccgggaggctgaggcaggagaatcacttgaacccgagaggcagaggttgcagtgagccagatcgtaccacagcactcgagcctgggtgacagagctcaaaaaaaaagaaaagaaaaatgtggactctgtggtcatagagcctgatctagaatcctggctctgccacttactagttggcaggcgcttgggcaagtcactgagcctcagtttcctcttccattaaatgaggatattagttcttgcaaaatagtgttggtgagatttacaagagataataacacctatatcaggtgcttagcatggccattgaaaagtgtcacatgggagtgctgattatatgttaactgttatcttacctagggattgtgagaaagcaagtgaaattactcgtggaagtgaatggactgctttgagtcttcaaggcgttaattttccaaacgtttgaattctatccctggtctgagagctagggatgcagcctagcaagggaaacaggtaactaatatagaacagcagtacctgcaaatatctgtctctgtgaggatagatcaaatccaggcttggtcactcaccacccctgtgatcttggacaacctcttaacctctctgggcttcagtttcatctgctaagtgggaaagcagtggtgtgtggtgattaaaagcttcagctttggagctggatggtcaacatggaatcctgggccttaaactcagtgtctctgagacataggacaaagtacagtcagctgtccatgtttacaggttccccatctacggattgaagcaactgtgggtggttaatatttgtgggggaaaacagtaaaaaataacagttcaacaataaaaataatacagattccgaaagcaatacagcatagcaattacttatatagcatttacattgtattaagtattgtaagtaatttaaagatgattttcaatatactggaggatttgtgtaggttaaatgcaagtattctcgcattttgtaagcacccaatggttctccttgcctgcttcctagacagaaccaatttatcaagacaggggaattgcaatagagaaagtttaattcacacagagctggctgaacaggagaccacagttttattattactcaaatcagtctccctggaaattcagggttttcaaggataatttggtggctggaggtgctggggattagagagtgttgataggttggatcagagaggaaaggagtcaaagctgtcctcttgcactgagtcagatcctgggttaggaccataggaccagattagccagattacagggctgggtggcgtcagctggtgcattagaacacgggttctgcaaaatatctcaagcactgattttaggttttagaacagtgatgttactcccggaagcaatctggggagggtcagaatcttgtagcctccagcttgcgtgacctcctaaaccataatttctaatcttttagctaatttgttagtctacaaag

SEQ ID NO: 1243180 - DNA, 4001 bp, Homo sapiens
cggagaaactggccaggacacccacccactgggcccttcccctcctgcccgccgcgccccaggcggcttgcccagctgcgatgccctcacccttcttctccttttcaaatctctctcgtgcctgcatccttcttcacttacactgccgcaaatcaaagtgatcgcccccttccaaagttcctgtaacacaaactggtccccagtacacagcctttctaggacatgtcttcttaaataggccaaaaccttccttcgagagaagcagccccggtatgtcaccaaatctccctccacacttaagtgtgcagcccgggacacccatctaactttctatcacggacattttcaaacagacataaaagtagagcatcccctaaattcttcaggcggctgaaattatttttccttggtgagtcctactcttgacttcgctagctaacaggacagtaacacaacgcaaggataaagtgacacgccaccacgcctagctcggtgcatgttggctaacagacgatggtcggtcctgaaatgcaagctgagaatcacacagagctgtctgccttctccccgtcagtaagtccttgtcacccttcagaacacgttcaggggtcattttgtgacctcatttatgcagcaaatctttactgagcgccaattctatgccagggaccgtcctacactctgaggatacaaaagtgaggacactactcttatctgccttcaggaggcttacattctggcgacagaccaatagagaacaaacaagcaaacaaaataatcacaaactgtacagctgtgacagatgaaacctctaaatgccttccccaacccaacacacttggtcaggttcctgtgcttcccatctcagagtgaaaggggacgctttttctttatggtacttaacagtttatagtatctgagccttcttcatcagaaaccattctcccttctagactataaacactccgagggcagggacagtgatcagtacgttgcccaacagatattaggggctcgatatttgactctcaaatcaaggaactgattgattcccctttaacaggatctatggcaaataggacgtctgcccccgccgccacgccccgctctttttaaaacctgagaacccccttgccaacagtccctgcataagcgtggacaagagttcagagatctatttgagcacaaaagcagaaaaaacaaaaacaaaacccgtgcatcagggcgtggtcctatggcccagctgcggaaagcagggctctctctcccggctaaaaataactcggcgccctacgccccgggggtaggggagagagaggaggaaggactgggggtccccgccaagatcccccaggccaaacgctctccgaagcccaccctggaataacctcctgcttcacggggacgcaaggacgaagcaacgttcaccgcaggctgcgggtccccgaaggcgggcggccggatttgcctaaacggacccagccctatgggggctgcagccgccccgtcggggaatgggggtcccggcgtgtccccgagccgcagtgctgtgcgaccttgggcaagtcacctaacctctctgggcccccgtcccctcccttgtcagagagtggcctccggggcagcccgctgaagtctaaagaaggcaaaaactccccgacccctcaaggggaagacgcgagccgacggccggggctccggatgtgccaacagcgccaagtttcaagtctgtgtcgcgtgaggggggcgctagcccgccctgcagcttcccctcgggcccgccccgaagccccgcgccgcgccccactcacctccaaaggcgggtgggctcggacgaggtccccggctgactgcggcagccgcactcgccgcccctcgacgagcagcggcatcgcggaggcggccgcccaggcaggcccagggaggcggcggccccccgctttgcagccccgggccgcccgccgcccccgcccctcgggccgcgcgtcccgcctcgtcctgccccgccccaccgcgggcgctgccgggaagtggagtccaggcggaggcggtgccggccgaagagactggagaaatccaggacatggccgcaaggcctcacgggaaatgtagtccaaagccaggaagtggccctggaagcagcgcgcggcccgcctcctccgcaaggggcgctgggaagtgtagtcccaaaagcgtgggagtgaaggagcggggaaaggagagctgccagggagcagctgcaccagccaagagagcctccgggcgagttcctggggcgggttctggctccgactgctgcgctttaggtcattgctccacgcttcccaggtgtgtgaccttccacaagcttgagtttgggaccctgctgtgcagctccgtaggattgcattcaatgagtaataataaacctaatcaggcgggcacggtggctcacgcctgtaatcccagcactttggggggccgaggcaggaggatcgcttgaggccaggagttcgagaccagcctgggcaacatagtgagacccaccctcccccataccctcgtctctgccaaaaatttaaaaattaactgggcacggtggcatgcacctgtgatcccagccactctgtaggctgaggcgggaggatctcttgaccccaggagtgggaggctgcaatgagctatgtttgggcactgcagagggacactctgtttctgaaaataataaaaataaatgtaaacggtcttaaactgagaaaatagatcctgaactgtgctagccccacgtactaaagagatcatcgattaacacgtcgtgattggaatgcaataggccactcacaggtgggctgggaaccgtgggggaaggatttgcggatactgactgcagagcccctaatctgaggacaggtccccaaggtgagaggcgtctcaccgtggagctctcttctaaaacttggaaatattgctcaaattcatccaactctgcagcacattaacaaaaagtaattttacaaaagatacagaggagccacatgatacagcagaaactttattagaattttatcatctgtattcatcgtcttctttcataaatctccccctcagcttacacaccccgttcaacaaaaataccaggaaatttactaaagaaatgactgtagaagatggtgttcccatcgccaggttacccaacttctcacccaaaataactctatttctagctaccaggaaattatttctctgtattattacacctacatttctcatttgtccttacaaatgtaggagctactatcaacacctcatttgtcatttgtcctcacaaatgtaggagctactatcaacacctccgttataacagatacagtaacttgctcaaagtggtagaaataagtagtagaacgaagactgaacctagctttgcatgattccaaaggcagtgctctccatcactataagatgctcctagactgtactgtaaacaactcattctaatgcaggtgacattaagtaagtcccaactaggaagctcggagctaaaaacagggtttgaaaccagggtgatcaatgaccagcaggctggcctggagcaagttacttaacttccctgaactggttttgtagaatagcatgtttgtttcacctggtacatactaaacactaaagatagctattattggaattgcagagcaaagagtagtcaatcaaagtgaggcatttggaagtgcaaaggtgaagaacaaggttctgtgggttctgcctggggctggtgcagtttgcctaactggtttttcacttttgggtgatcttttttcaagtaatctcaggttatcaatctcctaggctgagtactgtgttaaaggactaaatgagccagataacaagcaggaaaccactcccctacctctcttcccacccagctccacaaattttggtctacaggcaatgaggaagcaatagcaggtgtgtggccagcactgcggctcatgcctgtaaccccagcactttgaaaggccgaa

SEQ ID NO: 1243181 - DNA, 4001 bp, Homo sapiens
ggaactcttccttcctgatatcacacaaagcccaggtcacgcctgcactgggcagaagttcgagcacgaggccctaaaccactggtgtcctgacctgctgagtggctacagtgatgcaggcgatgctctggggcaccgggtgtccatcctcccaaggtgctgtctgcaggggagggtgccagccaaaagccaccgggtagaaagaaaacaaggaccttgctaagatggggggtcatctgggcagatggggcccctgcctacctttgggggggcactggagtcatagcagtgctcagtccccagatggtccacaggtgcatcctttttgttcctcatggcacggatgttgaccagctgttgctgccagtcctggggctcccagactggcaccttgaggggctcagccccctcacctttctcactgtccgagccctcataggccacacgcagtctctgtgctttccgcggacgcttcacggggctgtggcttttcctcgcttctgcaaaaagcaccacgcagtccctctggtggggccacaggtgaaggtagggtaggggtgccatcccgcctgctagctcacccctcactcgttcatgccacaactgtccatcatctaatacacttggggtgctctgccctctgcagtctggggtatgtgggccctccttatgccagcgaccctgacaaggtccatgttagctcatgaggactctagcaacagcctgtaccaaggtgcccccaatacatcttctatactgcaccagagacagtctgctaacacccacatcaggttgtgtcactcccttttaaaaaatcctggccggccgggcgcggtggatcaagcctgtaatcccagcactttgggaggccgaggtgggtggatcacttgaggtcaggagttcaagaccagcctggccaatatggcaaaaccccatctctactaaaaatacaaaagttagccgggtgtggtggcaggggcctatagtctcagctacttgggaggctgaggcaggagaactgcttgaacctggggggcggaggttgcagtgagctgagatcacaacactccactacagcctgggtgacagagcaagacccgatctcaaaacaaacaacaaaacctcctaattgacttccgtttactgtcataataaactccaaactctatcctggcatcaaagctcctgccaccctggctggcatcaccacctgcctgctcccagctgcaccagttcctcctgacatagtctggactacccctggggtccctgggtgcctatgggaatccagctctggccaattctgcagaagtcccagcgggactagcgcagaggccctgtccgtgtccctcactgctcactgcagtgcttggcccccagcaggtcctcaacggctgcaggataaatataataagtgccatgccctttcctgttttccctcagaggcaccctcccccgagctgggggagcaggcttctggctgcgtgtgtccttggcacccagcctctccgaggacagcaagttcactgcaggagggcggggatgggacccacagagcctggagtggagagtcccggacagagtggtgggaaaggaagcgttttcttgcttggggcgaaagggggcagcggagcggagcgcccgaaacccagcccctgcggaccgcaatctttgggaaaaaggcgcaaggtgggaacgcagggccgcacgtgggaaccgttcgcggctgccgggtttgcagcccctgcccgcgcagctgggagccgcaggaggcggcccgggactccagcctgcagcccctatcccgcctcctcccacgctccagccacggcgcggcgctacctgctgcagcctctcttctccggagaggcccgggctcctccctacacccccgcggcccagccccgggtcccaggctccggctccgggtcagcatcctcgcgctcaaggcggtcatgccggactcctgcggactacacatcccggcggcccatgcggccccgtcacgtgatgcaaggatcgccggcctttccgccagagggcggcacagaactacaactcccagcaagctcccaaggcggccctccgcgcaatgccgctaccggaagtgcgggtcgcgcttccggcggcgtcccggggccaggggggtgcgcctttctccgcgtcggggcggcccggagcgcggtggcgcggcgcggggtaagtggcggtccccacggggcaagtggcggtccccacggggcagcggcctagagaggcggaccccgcagtgtccgggtcccgggccctcacccgcgcccactgcaacccgactccggagctccgagcatcccttagttttaagtcatggcgggtgcgaacgggtctctgctgcaggcggctccgtgacagctcctgcttcacatgggtagaggagagacggcaaacgtcggggctcccaggacttcgcggcggcagtcctaacccgtgcactgagtcgggcggggcgggcggcagcgtctgagtagagagctctctagaccaggcctggtgtctcccgggctttcctaggtgcctgtttgcgagctggtcagctgggctgtagttgagttctcccagggagtgtgggaggaaaggttatgcccaccagagacccagggtcctgacggctggaggtccgcagtggggaaggtgggcagaggtgttgctcagatgtccccattcctgtttcgtttgcacagaggggttttctggtgcgtcctggtccaccatggccaaaccaacaagcaaagattcaggcttgaaggagaagtttaagattctgttgggactgggaacaccgaggccaaatcccaggtctgcagagggtaaacagacggagtttatcatcaccgcggaaatactgagagtgagtgagctacctgtgtctttgctaggctagagggaaatgcagagaaggctgggtttggtcttgcaccaggttctgtgggagacgggttgctggcaactgtctacacaggaatgctgtctccagtacttggaggccgacatgtccttcctcaggagacttcgaaagtcaggatcttggtgacctggttcaggcacacttgagttactattcagatgttgatgaaagaaagcccatcttatagatgaggcctgagtatcatcatcttcacaggtaaggatatgtccaggtgttacatgataagatgtgagttcctgggagaagtaggttctttattttattttttttttgagactgagtcttgctctgttgcctaggctggagtgcagtggcacaatctctgctcgctgctacctctgcctcccagtttcaagtggttctcctgcctcagcctcctgagtagctgggactacagacacgtgccaccacacccatttaatttttgtatttttagtagagatggagtttcactatcttggccaggctggtcttgaactgctgacctcaggtgatctgcccgctttggcctcccaaagtgctgggattacaggcatgagccatcgcacatgggctaggtcgttatcttttatgtgtgtttgtgtctttgtcacacatgcctggcattgtgttttgcccatgagtaaatgctgaatttttgcacttgtaaagttttctacttagaaacaactaaaacgttcatcaactgatgaataaaatatagtccatcctggctgggtgcggtggctcacgcctgtcatcccagcactttgggaggccgaggcgggtggatcacctgaggtcaggagtttgagaccagcctggccaacatggcgaaaccccgtctctactaaaaataccaaaaattagccggtcatagtggtgggcgcctgtaattccagctactcggggggctgagacgagaattgcttgaacccgggaggcggaggtttcagtgagccgtgatcgcgccactgcactccatcctggggaagaagagcaaaactccgtctaaaaaaaaattgtgcagtttgaaattgtatttcatgttatgttt

SEQ ID NO: 1243182 - DNA, 4001 bp, Homo sapiens
gtccttcttgcagaacttctttaggctgatgcggtagctgccacgggcaggtttgcagtgcgagtcacagtctgggtagaaggtgggaggctggcacagactccctttccccaccctctcctcccagagccccctcccccaaagtcatgccagtctggggccctgtcctgtgtccactcaccctggggctgcacagggctgctgtcctcagtgggtccagggataggggtctctgcagagagggagggagaatggcctgcgatggaggggcagagagatctgcagggctcggggaatagacgggacaacagcagggagctggggtggccttggcttggtggctgaggcggggcagggtcactcactaacacagggcgccactggggagcggctttgctggaagccaggcgcgcagcggttgcaggtgaggccagtgacgccatccttgcagggacactggcctgtggtctggttgcaggtcttgccagcagcaccaaccgggtgacagtcgcaggctgaggacagaggtgggaagggcctggtcagaagcctgtctggggatctgggaagtcagagggtgagggcctgcaggtggccggtggtggctcacccctgcaagcccgacggtcactcagggcacggccagggtctcgatagaagccctcccggcagtagtggcagtggcggccggcggtgttgtgccggcagttgagacagacacccccgctgcggcggccggacagtcggtacagctccatgttgaagcggcagcggcgggcatggccgttgcaggagcaagctgcagggagggatgggtcaggggcaggctggttgtgtccaaggtccccaggccaccctccaaggcctcaccgaggcaggcgtgggattcccgggcagtggcccgctgccatggcctgtcgcagtagaagggcttgcagcggccgcagtcagggccctcggtgccatgccgacagtcgcagatcaggtggccctgtgtgtccagcaggcaccgtgaggcatgtccattgcacttgcagcgcccgcccacctggaggtcggtggctgcgtaggagtaagggacgacggcctccatgtccctggggtcacctgccgtgctaggccttgtgagcactacacggacgtcggtggcggtcacccagtcttggagcactgggctgctgtccaggtccaggcctggggggctgctgtcctgcatgctgaaggccagaaggccgctgccatcaggctgggccaggggtgcggggaagcacagggcctcaggccctgggccagctgggccattggcaggggcaggcagacggccatagtccaggtcacagtgggaggagaagaagcccagcggggcccagctgcggccatggtcctgagacttgagcagggccacggaggctgggggagctgagcagaagcgcaggctcacgaagaccagctcaaaagccttgcccaggggcaccgtgagagtcacgttgaggggcgcccgaggcagggactccgagcgccagcacagagggctggccgtgccccctggggaagtaaggagggcgggggagtgtgcccgtcgcgggtcggaggcgtcgcaggcccgagtggccggccgcccgcacgtgctggaagccagcacctcgcggcccagggcggcgttcaccagtcctggcacgcagccgcggggcgcacccccctcatcgtggcaggggtcggcgggcgccggcggcccaggactcagggcggcgaagagcgtgcctgccgtcagcagcagcccccagggccagccaggcatggccggagccgctgcgggtcagccagtggccgggccccaagacgctgcccttggggaaaagaagccctctccgcggctctgcccaccaggcccgcaatgccgaggaacagggcccccgggcggccccagcccggcccagaggtgggagcagcggcgggcacgccccgggcccagcacagcagcggggatgttggcgcgtcctcccgctgggcctagagcgatgacaggcgtcgcccccgctcccggtgcctccgcccgcggaggccccacccgccgctcgcactcacccaccgagggccgggcggagcaggtctcccggcctcccgggaagggccgtgggcgggcggggcctgcggtgcacgggccgccgcctcctcccggctgcagcgagggcggacgagctgtgccaggagggggtggggggcgcagcaggcgcaagcccgggcccagccgggggcggggctgctcgggtcgggaaggaggcaggggaggggagggggcctcatcgcagagctggaatcagaagcagattcagacgcgggctgggccagcggggaagggggctgggaggcccgggagccaggggaggggccggggagccaggaatgcgctggcgggaggggtctggaggggggcagctcagccttcgcagcccgtgggggaccacccagcagggtcctgggcccacagccaggtctttactgctcctggggctgtgccacgtgctggacgggggtctgggtcgcctcctccctgaagaccatcaggcaggcaaggccccgggtctgacagcagaggccctggatgttccccaggtagggaagccaagtaaccaccagttgaagggtcatccccaaagcagcatctactcgagtagaaggaacccaggattcggtcaggtctaattttgaatccaactgccccatttctggctgcatgtcttgggctcctgtttcctcacctgccagatgcctgttactcagcacgcgctctgaagctgttggatttgatgagtctcaagtggcatcaggcccaagtcgagagctgcacaaattggagtgtctcctgcccatgttgaggaaggggggcacccccatgggcctgagctgggctaagacatgaggccagcatcccctgcaccaggccagattctgatcccaaagctccctgggtctgcaagtttctaggggcacctctgccacgggcccagctggcagggaggacatggaagctggagggtgggatggggtggcttcttggggttcgggggcttggttagctgttgaggacccctctgcaggggcagggagtagggtttaatcatgggaaggggctggtcgcaacccggagcccactgccctacgtcacagcacgtttgggcagggaaactgaggcagaagcccagctgggtggcctggggactagctggggatggggtagctgtgcctgggagcgacaccaccaaagagggtccaggaacagctctggtcagagaaacctcctcccctccgactttcaggtccttgacagaggaggccaagcatcccagggaggggcagggaacaagttccgtgcagggccagcatcgaggcctgaatgccccgtttcagatgggaggccaggcctgcagctggtggaggaggccacgtgggtgctaccctggacacgaccagagatgagcaaggaccaggaggaagagaatggagaggtagacgcatcccgctgttggggagaggaggggcaggaggacacggaagcctcctaggggaaactgaaggaccagaggagggagcaggagggcctgaccatggaggggaggaacgggaagacagggtgatagggcacctggcttggctcctggagcaactgacactggctggtgggcaccttctccttgccacacatctgcatgtgacagccacagatgcacagggatgggggcaccggaggactgaacagagagggctaaggggctctctctctgccacagggcccctgcccctcagcttcctgataaagagaatgggaattgtgtcctttacaagttgagggacctcaacctgacggggctcacgctccgctctgtgggtcaagcttagaacctgaaacgtcccaaccaccctcttcaaggtccttctggctcccaacccccaccccccgacaccccaccctaagggtgggaggaaccctggggggactatgg

SEQ ID NO: 1243183 - DNA, 4001 bp, Homo sapiens
ttcttcctttattccctcttttgaatgtttactttattttctgaatagtgtagatatactgggcacgaattaaaacctcacaagaatgtaactacctgccacgaggcctactgcactttttcctgcatgctttttccccttttaatgaaatatataaacaccagccttctggaaccactccatcgagcacaggccacagatgtttctgtcacttgtattttccagggcacgccctcaagctctggcccaataaacctccactgaggctcagttcagtctctccattgcattgacagagataactatttttctcttcatttttttttttctttgagacagggtctcactctgtcacccaggctggagtgcagtggcacgatctcagctcactgcaacctccacctcccgggttcaagtgatcctcccacctcagcctcgagggcgggcatgcaccaccatgctggctaatttttgtatttttagtagagacaggtttcaccatgttggccaggctggtctcgaactcctgacctcaagtgatccatccacccgcctcggcctcccaaagtgctgggattacaggcgtgagccactgcacccggcctgtctccatttttgatgaggaaccagaagctcagagaggttaggactattgctgaaggtcacaccgcatggatccaagaatcaaatccaagtctctctctgaactccttcaagattctcccccttggccaggtgcagtggctcatgcctgtaatcccagcactttgggaggcccaggcagatgcatcacttgaggtcaggagttcgagaccaacctggtcaacatggtgaaactctggttctactaaaaatataaaaattagccagccgtggtggcaggcgcctgtagtcccaggtactcgggagactgaggcacgagaatcgcttgaacctgagaggtgaaagttgcagtgagccgagatcacaccactgcactctggtctgggctacacagcaagactctgtctaaaaaaaaagggggaaaaaaaagaaaaaaaaatattgtcctcctgcctcctgctttttaaggtccttctgagcaggctccctgggtcctctcatcctggaatctgtgcttcacagcacttaaagctgcggtggtttagttgctagctcacgtgtttgtttccccagtaaagctaaactccactagagcagtgaccacgcctgatccccagctgtgtccccaggacagcaccaaacctacgaggcgatcaacacatttctgctgaatgagtgggagaatcactcctcaaaaggaagaaaattgtgtcaagaaagtagctggcagagccaggatgtaagtccgaagactccccgacttcgaagcttatcccgtttttctctgcggtctgttattgtcactcaaacctctggccccgaccctcttaattaatgtccctttcgactccgcgccggtcagtctccaccctccatccgcgccaggtccttcgcgctcgccttctaaaggcctcgttcctgtcagtcattccaagctccgccctcaccctgcccactttccacgccccgccccttctgggccccacccctctccgaatacaataccttctagcctgccgctgtcagtcattctgcagatcccgccccctccctcccacgccccgccttttccgggcctgcgcctctaagttcctgttgaggccttgcccttttctcacccgtgtccggagtggcccccgctccagaagcgcacagccgctggttggggcatccctgacatgaagcccctctgcccgcctgggcgctgtcggcccctggacagtctgcgcagagacaagaccacagttagagcagctcccgacactttcgccccgcgacccacgccccctccgcgagcttaccgtgaggcacctcctccattccgtcgcctttgccgccttcgtggtcaccggaacccgctgtcgtacatttccgccttgtgggcacaatctgattctccgaccgcgcgaaataagtctcggaaagggggctgtgcgcacgcgcgaaccttgggccgaaagactgggactcaacgtctgttccttttcagagatttcctatcataaatacttctgcagtgcatctcctaagaacaaagccattcttcatgacatcagtgccattttcatacccaagagatttaatatcgatgcagtactagccaatgcagtattagccaatagacagtttatatttcaatttcagttgttagaccccctcccctgctggattcactcactgcctggagttatttctcttcggtctcctttaattcagatcagtccttctttttttagggggggtctcatcaccttgataattttgacgggtccagaccagttgtgtaatagaatatcccatattcttgatttgtctaatcctcccctccctcttgccttgtaattagataaaggttaatttttcttttttcctgcagaacacacttggataatgtcagtttgtcccgtttttggtaatgtgaagcttgatcgcttgctaaaggtggtgtctgccccatttctccatttaatgtttccttcttccatttgtaattaacaggtactctctgggaccatcttcttctctatcagcctttcactcagtgattttagcagcatttatatatatatatataaaactatagattatatatatgataaatatatatcagttttataccctctctttttttcttttttttcgaagactcactatggattcctggattttttaaaattgtcttttataatcaattattattctttctggtcgattttttttcccccagatgtggccagtgaagccccttcaagacagttcttatgttctttgggcactaatccagcttctttgagcattttcttgctttctgatacaagatgtttcagtcatcccttctccctgctgcagtcatttcttcagggagccttggttactttttagcagacaacagttcagaaaccaagatgtggatgccacaaatgctcattgctactggagtgtcattgctcacaggtttggcacctggaatattaatgagtgaacaaactttacctagccccagacactaagaatatggaaacgtttatttatttatttatttttgaggcggattctcgctctgtcacccaggctggagtgcagtggtgggatctcggctcactgcaagctccgccttctgggttcacgtcattctcctgcctcagccacccgagtagctgagactacaggccaccacgcccggctaattttttgtatttttagtagagacagggtttcaccatgttagccagaatggtctcgatctcctgacctcgtgatctgcccgccttggcctcccaaagtgttgggattacaggcatgagccaccgcacccggcctcggaaacatttattaaacagcagtgtatcagctgcctgtcactaccactaattatagccagcattttgtagaatacttaccgtttggcagctgtcatctttgtgctttcatgtgaattacctaatttatgtcctttcatagtcctactgtctccatttttggataaggaaactgaggcttaaagtaaactactttcccgaggtcgcatgactggtagcaggggaaccagggtgataaacttggtctgtctggctgcagagcctgcacttagtaacacatggtcccagccagcactgggctagatgccaatgattccagactaacctggaccctgccatctggagcacagtctggtcgggagaagaggaccagagtgatggggcatcagcaaaggcctggagagcagagaggaagtcacctatcaggtagggactgttgtcatttccgttttacaggtgataagatggctgcaaagatttacttgtccacagtctgagaggcagaaagagcagaactgggtttttaaccaagtctgatacagggcctttgctattaatcactatactgtatattagagg

SEQ ID NO: 1243184 - DNA, 4001 bp, Homo sapiens
ctgggaccacaggcgtgcgccaccatgcccagctaattttttatttttttcgtagagactgtttctctatgttggccatgctggtctcaaatctgacctcaagtgatctgcccgcctcggcctcccaaagtgctgggattacaggcatgagccaacttgcccagcctaggccttttgaatttttatgtgcatattttccccgtttaaagaaagcttggggccgggcgcggtgtctcacgcctgtaatcccagcactttgggaggccgaggtgggtggatcacctgaggtcaggagttcgagaccagcctggccaacatggcgaaaccctgtctctactaaaaatacaaaaaaaattagccaggcgtggtggcgtgtgcctgttatcccagctatttgggaggctgaggcaggagaactgcttgaacttgggaggtggagattgcagtgagccgtcatcgagattgtgccactgcactccagcctgggcaacggagcgagtctccgtctccccccaacaaaaaaacgaaagcttggactaggtgcagtgactcacgccagtaatcccagcactctgagaggccaaagtggaaggatcatttcggtccaggaggagttccgcaccactctcaataacgtattcagaccccatgtctacacattaaaaatgtagccaagcggggtggtgcatcctgtggtcccaggtgctcaggaggctgaggtgggagggtcgcttgagcccaggaggtcaaggctgcagtgagttatgatcgtgccactgcacttcagccttggcgacagttaagaccctgtctcaaaaaaaaaaaaaagcttctatcaatctcagtaatatccttactttgtagtaaatccgtcctgataataaggacaggcttttccaggcttctcctctggaataagactccagcactgggccaggcgccgtggctcacgcctgtaatcccagcactttgggaggctgagacgggcggatcacgaggtcaggagatcgagaccatcctggctaacacggtgaaaccccgtctctactaaaaatacaaaaaattagccgggcgtggtggcgggcgcctgtagtcacagctactcgggaggctgcggcaggagaatggcgtgaacccgggaggcggagctggcagtgagccgagaccgcgccactgcactccagcctgggcgacagaacgagactccgtctcaaaaacaaaagactccagcactcggtttctaatctgtcagagttgtgctgcaagaccttgctgtccgaggaatgttttccttttggtatcggactcgaggtctcttagaagataaatgcggctcccactactcaggagggcccacggcgctgatctggcgaacggatcgtccccactggtgtgaattctgtcccgcgcaacttacacttttctgaacactgagagcgccacttccacaaagaacttaaaagcatgtgagattctggcgtccgtcttactttcatgactgcgcgcgtgtgatttatttagagacagggtctcgctcttgcccgggctgcggtgcagttgcaaccgcgacctccaggatagcggggcccacaggcgccaccgcgcccgcctacaacgcggtgctcaacaaagttaactttaaaagctcccccaactccacgactcaggccctccgagatcacggagcttccacatcgaagcaggagcacgcgggaaacgaccctgtttagaaaatgcccgcgccgcggcctctggcccggcccagccacgccggccggtgatggtcgcaccggaggcgcgcgacgcagcgaggccgccccgggaagggacgcggcggggccccaagcgaggccctggagcggctccgcaccctggcccgccactcaccggccgccgcctccatcccgccgcctccaggagctcgcggctgcagtccgcttacgcccgcgggccgtcagcctcccagctagagcgaagggccttccaaccaatgggcagtgcgtgcccgcccgtggctcttcttgacaggcctaatcctgctgtcccagccaatcagcttgccggaggagctctcgatccggtcccgcaggttccggcgcagacgatgacacggacctactttccggtcaacgcggcctgcggtaccacctcccacccgggtccaatgtgcgcgcgagctttgtctccaaccgcttgggaactgaccaataggaacgttggattaggactgacagttcctgaaacctctcggcaatagctttgtcacccgactcccgccccctctcccgaagctccgagacaggtgtgcccgcccctcgccgccggagccaatgggcgcagggggcggggattgtttacgtctcgctccggggcggaaagtgggtcagggccgggccggcggagcgcgcagcgggggctgcaggtgagtggcggggcacgggccgacgtctcgggctctgggcgggcgcgctgaccttgcgggcgcggcggtagcagcgcggccagggcgccgcctttgttcctctccggagggccgcgcccgagagaggcttccccggtgccgccgactccggaacccgcgcgcccgcgggagggaacagccaggccgggctgccgccggggagggcggctcccgctgcacacgcgctcgcctggggctgggcagggttcggcggtccgggcgccgcgatccgccccggcctccctggaaccccacccggggcccagcgggcgttgccagccgcgagcccggcgcaggggtcggccctggaaggctaggcgggaaccccggagctggcgagggaggtgccaggcaggtggcctgggaagcgcagacctggccctcgcagccttttgcattttataccataacagcggccagcgctgagcaggttttaagatttgtgtttcacgaggagccctggcggtagcgagcggaggggaaggcgagctgcgcggcccaggagacggtggcgggaggaggatgcaggcgggtgcggcggtcgggccgggcgtgaggggaaggtgtcggggagcggtcacggtgcttctggcatgaggaactgggaggccggagatgccatttgtcaaaccggacgacagaggaggagcgagtggaggttttagatgcctgcgggacaggcgggcggggcagccaggttcgtgaggtggaaccggagagaggggctgggattcgcattccggagtcatgggtgtctgggtggcgtttcacaggatctacctgggttttattgagctgctcagatcctggagtgaggtacgggctcctgaagcgttctggagccctggctgggcaccggtgcggcccctgcagtccccactttgagtgggtccgtggcccagcctggaagctcagggctgggagtgctgtgagtcttcctttgcccagagcctgtgttttcttctagattctttccaccatggccagacgcccccggaacagcagggcctggcacttcgtcctgagtgcagcccgccgagacgcagatgcccgggccgtggctctagcaggctccactaactggggctacgactctgatgggcaggtaggttccagcgggcgaggcggacgtggctggcctaaggtgtggagatgccctaggcaggcaggcagacattacctgaacacggaatcagtcggagaaaaagatgcttctgaggctagaggaccagtccaaacctgggcctgtctcctggatgcaccgcattcagtaagactctttaatttggcaaaggacacacacagcctcaggggtgacaggacctcagaacacactgcattcttcactgtgctttctcctctgaaacacatggtgcatggagaggttggcagttgcttttggttcattcaacagaaattctccactacggggctgggcactgtggctcacacctataatcctagcactttgggaggctgaagctggaggaccacttgagcccaggagtttgagacctgcctgggcaacatggtgaaacac

SEQ ID NO: 1243185 - DNA, 4001 bp, Homo sapiens
aatctagcaaagtaaatccaacaacaacccaaattaacagtattattaacttcctaccccaagctggctctcccccaggccctgaactggctcaggaaggaggcaggaatgagctgaccgagacaaggcatcctccacccacacatcccatcttctgagtggtcccagagctgtgcgccacccctgtgggacaatcaggcactcctgggtctctaccagctgtgatgagacgtacaagaggagggtctgagcccagaataaacaagagcatcctgaggctggagaggcaggcccagtgtgcccggaccaccctgctctgcctgagaggatgggctgggttccagctggcccggccgccacctagtgactgcttgggacagtggagatgatgacaggatgcccactcgccctaggcagtcagaagcggggtacacacaaacactctagaagccacacttagcaggaattcccagtcttccggcccaggggagggtgccaccagctcaggcagccctcaagaggaggccgggagcaacttctccagggccttcttctgcttctcggtggctgcagccagggcctcaaccagcttctcctcgggcatcatgttgagcaccttgagggcaaagaggagctggcacttagccgtgctcacgaaggcgttgctcaggaagttggggaagcctccgactcggtccttctgggtgtacagcgggacccgcacgaggcccagcacctgcgcagacaggaggtaggggttggggccaggcctgccacacaatggcacctccagcaggaggggcctggaagctatgaggccagggtatgagcagccagctttgccaaggacttaatgggagacccacgcagggcctggcagaagccagccagctccctcggagcagtgcagccccctcctccccaagcaagtgtggaggctgaccccatgcactcccccccctcgtacccaggccaccccaccccggggtccgcaccccatgctccccccgtccacccaacgaagcctgaacacccgcagtccagcccttccagaccacaaagtacaaatcccaagagccttcacgcccaacatgaggttcccaagttttacaacccccgctgtgctcaagtttcccaactccccaagcaatccccgctcctcccccatcccttcctccccaccgatcccactcccccactcccaggattggcaatggcaggcagcaaggcggatgtaacacagccctgagggagccccagcgccggcccccacccccgcccctcctttcccggcctcccagccccagacccctctccccaccccattgctggagacagcgacacccgacccagcccggccaggggaccctcaggagacgtgttacccatcggtgccttccacggggccagagccaaaccccggggcggggggcggggcccgggcggcggccccacctccaggccgtggtcgcgcgagtgcaccgcgctgatctccacggcgtgcagctgctccagcgtcagctgccgcgcgtacaggtgcgccacgacgcggtgtgggccctcggtcaggtgcgagctcaggtagtcggcctcggtgaggcgcaggcagcccaggcccaggcccagcacccggttcaggccgtcctccagcgaccagaagcgccggtccacgaagcccccggggaagcccagcagcccgtcgaaacgcatctgcatctgcaagggagcgcgggtcacagccgcggggtcgacggacgcccccgcccgggcccgcccgcgccggcaccctcgcccgcgccctcgcccgtcctcaccagcaccgagaagcgcatggggatgcggccgaagagctgcccagggttggcggcgtacagcatggcgtggcacgagtggctccagcccggccctaggcgcatcgcctccacccggctgatctgcttcagctccggaaccgccgccgtcgacatcttggcactgaccccgtccccgccgctgccacttaagagcatgcgcgagcccgcccccgccgtgcctcgccaatccgcgggcggccgcgcccccgggtccggttcccccgccaatcgccggcgcgccccgggaccgagcccctcgcagcgccgcggtgcgtcgtcgagaggtgctgcgggcggtgtgcaaaggagggcggtgcgcgtcagccgtcacccaatagtcgcacaccctgggcggcggccccgcctccgacgggagagcctagacgactggtcggtgccgtggtggctcaaggttgacattgtgggcgacgaacatcttccttggcgccccaaagcggacagccgaaattccctgcggtttctccaccctcgatggcgccgatccccttgcgcccacccgtttctccccaggaggccgacccggcccgcatggccccgtccatccgcaatggcacccttggcacgaccacacgagccagagatgccccggagccttgctccgccagcgccaccggacccaagcccggagggagatggccttcgcctgccatgcacgacagctgtcccgacctagccaccctgctggcaggctcgatccaggacagcacggggagcagggcttggcagggcttgagtgccccagtccccgagtccacgctgggtcagggcggacgaccgggagctctggggctctgtggacccagcttgctgggcagaaagtgacttaaattccggggctggacctttccagcatcctccaagccgggcaccctgtgccaggtactgtggggggaagaggggtttccccaatttacgatgaggaacttggagctcagagagggacataacttgcctaagtacaactggcagttgatgacagaggcagaatcccgattccacaagggcctgaggtacttaccacttaccttgtgtttgtactggagatgtctctggggctcagaagcatccgaaacagcccaaggcagagcgaggtgccctgaactccatgatggcaaggctcacctcaccagcagcagggcccagggccactttcctccccaccaggggaatggatttgctgagcacatgaacccccctgcctgcactcacagcatgggtgcccagggctggggcacagcctcgggagagccgtgcagtgaggccgagctcgctggcacagagaaggctgccttcagtggaggcaggcaggagaagagagagggagagggtgggcattggaaactcacctgttaggtccgtggtggcctcagatgtggagaataaggacccagagagggcacctctctctcctcctgtggccaccagtgggtcaggggtcacatgggacagctgcaagcagcaggggaagtccagattccagagtgagcgaccatgtgagaaggcgagagggcagcgaggggaagggtcctctcacccaaagagggccccacccctaggcagccaagcccagccagcgcccagggcccgtgggacgcaggggcagaggaggagaggctccccttgctgcagcccctccccgagaccagacatcaatacaagcgctggctcttctgggaggtacagagggggagcccatctggcccatgcaagcacccgtctgacaccctgggcacccctctacccacactgggatggggccagacccaggcaggtcagagcagctgcagggcccatgggtggcagccttctcggggcagggactgatgggctagaacacgggctttccctccaccctcacagtcttcaaagaagggccatggtggcagcttgacctgcacgcaaaggagctggggccctgagtggtaggcagtggtgtggtgggtgccctggggcactggccactccctgggcaggggagcgggggctgtgcagaggcctggggccgggctccagcctgcgagcccacaaccatgggcagctagacctgctcccaccgtccggcctccacacgccagccgcagggtgctagcactgcttctccgcttggaagcctgtttttaaaactga

SEQ ID NO: 1243186 - DNA, 4001 bp, Homo sapiens
ccttacttcctcaccactgtatatccagtattgtgcacagtgcctggtacaaagtaggcattcatgcaatatttcctaaaataaaatatactgggggagagggcatttgttttcaacttaatgttaactcaggtgaacttaagttcacaacacaattattatttctgaatatttgtatttacacaggagaggaaatgtactgtaaatcaacccataattttaatagagcgaagattaaaatatcttactgaaagctaactattttgccaattctacaaaatggttggatgcaaattaattcagtaatcaagacaaaacaagaaaagactgtgggttttagttctaataaccaccgaaagtaatccagaagctgtgctttcacacttttaaaaaggataacatttgcctttaccatttgatggattttttcttaatttttaaaaaaatttttgtagagacagcctatgttgcccagactgatctccaactcctggcctcaagtgatcctcccacctcagcctcccaaggtgctgggagtacagtcgtgagccgccactcctgagaacttttatacacacaactatcaactaattccagattttataaacccagcatttccattatctaaatttccaagccaacacgttttgcaaaataaaacaatgttaaccatcttttcaacttcaaatcacttttggttgggggacggggagacaatgtccgtttattttaatatgaaacagagaaacacctaaactgccttacgaaaacatcaataccaccaaatccttgcacttgtaccctgactggcataaactggccactttcctccatcctggcataaaatggaggcaccgcgttgcctcgaaaacaaatcctcagaaacgattttaaaaagcattactgacaatttcttgattaagacaccccaaacgccaattacctgctacagcgagtctgcttctgagaatgaccttgaaatgcaatggtttgaagtgttgaaacagaaaggtgttgaaaataaaacacagcccacaatgggttttctggtacaaacattctggttccctccagtctgaaagcccaaccatagcagcatccttactcccaaggaggggcctacttgtggtgcctgggatgccggcattgagacatcagacgacgcgaaggcataaggcatggggcagggcagacagccctgagcacatgaataaaatgtgttgtattcaaaaactgaagtattaagtggcacctaaaaggaagaaaactagacctaggcattacagctagatctcgaaaccttactgtcagagtgaaatctgcaaaaatgatactaggttataccattcgtatcacatcaacactcacaaagcaataccatgtacgtgatgcgaaagcataaacaattcactggaaggattaaaaaaacacacattttgaagtcggttacctctggagaggtggggaaaggatgagttaaaagcaaactccgtttttccccattatgaccgaatacataggatgggaacaagccttcctttcagaaaaggactctaaccctggaggctggaggatgagaaaggggcctgagagagggaggaaggcgcgcatccgccagcgggagttggaggcggggaggtgcagaggcgtgaagcgcgccgaaaagccgggggcgcgtcggagagtctataggagctttcacgagagaaatgcccgccaaggccgcgccgcacttacaggttgatggtgcgctccagggtgaggggcttcgtctgctggatgtacttgttgccgaactgagtgaccccccggggccagccggtctgcgagcgattgggcggtaccacagacatgctggcgagctccggcgctgacggcgagcagaaagtggcaggcagggtagactttccccgtgcgggaagcggttatctgcaatcccctcagcggctactgcccgccattaacaggacagcgcaagaggaggcgtaggcacgccggaagtgaacccggagcctctggcggcaggaagtagaggggcggtggcctgccagaccgagctccagtgggccaattgctggtgggatggctgcaatagctggagctcccattggtaaaccgggtataggttccgccttctcttactttggtgcttcccattgggtagggccgggaaacacgataaaggggacatgccgggagttgcagtaccctcaggaaggtagcgtcttgatctgcgtggcgtggttctgtgccttgggaagagatgaatgggaagcggccagcggagcccggcccagcccgggtgggaaaaaagggaaagaaggaggtgatggcggagttttcggacgctgttacggaagaaaccttgaaaaagcaggtggctgaggcctggagccgcaggacgccgttcagtcacggtaaccgggtgctctcagggaggggccgccacgcagaggtctagggatctctgaaaaagccctgggactcgcgcccagccttgggcagcggggccgcaagggaagaggctcttagaggactttggccacctcctactctcctgcctcggctgctgctccctttcactccaaattcggttgcaatttagaaacgtgagaagagggagaaatggaggccggagagttttgggaagcagagggtatgcaagagatagttgcattctggagtcaaagattactgagttagaatcctctcccctgattgggcgtcgccaggcaatggaattaaccttattaaacttcagttgcttcctaagtaaaatgggatagttcataatatttacctcggaaagtcggtgaatgggagcgacacactaatgcttgcaggcttcagtaaatgtttccctgagtaaggcccaatacacatgtggacaaatacaggagtggctgatgtcatttctcctgcaagggcattgctcagctgtcccaggagagtctagccagggcatttgtcgtgagctgccagcttgactccctagtgtactcgtctctacgcgcctgtagtttgactccatgatgtatgaaaataaacgcgctttgaccaaggaaaggcgcctacgttgaacgattccagcctcagctttaaatatcaccttaggtgttcagagctctgcttcatgcgccaggcatccccttctagagtttgccgtaatttttctttccgttgtcaagtgctttgaagaggtgagtcctgggtaggctggatgcctatagaaaacgatagcttagtgtttaagtgcaggctctgtactctcagtttcttcatctgtagaatggggagagtgataatgtctccctcagagctgttaaaaagattgaatgagatcatgggcctggcacctggtaggtggtgctgatgattacaggatggtgatctagccagccggaagcagtgggtaaatgttggggtagaaatcaaggaattagaggtggttatgcccgaactgaactgattttttttttaagtacagtaagtagtaaatgcctctgacagtaacttgggaaaagcaaaagcagggaaactgccgaccagtattgctactctcatttaatgtgctacccaaagtttgagggaaatgaattaaaaatctaaaatacattcaattcaatatgtaatcattgaaacacataaaaaaaagagtaggaaccttgatttagtgacatcacccatcactcatctcaaggactggagttgtaagcatggtatctttaaaagtagtatttaatgggtaaagaagaaaggtcagagcttatcattttttccccaaatcttagactttaagtattaggttccccaaaattcatgaccatccccttttgtattagctctgctatgttacttggatgtcaaaaatacaaaaggaaaaaagccatagataatgtttttcttccaacagaagtcattgtcatggacatggacccttttcttcactgtgtgatcccaaacttcatccaaagccaagacttcttagaagggcttcagaa

SEQ ID NO: 1243187 - DNA, 4001 bp, Homo sapiens
gaaaccagcctggtcaacatggtaagaccctgtctctacaaaagaaaaaaaaaaaaagcataaattagcttaggcatggggcatgcaactgtattcccagctacttggaaggcggaagtgggaggatcacttgagccccagagttcaaggctgcagtgagccatgattgcaccactgcactccggcctgggtgacagagtgagacctgactcaaaaataaaataaaataaaagaagaaaaaacatggagagatgcacacagggaagaagaccatgtgaagatggcggcagaggttgaagtgatgctgctgtgagccaaggaatgccagaaaccaccagaaactggaagaggcaaggaaaggtcacccccagagccttctaagggagtgaggccctgccgataccttgattttggacttccaggcttcatagccatgagagaccatttctattgttttaaaacacccagtgtgtggtactctgttatggcagccctagaaaaggaacagctgattttactttttctgtgggaaggcagctttgcatagtgggcagaatcagctatttaagatacccagaattggcttcaaatgtatataggaggcctggtacagtggctcatgcctgtaatcccggcactttgggagactgaggaaggtgaatcacttgaagtcaggagttcgagaccagcctggccaacatggtaaaaccccacctctactaaacatacaaaaattagccgggcatcgtggcacatgcctgtaatcccagctactcagaaggttgaggcaggagaatcgcttgaacccaggaggcagaggctgcagtgagccgagattgcctactgcactgtagccagggcggcagagtgagactctgtctcaaaaaaaaaaaaaaaaaagtgtatacaaatgacttctctgagtttcatcttcatttgtgtcaggcttgaggatatttaagaagattaaatgatgcagttcatatactgtggctggcacacagctggtgctcagggaatggtaaccactgtcataaatctccccatcattagataagcagttgtttgcaggaggtatttgctattttttgcctctttctaggtggcagggtgctcaccagatgtggttgggtaacggcagtgtatttcaaagaccaaatggcctgaaaaaaatcagtgaatgctggcacagggattgcacagtgcatctggatgcacgcaggccagcctccagaaaaggaaactgtgggctggtggcttttaaccacccggaaaccacagaactgaccagacaaaccagccaaagtaaaaggctgcaaaaacgttatctgtccactttaggggctggccgctggaataatcaccaaggtatcaacagcagtagcagccaccccgttctgagcatggtctcaattttgacgtttctcattttatcctcacaacagcccggcaagtgatcacagggtcacctccaggctcagagagtttacgaaactgacagacccaaggtcacaactgaaagtagccaccgggggacttgaatccggggctgcctgctgcgggtctgtgccactgtcgggggtcctggggtccaactctggagacgcggattgcagaacagccaagccggctgggaaggggagcagcgtgtatgtaaaccatactggcttaagccggctctgttcctggccagagcagtgcaaaggttcggggaccctgcgggttgctggaggcgagtgctcccccatccggcgctcgcaggtggactggcgggagctgcaaaatcagtcccggccaaaaggccccggtggcctccgctacgatcaaggccgggcctgaccaagctcggggtgccagggcccggaaagcctttacctgactggctcctcgggaagaccaagtcgtgacattgccctggggaatgtttgtttccgggcggactcctcggagctgctcggtcggtcgcgcttgcgcagagcagctctgggcttgggagcggcctaaagccagagagaggggcggggcttagagcacgaggcggggtggtgtctggggcggagacagggggcggggcggtgcgagatctgggatcggaggccgggatcggggcggggcggggcttatagccagaggcgggacttgaggtggggagaggcgcggggcgggacttagggccgggtgttcctggttgctcaaagcagtttctgccgggctccttgggcttctatggaagcaagaggtataggaggagttgtggaatttagagctggaagagttaaaaaaaaaaaaaatacagtgttggtgaggtgataatattttacactcgcattcgctgttgctggaaggttaaggtgattcattcaactttttggaactgctgtcagcacctgttcaccgaccacctgtatgcactgggtgcagatcccacagctagcgaaaagacacgtggagctcacagtcaaatggtagaaacataaattaatcacacagggctggatgcagtggcatatgcttgtaattccaacactttgggaggccaagaggggaggatcacttgaatccaggagttcgagcccagcctgggcaacatggcgaaaccccatctctacaaaataaaaataaaaaattagccaggcgtggtggcacacacctgtggtcccagctactcaagaggctgaggtgggaggatcgcttgagcccaggaggtcgaagctgcagtgagccgtgatagcaccactgcactccagcctgacagaggtagaccgtctcaaaaataagaagaagaagataagaagtttttaatgcaaaaaaaaaaaaaaaaaaaaatcacactgataaagcagtggcctttggtccttctagagcgtgtgaaggagaaatgtgacccaattaggagacagaagaggcttggtagaggaaatagaagtgcagctcatcttgaaagcagtagttctcaaagtgtggtcctcagaccagcagaatcaggatcactttggtcctgttaaaaatgtggactctgggccaggcgctgtggctcacacctgtaatcccagcactttgggaggccaagtcgggtggatcacctaaggtcaggagtttgagaccagcttggccaacatggtgaaaccccatctctactaaaaaaacaaaaattagccagtggcaggcgcctgtaatctcagctactaggaggctgaggcaggagaatcgcttgaacctgggaggcggagtttgcagtgggccgagatcgcgccattgcactccagcctgggcaaaaaaaagcgaaactctgtctcaaaaacaaaacaaaacaaaacaacaacaacaacaacaacaaaaaccaagaaagaaagaaaggaaagaaagaaaagagaaaagaaaagaaaagaaaaaagacgaaaagaaaagaaaagaaaagaaaaggtggactttggggcccatgtcacaactgctgaatcagaagccaggtgtcaggcccagtgatctgtgctgtaaggggattctgatgctctgtgcgggatagaggacataaatgaggaaaaaggcaagggagagtgttcaaggaagagggcaaagtttgtgcaaagacagcagaaaggggctggagaacagtgtgtgtgagggagcctggtgcgagctgagaatccaggggtcagtgtagggctgacttctcccttacaggcacaggacacacacagtaattttagggacctgtgaaaatgttttaattgtaatttctttttaaattagaagaagaaaaggtatgtaataaaagcaatatataataatgaatccagcttggatgatagtcattttatgaattcagtcataaaatattcactttaaaattattttatggaagaaggggtgcacaaaaacaaagtagctagggcccatgaaagtaatattgtggctggccctaggtcagtggggcagtttgtgaaattattaatgaaatgaaatattaatgaaatatcgctgtgatatttacaacatccagt

SEQ ID NO: 1243188 - DNA, 4001 bp, Homo sapiens
attttcttagttttacagtaacaaagctcctgtgccatggaacctaatgtaaatgaaatggccttgcagctgccttcagaatacagctcacctcgaccatgatacagctaattgttaaaaatggtggctgagacattttccatacattaaattaaggagctctgatgaaggcgctggcatccacccacttcagacaaagggaaataatttgcaactgtaccaaggcgtggataattgagtcatctcccatacagggtcagtgttagaggtttcctccatctttacaaaatgcaaaccacatctcattgtctcatctcagaaatcgattctttgcaatgctgcactgggtcagagtttcaaaggaatcttagtcatgggtaaatccagaactccaatgccaagaggagccgaattctcacagttcctctccctctgctgagcagctctcctgtattccccaattgacagctcctcaagtcttcctattgttaagagtaaagaaagtccccacacctccaaagggaaataaacccctcaactagggtgaacaatttccaagtacatgcttcagaaagaggtccagaccccacaggtcccacaatacaaatacattccttaggataaaaagccatatgcatcatcatattttgttgttgcttttaagagaagacaacaaacaagctgctttttaatgccgaattaaatgtattgtatctttgatattaatcaaggtattaaaagtattgcaggcaagatttataattctatcaccctccagataatgcttacatgacttaggaagttttcatttcacttacacaaattatattctctagccaaaaatttgaaatatacttaaaggactcctatgatctcttttgagactgaatttaagaaataaaaaagaaccatctcaatttaaattgccaatatttagtaaatacttaggaatcctcctctttggtgttactgtttagttcttctcatttcaagccttatgctaaaacatttcctgtgagatagttcaaaaaaatctctaatagtactttttccctaatcaccaaatataaaggactgaattcctaaagaatcctacacacagacacaccacagacacaaacaaacacacacacgcactcactcactctcacctgcaatcccaaagaaggatctggttttagtaaataaaataaattctattttcatattccacctcatacaagaattttgcacttcacatgtatctcctttaaaaatcctaaagaccacactacttgctacttaaagaagaagttcacaaaaatcccaataaccaactatttaaatatttaagcaaattctgccccacccaatacatttttaaaagaaaaaatattagaatggcaagatacaaatctgaacaattctcagaagaatcaagtacttcttctatcaaatgagttaactgcttccaaatttatctcaaattttcaaacaaaccaagaccttgtctttcagaggcactgcaacaacatgctgccactctatttaccagggtgcatttgtcttaatttctttacaaaacacggccaatcctacctgcagctcttaaatttaaggagttacagaacggtcgatgctgtcgatcactgcagctcttccaaaccttcttatatgagatgagctctgtcggaaccagtgctcaagtttttcccaccccaaactgcctgaattgagggatgggggtggggagaaggacagagagaagagaaaaagagagaaagaagaaaaaggaaaagaacaacccctctgcaagtgctgatgtgactgaagcactaaagagtcaaattaaacaatgagattgcagggtccctttaaaaagggtgcactgcagcccccggagcacagcatcaccattcgttgtgcgctacacaaattcagagaagtcagccatcagtttgaaagcacaaactgatgggagtaacagtttataggttacagaagggtattttattgttaacggactgtaccaagttaagatttaagagggggagagacaacatgtaggcaaggaatgctatgatactttttttccccaacccaaaccactgcaattactctgatgtgaatctttgatgacttccgacatcttgcatggttaataatcgcttcagctgtcatgtttggttaatgtggaaaatgcatttgctgcattgtgatgcagtgctgtggccacagattgtaacaccagttgtgaagctggtcccttaactgagcagcaggaatttgcacatgccatgatgctaaaataaatggtagttaaaagattttatacagcagcagacagattctgccattttagtctacagtatgtgtagatacaacatacagaagcatctcggatcattgtgcccttgtcaattgtactgtccttcaagcagaacagtaaattcgccatcttaaatgtttggcctcttagtagttaaaagattttgatactgtttaataactattcagattaattatagctttgaaaagaacagaggttatttgcatttcaggaatatacagccaatgaaactgtcactgacacaggaaaatgcagaccttttattaacatatgctcagctcaactgtcacttctttgcacaacatttaggggaaaatatatgatgtgtaagtaatgaatattcccattctactgcaatgatttttaaaagtgctcctcaggaagggatttttttcctccacgttttaacatataacctgaaaattgaagactacattaaaatattatcatgtttttcactgtcaaaaaaggaaattcagtgcggcaaacaactgtacaattataggaaagcttgtgaaaaagcaaagacagagccacgctaagaccaaggcaccagatgattaaagtcaggctggtcaggtgatgggccatcatcatggtgcagactgcaaaaggaaaatagaaccattctctcctcaaaaacaaaaaccacaaaccctaagattgcaatctgttggttgcaaaaccaacatctatactgcagaatctgaaagacacataatatttgccaatttcatgatgtatttttatataaatattaacttggctatttagcatacagaatttgactactgacggttcttactcagctaccatcatcatttttgtattttaagaagcaaaaccaacttacattgttcctttaaaagaataaatataattaacttatttcttacatcagaacttttgccaattaaataaatacccagagttgagatgtttcagacatttctgccttacaaaaacaaacaaaaaaccccaagtaaactaaaaagaatgaacataggaacacactggtgtctgaacagtgaataacaatgaaagaacttatgttactagcataaaaatcaactcatgatttcctttgttttattcattgtgataacaccaaatgcataatttggaggtgcatgtgttaacgagcactgtaaagctgaagagctttctagttttcttaccctaacttaaaattaactgcaccaacagtgctatgtggtgccatagcagatgtcacagtagttgtagctaacattcaacaatcaagctttttttgttccagacccaatacaaggtaccactaacagctgagaaaactgcacaaggagggagggagaaacgtgtgtgttgagggtagctttgaaattaaccaggctcagcttatgctccaattactgaacaaaagacaatcctgggggacctctctgaaccagtacaagaagcaaactcttttgtttctgatcaaataaatactgtactggagcatggtggatatatagcaataggaatctctgcctggggatgaaaagaacccaaagacccaagtgtggttaaagtcaaactatttcacggatgtaaaacctgttcccaagggatacatctgaggttcactacaggggagtaagaaaaccctctttatttactgaaaaaaacttcaccaagtcactgttaagac

SEQ ID NO: 1243189 - DNA, 4001 bp, Homo sapiens
tcttcactatcagccaggctaaaatttcatgagaaaactgaagagtttccagattgaagaggttcaggaatcccctacaagtaccagaaaggagaggctcttccgagcagccaaacttgagtagaccatggtggaggcaaagaaagcaggaagaaactgggtctctcctacctcccccagggtacttaacacctagccttattataaagccaacaaaaggaaaaaagaccaggatcttcaacaaagttttactgtaaaaatttcaaagggaggctctgtgataccccccatgtcatccaaccaaacattttatgcaaacaaatctgcagttaaaatggagttctaatttgctgacctaaaactctttcatttcaaggtgcaagcctcataaaaaccaagggaaaagaatccctttgcattctaccatatatttaaacatgttaaatgctgtccccataattaaaaaattatgctgagatctaggctcttattccgtaagttaatatttgcgccacagatttatggatcttgtaggattctaaccagggcttacaacaaccgaaccttcctatgtcaatgaaaaggctgatgtgaagaaaatcattgtctccctagtttccaacatctattaattagagaagacagcactcagtgagtaggataaacaggagctagtgcaacaagagctagaagaacagctggctttataaatttgatatcaagttaaaaggattttcagatacccagttctgtgaagcttcaactcctgaaacagctaataaagcatgttgagcaaattcttcatggtaaagtttactataaaatacatgcactataaattcttcagggtttaaaagataaaaattattcagcctttaaaagaaacacaaatcaaagttaaaatccacttgtttcctcttagtaacagtataaaggaacaaagaaataagccgggtcaaatccaattaattttaagaatcaagatttataagcttacaattacaaacaggagttttacacaagcagctttgaagtcacaactattaattaagtagaaggcactaaaaattatccccatgagtgagagtgaaagcctcaatctattgatctttgaaaacaaaaatcttgttttgtcaaaacatttgtttcttgtgtattttaatcagctattataggtcattaacccggaagcattttcattaaaaacaagagcaaaaataagacactaaaattaaaatccagccattcttttcaggaatggaaaacagactgcttttaaaagacagtgaaaagaaacctgaactcttttaaatttactatattcagatttctttttcctctcaagtgtcatttccattcatgactagtgacaaattcatacttctcattaacttaaattactgatgaataattaaaatcatgtgctaaaatcactcacaaaacctatttttaagtatatatatcacacctggtttttgagaaatacattaaaaaaaaatccagtgtaacgcagaacctctgcgttacacttttcatatttgcagcgttcatttaaaagtctattttgcatattcaaccaaaagcaaattttcaacctctccctgctatatgagtacaagaaatacttactgtagacaaaagaattccattttctttctgggaatattctccaccttcctaaagaactcttctatacaatgtgcaaattcattttcttagttttacagtaacaaagctcctgtgccatggaacctaatgtaaatgaaatggccttgcagctgccttcagaatacagctcacctcgaccatgatacagctaattgttaaaaatggtggctgagacattttccatacattaaattaaggagctctgatgaaggcgctggcatccacccacttcagacaaagggaaataatttgcaactgtaccaaggcgtggataattgagtcatctcccatacagggtcagtgttagaggtttcctccatctttacaaaatgcaaaccacatctcattgtctcatctcagaaatcgattctttgcaatgctgcactgggtcagagtttcaaaggaatcttagtcatgggtaaatccagaactccaatgccaagaggagccgaattctcacagttcctctccctctgctgagcagctctcctgtattccccaattgacagctcctcaagtcttcctattgttaagagtaaagaaagtccccacacctccaaagggaaataaacccctcaactagggtgaacaatttccaagtacatgcttcagaaagaggtccagaccccacaggtcccacaatacaaatacattccttaggataaaaagccatatgcatcatcatattttgttgttgcttttaagagaagacaacaaacaagctgctttttaatgccgaattaaatgtattgtatctttgatattaatcaaggtattaaaagtattgcaggcaagatttataattctatcaccctccagataatgcttacatgacttaggaagttttcatttcacttacacaaattatattctctagccaaaaatttgaaatatacttaaaggactcctatgatctcttttgagactgaatttaagaaataaaaaagaaccatctcaatttaaattgccaatatttagtaaatacttaggaatcctcctctttggtgttactgtttagttcttctcatttcaagccttatgctaaaacatttcctgtgagatagttcaaaaaaatctctaatagtactttttccctaatcaccaaatataaaggactgaattcctaaagaatcctacacacagacacaccacagacacaaacaaacacacacacgcactcactcactctcacctgcaatcccaaagaaggatctggttttagtaaataaaataaattctattttcatattccacctcatacaagaattttgcacttcacatgtatctcctttaaaaatcctaaagaccacactacttgctacttaaagaagaagttcacaaaaatcccaataaccaactatttaaatatttaagcaaattctgccccacccaatacatttttaaaagaaaaaatattagaatggcaagatacaaatctgaacaattctcagaagaatcaagtacttcttctatcaaatgagttaactgcttccaaatttatctcaaattttcaaacaaaccaagaccttgtctttcagaggcactgcaacaacatgctgccactctatttaccagggtgcatttgtcttaatttctttacaaaacacggccaatcctacctgcagctcttaaatttaaggagttacagaacggtcgatgctgtcgatcactgcagctcttccaaaccttcttatatgagatgagctctgtcggaaccagtgctcaagtttttcccaccccaaactgcctgaattgagggatgggggtggggagaaggacagagagaagagaaaaagagagaaagaagaaaaaggaaaagaacaacccctctgcaagtgctgatgtgactgaagcactaaagagtcaaattaaacaatgagattgcagggtccctttaaaaagggtgcactgcagcccccggagcacagcatcaccattcgttgtgcgctacacaaattcagagaagtcagccatcagtttgaaagcacaaactgatgggagtaacagtttataggttacagaagggtattttattgttaacggactgtaccaagttaagatttaagagggggagagacaacatgtaggcaaggaatgctatgatactttttttccccaacccaaaccactgcaattactctgatgtgaatctttgatgacttccgacatcttgcatggttaataatcgcttcagctgtcatgtttggttaatgtggaaaatgcatttgctgcattgtgatgcagtgctgtggccacagattgtaacaccagttgtgaagctggtcccttaactgagcagcaggaatttgcacatgccatgatgctaaaataaa

SEQ ID NO: 1243190 - DNA, 4001 bp, Homo sapiens
agaagtgagtgcaaactacatggatattaacttgcaagcacaaatgccctgaggctaaagcatgtctgacgtttggaaagggagggagcagaaaatgagactgggaaagtaacagtgggtcagattatgtaaagccttatagctcactgtaaaggggtttgtctatcattattaatgagatggggacccattggagggttttttttttcttttaagtaaaggaatgatacgatctgacagcctgtgttttaaaaagatccctctagctgctgtgcaaaaaacaggggccaggacagaagcaggaagaccaaatgggaaactatttcaataatccaaaccagaggtggtgacctggcccagggtggcaagtattatttgtggcgtgaaaaacagaagactgggtgtggtggcccacacctgtaattccaacacttttgtgggaggccgaaatgggcggatcacttgaggccaggagttcaagaccagcctggccaacatggtgaaatcccgtctctactaaaaatacaaaaattagccaggtgaggtggtacacgcctgtaatcccagctacttgggaggccgaagtaggagaatcacttgagcctgggaggcagaggttgcagtcacacgatgacacgagatcgcaccactgcactccagactgagcgaccgagggagactgtctcaaaagaaaaaaaaaaaaaggaaagaaaagaaaaagaaagacagcagtcaacgatggctcaaaagttattagccaaggtctttcctattattgagatgagaaaaaagaggcaacaggagcagtttggggagagtaatgaaggggagcttgctagccctctcttggcatgtttaatttgagttgcctataacccatctcagtggagatattaagtgggtggctggataaaagtcaggggtgagacctgcgatggagatataaatacggaatctgttagcctctgatatgtatgtatttaatgctatgaaatcaccatcaatgaaaataaaaatattgcaaacacaaatgcacaaaggagaatttaaagaaaaaaaaataaagaagaaaagctaggatgaccgaggataccctcccacataccctggaaagaatacaaaaaggtgaccctcgcttttgctgaaagacaactcggtcaaaataaaaattaaataaataaaacctccttcccacgtctggcagaagggcaaatccagaccagaggctctgtcaacgtgtctttcatactttcaccaaggacccatggggtcggccccataattttttcaaaagaaacccagtgaacttgggcatcgcctctgcagggaacgggatggagtaagcacagagaagggtgggccacccctgggttccaatcaccagcatcctcctggatgtacaaaaggtaagccaagggttgggataagttcccctcgccccaaagaccccttccctcgcagagcaacgcctccctacagggtgtgtccacgaggggtaggcaagcaggcagggcacggtcaggaaggtaagcaggcggggcgttgtggcgcaggcttaggcagggtgggctcgcggggcacgaggtggaggtgagggcaggggcgtggcgcgagggcaccacagtggggaagggggagtcgggaggcctaggttctgcattcagaaagtggacgaatgaaaggcacccccagggatgcagcccgactccaagcctcgggggcggctcgacaaggcgttgtgtcgccggcgtcaggcgtgcccggctgccatgaggagaacgggaagtatgagcggcggggttccgagcgtggggacggcgctccacccagtcacggggtcctgggttcaaggacaagcccagggtcgcaaggacgcgaccagacacacccttaccttgtgctacagccgtctccgccgctcaggtgccggcttgaggacgcggccgccgcttctcgcgccgctctcccccgcttcctgattggccaaggctggccgctcccagaagccctcgcgcggtgcgacgccaaatgaactttatggagacccgtgggggaggacaagaacaggggcggggccgggggcggggcggaggtggggccttgggccaaaccgtcacccctgggccacaggcagccacggacctcgcctttcccacttggttagagtcggctctgccgggagaaagcgattccagaattccctaagttaaaggaatttcttactccttcttgagcgccatccaagggccaggccttagtctaggaactggcaacaccgtggcgaccacgtcagacaagatcgctgccctcattgagttcccaggttggcaggggaaacaaaaatgtaataaataactgcactttgcaagaagagctatgaagaaaaaacagggtgatgggagagagaatgcttggatgttgaagggaggcctttctgagatggcgacatcttgagctgaataaagaaggatgagaaaggatggggcttgcaaagttctggcttcaaagaattccaggcagagggaacaagagtgaagtctccaggggaagccagcttagtgtttggagactagaaagaaggggtgtgcggctggaagatggtgagtagggacaagtggggtcagactcatccatagactggatggcttatacacaacagaaatttttttctcacagttctagaggctgggaagccttagattaaagcacccgcagattcagtgtctgctgagggcctgcctcctaattcatagatagcacttgatatggtttggctctgtgtccccacccaaatctcaccttgaattataatccccataatctccacatatcaagggtgagaccaggtggaggtaaccagatcatggggggcagtttctggcatgctgttctcacgatagtaagtctcatgagatctggtggttttataagcgtctggcatttcccctgcttgcactcattccctgtcctgctgccctgtgaacatgtgccttccaccataattataagtttcctgaggcctccccagccatgcggaactgtgagtcaattaaacctcgtttctttataaatgacctggtttcaggtatttcttcacagcagcatgagaacggactaatatagcactcttctccctgtaaccacacacagaagggtgaggggagctctccaatatttcttttattagggctctaatcccattcatgagggcttcactctcatgacccaatcacctaccaaagtcctcccctcttaataccatcccaatggagagcagagtttcaacatataaatttgaagggggaggacacaaacattaagaagtctatagcaactagtgtccagctttgtttatttttaatacctcacaccagcatattgtgagttctctataaataattggtgctgattaacaatatgtatgaatgtggcctttgccctgaagctattatatatgtaaccagaccccgctatggtcagagaatatccacaaagataatagtatcttgcatctgaataatgttttatacttttactttgctttttctttatgtaaaaaaaaaaaaaaaaagcacttttaatgacatagacaaatgcttgtgcaatattgccaaatgaaaattccggacacttgccttttaaagctgaatatttctacattgtaaaacccagtaattcaactcctagatatatgccctagagaaactcttacacatatgcaccaggagttataagtaagaatcttcatagcagcacagttcatattagcaaaaaacttgaaacaagccaaatatctgttaaccaaaaaaaaaaaaaaaggataaataaattgtgggatattatgcaatggagcattacacagcagtgaaaaatgagtgtgcttcagccacagatacaccatggatgaatcttggaaacataatgttaaatggaaaaagtggccaggcacagtggttcacgcctgtaatctcagcactttgggaggctgaggcaagagggta

SEQ ID NO: 1243191 - DNA, 4001 bp, Homo sapiens
aaacaaaccaaaagctgcattcacagcgtagaccctgcaagagcaggaacactccctgccccagatacatacaccaaacacaaatacacatcaaagatgctctctcaggctcatgaatgtgcaggcacaggcaagcacacacatgcccgaacaaaaacacacaaagaacaaggatgaacacacacccaagctgtggctgccgtgcgtgtctatttattgttgctgccaccctggaggagccccagtttcttctgtagctttcttttctgggggatcttcctggctctgcccctccattcccagcctctcactccccatcttgcacttttgctagggttggaggcgctttcctggtagcccctcagagactcagtcagcgggaataagtcctaggggtggggggtgtggcaagccggcctggatcctgtcctgggtcctccttcctccgcagtcccgtctctattgctgggtgtagtgtccatggtctggcctcatctggggggtgaggaaaagcaggtggtaaaagggacagagatctgggttctaattctgcctctcccactcacttgatttgtgactccagggaaggacccaccctctctatcctcaatttctgtctctgtaagtcaaatttcccttcaattggaaaggttctgtgttcccactttgctctggccactaggaaactcacaatcaaacatatgtctcgttttattctgcatcaagacaacagttgcctgatccctcctccccacccaatcacacaccttccggcctgtccttcatggcagaagcaccaccttgagctctctgggccccccgactccttacctccagctctgtctcagcgccgtgcccctcgcttcttcctctctgaattctgcagcttggtcaccagtttcctctcgtgcccgccagggctggggcggttggtgttggcagcagcttctctcttggtgcgacctttccggcctccacctcctgtaaccaaggcaggagtcagaggtgaagtgggcataggcatgatgagaggccctgtcagaggagaggcaggggttcagggttgtggggatgggaagagcagggagaagcctgctgcttcccctctgtggaatgtgggaccccagatgtgtgtgaggtcccaggctgagtaacatagcactcctgggataagggattagacaggggtgacgtgagggtccaaggaacaggttggctagaaaagggtgagtgggctgggcagggtggctcactcctgtaatctcagcactttgggaggccaaggcaggagaattgcttgagcccaggaatttgggatcagcctgggaaacatagtgagaccccatctcaccactgcaggtggtgtacacctgaagttccagccactcaggaggctgaagcaggaggatcacttgagcccaggagttcgaggctgcggtgagttgtttgagttgttgtgatcacactactgcactccagcctgggtgacagagtgactctctcaaaaaaaaagaaagaaagaaacgaagaggaaaggaaaggaaatgagaggaaacaagaggggtgggtcctgatttcgggagaggaggaaggaccgtggagatggctgagtgggccttaccgaggtaggaatgggccaggctatagaggtcagattcatccaggctggagtcctcgtcctccgggcctgggggctgctggggggcgctggttgctggtgggaaggtggccatcgtgcctggcttgtcttccctgcctctcttcttctcctaacgctttgtctgtctctgctttcctggccccgggcctctccactccctcagcttataaggctgtgtctcctcctcagaccacagtctggctccagcccatcaggccctgtctgatgcaatctggccccttcccaaaatccagcccagtaaacacagtcatgagacgggaagagtcggtccctgagtccagcccaactcacctcctccctcccaggctcacccagctggatattttccatagaggaggtcccgcttctcggcagaaagcagggaagaggcaggatctgggctaaaacactcgttgggatcatggcctcacctgatcgagggcttcacctgggcctgggatgacggccacacagctaaccccggcaccccaattctcgctgagatgcaggacgtgaggaaggagggggaagggatatcagcacacttgtgccagggacaagtcagtggcttccacccagtcacactcaacatcttgcttgtcttcttttttttttttgaaatggagtctctgtcgcccggctggagtgcagtggtgtgatcttggctcactgcaacctgcaacctcctcctcccaggttcaagcaattctcctggctcagcctcccgaatagctgggattatagacatctgccaccatgcctggctaatttttgtatttttagtagagatggggtttcaccatgttggacaggctgatcttgaactcctgacctcaagtcatctgcctgcctcggcctcccaaagtgctgggattacaggcatgagccacacccttttttttcttttttctatgagaaacatcttggaaaaccccttaatatcctgaaacagggtccccagtaatgtaatctccctcacctaggaggagggtggcagagggttggagagttcagggtctggagccagttgccctcagttcaatcccctgacccaccactttccgtgtgaccttgggcgagtcccttcacctctctgtgccttggtttccaattctgtaaaataaggatgataataattgtatcttcttcctagagttggggagaggatcaaatgagataatgtttgaaagacacatgctacagtgcccggtgacagagggagaccctgtctcaaaaacaaattataataaaataatatgtatttcaaaatatggatgtactgaggcagaagacacaatgaggccgagcgtggtggcttatgcctgtagtcccagcactttgggagatccacaaagtgggtggatcacctgaggtcaggagttcaagaccagcctggccaacatggcgaaatcccatctctactaaaaatacaaaaattagcctggtgtggtggcaagtgcctgtaatcccagctactcaggaggctgaggcaggagaatcgcttgaacctgggagggagaggttgtggtgagctgagatcgagccactgcactccagcctcagcaacagaatgagactgtgtctgaaaacaaaaacaaaaacacaaaaagctgaacttctgcttgtgtttctcccttgcctgagccggaattgaatttagcctttgttttcccagatttggatgatgtatgagttccttaacacccaggaaatgaaagtgaagacaggatacttgaatgaaaacaggattgggccaataataacagaccaggtgatcagagaaagaggaaaataatcttaaattaagcaaagattggcctagtgcggtagctcatgcctgtaattccagggctctgggagggtaagctgggaggattgcttgaagctgggagttcaaggccagcttgggcaatagagcaagactccatcctttttttgttggtttgtttgtttttgttttgagacagagtctcactctgtcaccaggctggagtgcagtggtatgatctcggctcactgcaacctccgcctcctgggttcaagtgattctcctgcctcagcctcctgagtagctgggattacaggcttgtgccaccacgcccggctaatttttatatttttagtagagacggggtttcaccacgttggccaggctggtctcgaactcctgacctcaggtgatctgcccgcctcggcctcccaaagtgctgggattacaggcgtgagccacctggccagtatcttttttatttgtttgctttaccattatttgtccccactggcatgcaaccgttggtttagtttagttaatggttaaaggagtaggctctggaacagggct

SEQ ID NO: 1243192 - DNA, 4001 bp, Homo sapiens
attacctgggaaaatattcaaggaggaagaaaaaaatatgcagggtcagtggctttcttcaccttgggtctcaatcagcccttctaagagacctgatattctgcttgctcctgaggccagagctgcagagattgagctgctgctgctttttttttttttctttttctttttttttgagacagagtcttgctctgtcgcccaggctggagtgcagtggcatgatctctgcccactgcaacctctgcctcccggattcaagcgattctcctgcctcagcctcccaagtagctgggattacaggtgcacgccaccacacccagctttttttattttggagacagagtcttgccctgtcacccaggctggagtacagtggcatgatctcagttcactgcgacctccacctcccgggttcaagcaattctcctgcctcagtctcctgagtagctaggattacagaagtgcacctccacgttcagctaatttttgtatttttagtagagatgcgcttttgccatgttggccatgctagtctggaaccccggacctcaggtgatccgctggccttggcctcccaaagtgctgggattgcaggcgtgagccaccgcgccaggcctgagctacttctttagtctctggaaagactgcggctcagagaaatcaacgctttacatgccatctctcccctagtcccaaggtcttctctggactggttccttaatttaccatctctcaatcagaagcgcctttacaaaggatatcaggatagtattttttggtcaaagataactcttcccccagaactcagtagggtctctgatggcatcagtaagggcaatttcataaagcaaccaggttcctgcctgtttacaggcagctccagttgttgggaagtgagcaagcaagtgaggggaagccagactttctggagcttccagccctagttctgccacccaggcttcgggagggccccacaaagtctgaaatctacgtgccccaccccccaaagccccttccagcccaggttctggtttagcactaggctcaagaacctcaggcctgaattctacttcccgtgcattaagtcccaccttaacatcccattcttatgaagtcatcctgtcctgcggggcaattctgtgttgctgctggggcctggtcactgatagagaagggcgtgggctgggcctacccggcaggagccgcctcaccccatcaggcccagatcctctaagacaagacagggataaagtctcccgtggaatcccctcccgcctcatattccctgaccctgccctccctgcgagaactccagtccgggctccacaaagggcgcggtaagaaacgtacacttccgaggggcagacaaggagggggcgttcacctacaccccggccgggctatggtcgggaacagggtgaggggcccaagccccggctgcggcaggcgggcgcccttacccatgctgactctggagcgggccgggtggcgctgcccatccccggatccttcgtaggtgggtagcaggacgtggggctggggtctgcccgctagccagcctgcagagcttgcggggctcgcgcaggccgggccaggctagacggggcggggccctaaggccccatccggacggtcctgactagagaaaaaggcctggccatggcgcaggccggtgcaccagccaccagcacggtacggcccagataggcgcccggctggctctctgtgcgttacccccggccgccgcctcacaggaccggcgggaggcggagccgcgcgcgacacatggcccgggccccgcgcggcttcgggccgccgggggggggggaggggaggggccgcccggggactctcagcggagcctcccggcagcccagagagcggctcctgcggcccagcccccgccccggcgtgctggccccgacactcacccgaggggctggcacgatggcggcagcggcagcggcaacccagcgcggtctgcggccgactgtcccttcccccctgccttccttcgcccgccccgctgcactctgggagacgcagtcccaccgccccccctttccggcatgagcgcgccgagagaaaactacaattcccggcgtgctatgcgcggaggcccagacacggcccgcagcgcgggaggtgaggctaagccagggagggaggctgccggggcaagcccctgagaattgtggtctagcggaagcctctggaacactagaggttggcgccaggctagggtcagggctcagttgtctcctggtctcagctggctcggccccgcccagtctgtgcactggggtgggggttggccccgcctccgtgggagcccagcccggccccaagctggcccagctgcccctccctgggcccctgggccgtttccgctcacgaaaccccctccccttggggctatggctgccgctgttactcttccgagctgtgtggccttaaccagcccgggcggaacgcacagctcctgcaatcccaacattcgtgcgcctgcacctcggcgagtcgggcccaaagctggtttcgagcaggctaggctattcttgggccggagactcaaatgtccctcaggtggggcttggttggagaggttaccctcaaacttctacagtcaggggtccccccaaaacattctgtaaggtttttttgcagcagatagagcagctaagtgtttcatttttattaatgaggaaagagaaatgactgacttacccaaaatttcgctgtgatttaagtgaccagattgtaaatagttctcttcctacccattgccctttcctttcaacgcccatttgttttcttggtaacacaaacatttgtggtaaggccagtctctaggtcagacctgtgcttggcaaagagatctgcagccaacttggggtaccacaggtaagggaaatggctacaaggcctctccaggcaactcctagccttccttcctggccggaggtctctcagtactcctgttcttccacaagagttttgcaccttcccccacccacaggctacccctccaagagatggctggtaagaccggaccacacttctgttttttaaatctcaggtctgtcaacactacactttgcctgactagatgcttattactcagctagtgagaactctgcattgccccgcttatacatctgcatctgggatctcccttgctctgtgaactgtcttcttctccctaagaagccaaaacactgcccataacctccagacaccagggagggtccagggagtactgctgagagcctcaagggagccaatgcagaaacagcagaagtcccttcaataaataggagctcaaggatacactgaagagcatggctggatcctggaaaaggccttgctccgaccgggaagatgtgagactggcccaataggagcaacaaagggcactgcagtgcttccaccacctgattaccagccagatctaaccctaggaagacagaggtccagtccatcccccaaccagccacctacacaacctatgtctcactccttccccaccactttcccaactcagtgctaagggactagaagggaaacagagacttgagttttaggaccatcccagcatgttgccacagacaagtccccaggcagatggctttgtccataagtaagaaagagaagggagtcatattttatggggtctgaaagtctccgtttgtgccccaccacccacagtaaacccagagctttaaaggcatttacttttagacattggctttgagctaaattacttggagctatagacaaaagcaatgtaatccttgccccttcaatattcaatctaagaaaaaatagaggctgggcggggtagctcacacctgtaatctcagtactttgggaggcagagcaggcggatcacctgagatcaggagctcgagaccagcctggccaacatggtgaaatcctgtctctactgaaaatacaaaaatcagcccgacgtggtggcgggtgcctataatcccagctac

SEQ ID NO: 1243193 - DNA, 4001 bp, Homo sapiens
tcaaggcaaacccaccctaaaacctcaagtctaaaggtattcaatgacttcatagacagtgaatttccaagctggaagagttaatgtggcaggggaataaatacctgctggaacttatataaatcattatacttctcatggaagtccaagttcatcagttccttctgaagcccttctaagaagtcttggctttggatgaagtttgggatcacacagtgaagaaaagggtccatgtccatgacaatgacttctgttggaagaaaaacattatctatggcttttttccttttgtatttttgacatccaagtaacatagcagagctaatacaaaaggggatggtcatgaattttggggaacctaatacttaaagtctaagatttggggaaaaaatgataagctctgacctttcttctttacccattaaatactacttttaaagataccatgcttacaactccagtccttgagatgagtgatgggtgatgtcactaaatcaaggttcctactcttttttttatgtgtttcaatgattacatattgaattgaatgtattttagatttttaattcatttccctcaaactttgggtagcacattaaatgagagtagcaatactggtcggcagtttccctgcttttgcttttcccaagttactgtcagaggcatttactacttactgtacttaaaaaaaaaatcagttcagttcgggcataaccacctctaattccttgatttctaccccaacatttacccactgcttccggctggctagatcaccatcctgtaatcatcagcaccacctaccaggtgccaggcccatgatctcattcaatctttttaacagctctgagggagacattatcactctccccattctacagatgaagaaactgagagtacagagcctgcacttaaacactaagctatcgttttctataggcatccagcctacccaggactcacctcttcaaagcacttgacaacggaaagaaaaattacggcaaactctagaaggggatgcctggcgcatgaagcagagctctgaacacctaaggtgatatttaaagctgaggctggaatcgttcaacgtaggcgcctttccttggtcaaagcgcgtttattttcatacatcatggagtcaaactacaggcgcgtagagacgagtacactagggagtcaagctggcagctcacgacaaatgccctggctagactctcctgggacagctgagcaatgcccttgcaggagaaatgacatcagccactcctgtatttgtccacatgtgtattgggccttactcagggaaacatttactgaagcctgcaagcattagtgtgtcgctcccattcaccgactttccgaggtaaatattatgaactatcccattttacttaggaagcaactgaagtttaataaggttaattccattgcctggcgacgcccaatcaggggagaggattctaactcagtaatctttgactccagaatgcaactatctcttgcataccctctgcttcccaaaactctccggcctccatttctccctcttctcacgtttctaaattgcaaccgaatttggagtgaaagggagcagcagccgaggcaggagagtaggaggtggccaaagtcctctaagagcctcttcccttgcggccccgctgcccaaggctgggcgcgagtcccagggctttttcagagatccctagacctctgcgtggcggcccctccctgagagcacccggttaccgtgactgaacggcgtcctgcggctccaggcctcagccacctgctttttcaaggtttcttccgtaacagcgtccgaaaactccgccatcacctccttctttcccttttttcccacccgggctgggccgggctccgctggccgcttcccattcatctcttcccaaggcacagaaccacgccacgcagatcaagacgctaccttcctgagggtactgcaactcccggcatgtcccctttatcgtgtttcccggccctacccaatgggaagcaccaaagtaagagaaggcggaacctatacccggtttaccaatgggagctccagctattgcagccatcccaccagcaattggcccactggagctcggtctggcaggccaccgcccctctacttcctgccgccagaggctccgggttcacttccggcgtgcctacgcctcctcttgcgctgtcctgttaatggcgggcagtagccgctgaggggattgcagataaccgcttcccgcacggggaaagtctaccctgcctgccactttctgctcgccgtcagcgccggagctcgccagcatgtctgtggtaccgcccaatcgctcgcagaccggctggccccggggggtcactcagttcggcaacaagtacatccagcagacgaagcccctcaccctggagcgcaccatcaacctgtaagtgcggcgcggccttggcgggcatttctctcgtgaaagctcctatagactctccgacgcgcccccggcttttcggcgcgcttcacgcctctgcacctccccgcctccaactcccgctggcggatgcgcgccttcctccctctctcaggcccctttctcatcctccagcctccagggttagagtccttttctgaaaggaaggcttgttcccatcctatgtattcggtcataatggggaaaaacggagtttgcttttaactcatcctttccccacctctccagaggtaaccgacttcaaaatgtgtgtttttttaatccttccagtgaattgtttatgctttcgcatcacgtacatggtattgctttgtgagtgttgatgtgatacgaatggtataacctagtatcatttttgcagatttcactctgacagtaaggtttcgagatctagctgtaatgcctaggtctagttttcttccttttaggtgccacttaatacttcagtttttgaatacaacacattttattcatgtgctcagggctgtctgccctgccccatgccttatgccttcgcgtcgtctgatgtctcaatgccggcatcccaggcaccacaagtaggcccctccttgggagtaaggatgctgctatggttgggctttcagactggagggaaccagaatgtttgtaccagaaaacccattgtgggctgtgttttattttcaacacctttctgtttcaacacttcaaaccattgcatttcaaggtcattctcagaagcagactcgctgtagcaggtaattggcgtttggggtgtcttaatcaagaaattgtcagtaatgctttttaaaatcgtttctgaggatttgttttcgaggcaacgcggtgcctccattttatgccaggatggaggaaagtggccagtttatgccagtcagggtacaagtgcaaggatttggtggtattgatgttttcgtaaggcagtttaggtgtttctctgtttcatattaaaataaacggacattgtctccccgtcccccaaccaaaagtgatttgaagttgaaaagatggttaacattgttttattttgcaaaacgtgttggcttggaaatttagataatggaaatgctgggtttataaaatctggaattagttgatagttgtgtgtataaaagttctcaggagtggcggctcacgactgtactcccagcaccttgggaggctgaggtgggaggatcacttgaggccaggagttggagatcagtctgggcaacataggctgtctctacaaaaatttttttaaaaattaagaaaaaatccatcaaatggtaaaggcaaatgttatcctttttaaaagtgtgaaagcacagcttctggattactttcggtggttattagaactaaaacccacagtcttttcttgttttgtcttgattactgaattaatttgcatccaaccattttgtagaattggcaaaatagttagctttcagtaagatattttaatcttcgctctattaaaattatgggttgatttacagtacatttcctctcctgtgtaaatacaaatattcagaa

SEQ ID NO: 1243194 - DNA, 4001 bp, Homo sapiens
ctgaccttaaattcaccagggtggggttttttccccacactaataagcctgagggtactgcaggagaccagggcatatttcagtccttatctcaactgcataagacagactctcccagagcagccatttatagacctcccccgaggagtgcattcctctcccaaggtcttaattattaacattccttgctaggaaaagaattcagtgatatccctacttgcacgtccatttataggctctctgcaagaagaaaaatatggctccattctgcccaactccacagatagtcagaccttatgattatcttcccttgttccctaaaatcactgttattctgttctttttcaaggtgcactgatttcatattgttcaaatacacatgttttacaatcaatttgtatagttaggtagaattatcacagtggtcctgaggtgacgtacatcgtcagcttacgaagataacaggattaagagattaaagtaaagacaggcatgagaaattataagtgttaatttcgggaactgataaatgtccgtgaaatcttcacagcttatgttcagagattgcagtaaagacaggcgtaagaaattataaaagtattaattttgggaaccgatacatgtccatattaaaatgaaatcttcacaatttatgttcctctgacacagctccagctggtccctctgttcagggtccctgacttcccgcaacagcatccagcctggcgacatagagagactccgtctcaaaaaaaaaaaaaaaaatttagctaggcatgtggcacacacctgtggtcccagctactcaggaggctgaggcaggaggatcacttgagcctgggagatggagggtgcagtgagccaagatcacggcactgcactccagcctgggtgacagagcatgaccctgtctcaaaaaaaattataattaatagtttaacttagtataattactaagtgtgtcactagcaagaacatcatttaatgaaacaactactgcattaaactcaattggtgaaaaataaatttccttgggaatgagattcagtcttgattatttcatcagacagaaaacaccaccctgccaactacttttttcagagcccctttcaagtacctgttcctcaggctgtagatgaaagggtttagcatgggagtcactactgtatacaacacagtagccatagtgtctttctcagctgagtgggaggacagagggttaaaatacacagcaatgatggtgctgtagaagaggagaaccacagccaggtgagaaccacaggtggagaaggctttccaccttccctttgtggatgggaccttcaggacagtgcaggtgatgtgcatataagaagccaggatgcaaagaaatggggtgatcatgaccagggcaccctcactaaggattatgacctcattgaggtgtgtgtctgagcaggagagtttcagtaggggagtcacatcgcagaagaagtgagtgatggcattgtctgcacagaatgagagtggagccatcagcagggtgtgcagaaggacattcaggttggcaaccacccataatccagcaaccagcagggcacagagctgatgggtcatctttgctgtgtaatgtaaggggtggcacacggcgacaaagtggtcataggccatcacagctaggaggaaattgtccatgtccacgaacatgaaaacgaaatacatctgtgtgagacagccacagaaggagatggtctgagtctcgagtatgtgattggccagcatcttggggacggtggtgaaggagaagcagatgtccacaaaagacaggttgctgaggaagaagtacatgggggtgtgcaggcaggagtctatgcttacggacaggatgatgagcaggttccccaggacagtggccaggtacatgctgaggaagaacacaaagaggagatgctgctgctggggctgcctggagagtcccaggaggaggaactcggagacactcgactggtttgtcccgctcatgggcctgggatcctggacacagaggcagacaaagaagacgaaatgcaaaagcttggaaaatgctggttaagatggggcacaggaatggcagtagaattttgcttgcaggatgtaaatgataatattgtcaaccctgctggggctgctactgctatgttcagggctcaggtttacagaagtctgagccaggccttcttggctatatccacggagcaccctgagtccaatttgtaaaattaaaatggaacaacccagaggtctgggcagaaactcagtcagtttgtgttccccacagttcaggatgtcagacagacgggacagaggctggtcctgactgggtgattgcaagggactgctgctgagctcaggactgtttttctggctccacataattgaaaggaaggagggtccctctgaggctttaagtcctgacaagcagttatcagtgaagtcccactgatgtgactctttttatttctttttttaaacggagtctcgctctgtcgccaggctagagtgcagtggcgagatcttggctcgctgcaaccttcagctccctagttcaagtgattctcctgcttcagcctcccaagtagctgggattataggcacgtgccaccacgcccagctaatttttgtatttttagtagagacggggtttcaccatgttggccatgatggtctctatctcttgacctcgtgatccgcccgccttggcctcccaaggtgctgggattacaggcgtgagccaccacacctggccaatgatctgactcttacccagaaagagcagcagtcctcactgtctcctgaagtcctgggttggcttccctttttcagacctggccagaggttattggtctgagggagggtgactcgtcactggagctttgaggctgagtatctcatgaatcaggagctgggctgcacagactcagcccttgatgcaggaaggatgtttggaagaatcacagggcaagctcttcacaggagcctccatggccactagggtcatattccctgagagcctcattgagaaaagcagagagtaattgtcccttcccctccttggctcttttgtgtccgacactgacgataaagctttgtcatacataattcctgcctcagcacttggcaacactgaaagtgatgcaatctaaggggtaatcattggcaacaatccttctgctagaggaaactcacgaccctgtattttatcccccacccagctgggatgctgatcttgttgggagatacctgtgaagctgtactgggattaagaagataacctttggattttcacagaccagcactcaatttccagatccaccattaccagttgtatagccttagaaaagctagtaacctccactgaatcaccagctcccatcatctatagagtggagaaataatattcaccttgtagggttgtaataactaaactaggtaatttatgttaaatatctcgtgactcttaacctcatcaatgcactgggctaagaccatgtccactaggtgaaggctgaagatattaaattgttattattattattattattattattattattattattattattattttgagatggaatttcattcttgttgcccaggcaaggtactacaggcgtgcactaccatgcccaccaggctgggcaacagagcgagaattcgtcttaaaaacaaacaaacaacaagaacaacaaacaacccataaagctaattacgaaagatctggggaggaggaggagaatggacactgaattagcaaagacattatttgcaagcgatagaaaaccaactcatatcagcctagggagaaatgacaggttaatgtcattacaaaatccaaggtgtcttcttgcaaagcctttgtgtttcaggccagaccaaattcagggagctgaatgataacatcaagaccctgtatttctctatctcactactgcattggcttctgctcagcttcattctgcagattacctctcctcatgtgg

SEQ ID NO: 1243195 - DNA, 4001 bp, Homo sapiens
cctgcctcagcctcccgagtagctgggattacaggcatgtgccacgatgcaaggctaattttgtatttttagtggagacagtgtttctccatgttggtcaggctggtcccgaactcctgacctcaggtgatccacccgcctcggcctcccaaagtgctgggattacaggtgtgagccactgcacccagtggtatactgcattattaagaagagacaggccaggtgcggtagatcacacccataatcccagcacttggggaagtcaaggcaggaagattacttgaggccaagaattctagaccagcctgggctgttaacagagtgagaccccatctgtaaaaaataaaaataaaaattagttaggtgtggtagcatgtgcctatagtcccagctactcagaagactgaaggattgcttgagcccaggagttgaaggctgcagtgagctaagatcatgccactctacttcagcctgggcaacagagcaagactccaactcttaaaaaaaatgaagaagagacaaaaagaggtaggcaaagataatgacagatagggtaaaaacatgaattgtttgggtcttcatatgaagttaataatacatggcttgattttatggaattatagtaacattatgtaagatactgcaagtggaggtgctttgcttagaaaagtacagaattctgcagaaatataaggcatattaaataacatgtgggcaacagagacagagacagtgagacaggtctgtcacaggtcaataacctctgagccctcaacaacatgtctcccctgctatcggtagtccacagtaggatttttggtaaataagtgtagaacattacgaataacactaaccatgttcccaacagcttagggctgtcagcttagggctgtcaggaacatgccttggttttaccggaattagtattcctcatgttcacctggccagagagagttaatgagaaacgcatgtagagatgaagacgcaataaataacgaaggagtgttctctcagccaacttctcttcctttccccagcaacctcctcagtgcgcccttcacttccatgttccgcagcgtgtagatgaggggattcaccatgggtgtgaccaacgagtagaacagggaaatgaacttgccctggtcctgtttgctgttcttggccggaagcagatacccatagctggctgagccatagaagaggaacaccaccagcagatgggagaggcacgtattgaacgcctttcgcctcccctctgcagagcggattttcagcactgcctgagcaatgaggcagtaggagatcacgatgatgcttagtgggactgcagtgaagaaggtgcagacaccattgagcacagcctggttgagacttgtgtcgccacaggccagtttgatcatggcaggcacctcgcagaggaatccctccaccctccggtgcccacacaatgggagctgcagagtgaatgttgactggatcacagagttgcccaagccacccaggcaggcaatcacagccagcagccagcagagctgggggttcatgatggcggtgtagcggaggggccggcacactgccacgtagcggtcaaatgccatcaccaccagcaggatgcactcggtggcccccagccaaaggaagacatagagctgggttatgcagccaccatagctgatggtcttgcctggtccccataaattgatcagcatttgggggactgaactagtagcgaaagcaaggtccaaggaggagaggttgctgaggaagaagtacatgggtgtatggagccgggcctccaggcgggaaagcaagatgatggttgagttcccaagtagggtcagcaaataggagaagaggatggctataaaaaagatcatctccagctggggatggtctgatatgcccatcagaacaaagccctgcaaggagctatcattcaccccgtccatcactggttgtcttcagtcacttgatgaattcatttagcgcaagctgctggaagaaaagtcaagaaaaagctgttggatgaggtggatttgcatcaggaacggtctaatagttctctgggatccatagttaagtaacaacctattttttgtttgttttttgagacagagtctctcactgtcacccaggttggagtgcagtggcacaatctcagctcactgcaacctccttctccctggctcaagcaatcctcttgtctcagcctcccaagtaactgtgaccacaggtgtgtgccaccacatccaaataacttttgtattttttgtagagatggggttttgccatgttgcccagggttgtctccaactcttgggctcaagtgatccatctgcctcagcctcccaaagtgctgggattacaggcatgaaccactgcacctggactccaacttactttttaagattgcaagctttttttttttttttgagacagagtctcgctctgtcacccaggctggagtgcagtggtgcaatctcggctcattgcaacttccgcctcccaggtgcaagcaattctcctgcctcagcctcacgagtagctgggactacaggcatgcaccaccatgcctggctaatttttgttttagtagagacggggtttcaccatgttggccaggctggtctcgaactcctgacctcgtgatatgccagcctcagcctctcaaaaagctgggattacaggtgtgagccaccgtgcgtggcctagatttcaaacttctgttgtaatccccatctactgttggttacacaccgaatggaaaagttgattccatcagaatgtcaggtatgagctaacacggaaatgaaggaagtgcctcatgatgacaaaaccaaaagaccccaagaactgaagagcccttcagttcagaacaatggctatgacgggatagagagagttgaccattagaattagatgtgaaagttctcaaaaactttcagtcagactgaaatttcagtcaggcatggtggctcacacctgtaatcccagcattttaagaggctgaggtgggaggatctcttgagccccagtgttcaaggcagcagtgagcccctgtactccaatgcctgagtgacagagggagaccctatctcttgaaaacaacagcaacaacacatttccccagccaagattctgatacgctcagggaaggggggaagcagacacattgtatttggaaaagctccccagaattttctgttaaatttcctctgctctcttctacatccctcccctctgagttttacctcagtgctggatctagaaagatgatgtttgaggaataacatgatgaatctataaagtcacagaaataatggaaagagtagatacagacttatgctccaaatacagaagctgggaatgtacaatttaagaggaggtcaatgtagagcaaacaaaacttcacttaagcttaaataagtttaggtggaaaaggcaaaagatataaacagaggttacacaaaaaggggttaaaatagttaatgggtattcataattagtaagggaaattagaagatttacagaggagatccctcttttgaggtatataactactgtgtccacgtctaaatcatcaaataattcttaacatctcatgagaccgggtacagtggctcacgcctgtaatcccaacactttgggaggtcaaagtgggcagatcacttgaggccaagagtttgagatcagcctggccaacatggtgaaaccccgtctctactaataatacaaaaaatttgtcgggcatggtggcgggcgcctgcagccccagctactcaggaggctgaggcagcagaaacacttgaaacagggaggcggaagttgcagtgagttgagattgcactactacacttcagcctgggcaacagagctagactctgtctcaaaaaaaaaaaaaaaaaagaaaagaaaagaaaaacaaacaaacaaacaaaaaacccatctcatgaacaaaaaaatcagctcttgttaataatgggccaatcaccatccccttt

SEQ ID NO: 1243196 - DNA, 4001 bp, Homo sapiens
tggcaggtgtcaggaggtgttttccacagacagggatctgggccaggcttagtcctggtttctcccagagcctggcccagcctcggtcacccctgctaggactgcggccagtcctgcccccggaacctaaacctccagccccttcctcctgcagagaaggctcgggcccttaagctgtcaccccagcaacctgcacctgcatattctgccgtggagggattgtctccttgggaacaggctggaccatggggttgacctccctcagcttgggtggctgctcccttccctctgcaggctgtgcagatgaaggggagccaacatcctgtccctaggtgatgcccccatcatgaaaggtaagctggtctgtggattctgggaccccacatagaagaccataggcttatgatgacccttagggttagagagtttccctgtcattgttcaaatatggaggttgtggcacagacagggcagggactagcccagatcccctagcgccatggtccccaccccaaccgcctctgatatccacccccacaggagtgcgttccccaaagtacctcctgcagctcactttctcctttttcctggggtgatggtggggcaaccccagactaacagagcagcaaccctgggtcccagttcattcgctcctgcccagaggcaaggcttttactttccacacctgtccaattagcaggctagtctgagccatccttggtacgtgacctgctctgacatgcctggctcaccctggggcggttacttggctggctacagagggcgcaccctccatgatctcagtttcccactggcttgcaagcggggtggaggcctgtccagggtcacacagctggccacaagcagggaggagccaggactgtgtctgctgatcctcaccctgggacctccctccatcccacttcctgtgaggccactgctggggcagaccgttagccaacaccgtcctcctgcacctggggtttatcagcttgagactcgcttatcagtttcctcatcagcctccttccccagcggttccctcccgggcatgatctcttgtcagttttcctggttgacactagcaccccttgggcccgctggagagtggccaccttccctgggacgggcccaccttcagctgggtgacccttccacccagctaatccatctcgagccccccacctgttgatgcagcccccacccagctgacctgcctttgaagctggcactgggacttaggaaccacttctgccaggtacaggctccatctggaccactctgcctcactgttgcagtcaaccccaccagcgatttgttcaccccactcccactacgacacctttaggactttcgtgtcctccggtggccccgtctcctggggtcccctgtacacacacatccgtaagaagggacttgctcagtcccgcgggaccttgttccttccccctttgacgaaagccccctttaacctgtctcccttgggacctgtttacttcgccccccccccgacctgtgccccccacttgctctgccccaccgggtgtgacccctcccggcccctcaccatggcgaagcccgagagcaaggcagacgtgcggctggaagctttgagcttggcccggctgaggtagaggcggcgccagctgagcgcccgcagcgagtgctgactggcccccatgaggtccaggtagccgcggtgcacgaactcccggtacgtggccgagcctgcagggctctcgccctcagggttcagcggggcctgctcgcccgcgtccccctcgccgcccttcatcctggggggggggcggcaccaggcggtcactacggggcggaagcgcctcgggggccccagccgggccggcccaagcccgggggcggccccattcccagacaggacgagcaggatgcaggcggcgggcgcccaggaagaggcacccccagtggagcaagaaaagcagcgtctgcggggagccccaggagccggagcgggacagcggaggccaaaacaggaactgggacagaggcggagccggggctagccacatgatggggtggagccggggaccaagtccccgcagtcccgggcccgcagagattccccgcgacccctacccaccaagaacgttatccaagcgcccggaccccaccgaggtgcacgccaaccccagccccctccaaggtacagctggacaccccaggtgtccacacttccaaatccctcccaaaatgagtccaggagaggtgagcccactcatctgtaggtagggaccccgcagatacacacacgaactccgcagccccggctggaagattttgagttttatagcaaaccgtattgtacagacccggggcccaggggcccagcccggctgggtcccccgcttgcccctcgccgggctgcctcttccctcccccaagcggccccattctcaagcctctcgctatccccaggccccacccctccggcctttggtccgcccagccctccccccacccgcgcacctccctgttacctgaggtatgtggatagatctcccctcccctacatggtaagccccggccccccggaggcctgcgcggaggggcgggacctggcccggctcatccccggggtcccgaagccccaccccgcgctcgaggaaggggcagggaaggagggccagcagagtctgttactaggttcccatggcaactaagagggggccatttccagccttagcactggcatcgggaggtgtccgttggctgctatttccatggcaaccaggagtggcagttccctgggcaaatgggatacaagtttccatgacgatgaaagagtgggaagagccaggctggaggagtcccatggtccccattcttgggctggcgcccccagccataatgcgggtccggcgggtgccgccgctcaatacagtaaaacaagaacaagcctgggggtggcgcagtcccaaatgggcgcccaccggcccggtctcaggtctcagtccaagctggtccagtcccctcacaccccggctcccccaggtccgagattcccccggttcaagtaacacttcagtacagatgaatgttcaagtattgtgcggagaggcgggcagggggttggggcgcccctcgccactcccctgggccgcgagctgaagagcggctgcccgcggcccccactccttgcaatagctgccgttttcagtgacgttcaaggagtcagggtcagggggaaggaactgaagcctggggaggggggaagcagagaggtgacccccaagggggtattgctgtccccacacctgctctcatccccacctccagctcagccccagcttgcccctggttcccctacctctgacacctggatccccaattgctcctccggttttccttttgtggccccacccccaccccccactccaagtaactggtctttgttccctgaacccttggtggtctgctgtctgccccgccccccgccccttccacctcccccagcccctggctcccatatcctgtgtgtgtcctttccccattctcccccccaacacttgcaccataacccccctcccaccgtcccttcggctcagcaccctccagtacctctgacccactcccccaggggatggacaatgaagcaggtagcaggggcaggacataggaaggagaaacccccagagatatcagtgcaggggggaaagaagggggtggctggcttgagtccctgggtgggaatcccaagtcactgacactcaggaatcccagggtggtgaggtgggaacctggcctcccagcaggggtgaaatgaagccggaggtccaggctcctgtcgagtccgggggagggtggggggcgcccaactagctgtccttgagaagcagcttctcctcagggcagcggaaggggccagggggcccggcagctgccagccgggcacaagcttcgggtgagagctggcggcaggagcgcaggtctaggcggcgtagacgagggcagcggcggaacag

SEQ ID NO: 1243197 - DNA, 4001 bp, Homo sapiens
ttagtattaccatttaatgagtgtatcgttatgacacaggtgctgtgttaatggtgttatgtacatttaatcctcataataatccagcgaaattggatattttatcttcactttatggatgaggacactggaggctaacagaggtagctagtgtggagatttgatctcaacatgaaactcctcctgactgaccccaaagcttgttctctcaaacactgtgacattggaagaaaagcataggggtttggaaatacgtgctttaaaaggagggtaatgctagcagcaatgtggaagatggcctctagccgagaaagaggtggtcagggaaaacagtgaagagtaaagaaaacatggcaaaaaaatattttccaatgcaaaatgattctacagtatttccagaataacacacaagaatacccaggacaattctaaaacaagagtttttactagggtttagttcaaccaaaagttaaaagagcttcaatgttgcactggattattcagacattcggtgggacctacttaccctgtccaaggggcacttcatccaggaagctgcaaggtccaggcacatgactgcactgctggtctccgtggtgcgtgcggagaggccgacacacttcacccgggacaggcgcaagtactcctctgctttcctggttaaaagggcagtgtgttcgctacaacttattcagaagtttgctcaacacgttggtaaacaatgaatacagcctggttagcttcacactaagcctaactcctgtggctcgtttatctggggctgggaatgaaggtcatatcctctggtgagaggaagacagaaccagcactgactccaaacatcactgtgctcaaatgctttcaggcaaaaggaagttaaattttgacaaaaaaattacccttctttcctccttccattactggaacaagcacgaactatcagagacaggcaggttagaccagggttcctcctttcctcctatttcctttaaatcagtagttcttaaacttgatggtaggcgaaaatcaccttggggacttgcaaattactgggtcccaggccgagttactgatcagcaggcttgaggtgggacccaagaatttgtatttctaacaagtgacaagatgatatggctgttgctggtccaggaaccacattttgagaaccactgttctaaatgactaccgagtcctgcaggtttgtcttcaaatcttttaagtgctgttttccttgccttccctcgcctgactgctccacgttttagctacaatggctttatttcgaaccccggatcccgcttcccatctcaacgcttttacaggagctgtcgcccctgcctgggctgctcttgccatatctttcctcgcctagcatctgccatcaatccggcctcagcgggaacggcgcctgcttttccgagttttgtttgtttctttgtgttaaaggcagccgctaggccgcgctccaccccaagcccagtggctcaggagcattgcccggttaaggtctacacagtcctcgcccttacagacagcggggtctgcgcctcgttgtcgggttccccgctataaacccgactgcagtaggcgttggcggaatgaacggaaagttctccctggctcatttttctacccacggacagggctggctgttcccagggacgtgtgccatcgccgtttgctatcgcccttcttgccatctcattcaagctcacggccgagaagtttttcttgaagtaggccctaaaccccgcccggccccagcgctccccgtcactcccccgccgcccgtcgcctgggaagggcgcgggcctcacctgagggcccagggccgcgaggcggaagcccagccctggtcttgcgcggccgaactcacctcagcatgtcgggctcggcgaggcccaggcgcggggctaggcgcccgatcagctccgaccccatggcgccggcactaaagcgaacaattcccgtgaacgccgcgggtcaacgaaacccgcgcgcaaaggctgcaccggccagtgagagccaggccccacccccggcgcatctggattggttaggacaggacgttgagaccgtcccacaaaccaatcagggtcttccttttgcgcatgcgcatcaatagcgcaatcgccaacgcagatgcggtgaacgtggacttgtcggctccccctccttccattccttcttgacaaactcatcacacactgcctttccctcctgttgtctcctgcctgccgccgggcgatccccactgccctgcactgctccgcccactctcgcacgctgtggtgagattggctggcgctcaggtccgtccatctagcgttaagtgacagggccaataagcacgcgagactcgggttcctagaagtaggccaatcaatgagccgcctgtagggcccgggggcggggctagagagggcggggcttggaggggccgcagcgtcacatgaccgcgggaggctacgcgcggggcgggtgctgcttgctgcaggctctggggagtcgccatggtgagtgctgagggggcagtggcacctgggtcgaccctccttgtagcccctgctctctcccaccgccccgcactccagcgagtggagaaggggccccacagaccgttcgggattaagaccagcccgatttggcctgcgggataggggacagcaggaggaaggccgcgggcaggctgatccgggccggggtgggcggcggctcttggctgcggccgttgctgagagacggggcggcctctctgtggggttgacttggcatgtaggctttggggtccatgaaggcctgcggcctcctttaagtggaatcggtcacctgcctaccacgaggggaccggtagtcctaggtctgagcgtctggcccccggggcgcgtggaggccctgagactcggaggtggcgccgggacccgcccagatgttgcgtttctacctttgtgcctagttgtgctcggccgtccccacgccctcctggaggggtcgcagtgattccttggcctttcttggcctcatacccgccttcggctgcagtgtttgtcagcgagttctggggacctgcttacatgaatttcctggaaggactcaggctgtcttctaatcctgacggtcgcaaaggagactgattgtttactttagcatttgtgcattgggcgcaccttgcctcttttgtctcgccattgataaaatccaagtatttgacttgctggaagcagtacttctccttagggcccgtctatgacggcagcaaatcgtggtgtggctgttggccggtaaacttgaacttcctcaaaatgtgaatctttgtgtctggttcccacaaaggcaagttgtcacttgcattttattagcgtttaacatagcctgcactgtgtaaataaattttttgagtatatactgtatgtccgctttaattaccttactcactctgtgtagataggcttctgtaaatctgtaagcctggaaacagatttcactttaaatgtcttaatgccagaaaggattaagtgttttacaaatactattttcatataacgtgttgccgtacaaggtgattttgcctgtttctcaggatttttataattgggaattgatacaagaccggcgcaaaatttaactttaggatttgtgtgtttccagcgtttatggattgacatttatattgttttgtaatggaaaacacttaattgaggatgtattacacactccgattctttgttgggtgaaccagttgggagcaatcagccagacacacagtcttgtcctcatgaattttattgggaaaggaaacttgagtattcgttctttcacagtcactgtctataatttaggcagctcgcttagtcttcttggtgtcgcacttttgcatccgaaagcaagtgttggcggcccctttggcccttcccagccctaaaattccagaatccacttcaattcatcaaacatcttgtgtgccttcagtgtcacggactgtggccctgggtaccaatgtc

SEQ ID NO: 1243198 - DNA, 4001 bp, Homo sapiens
ttctctggcttgctcctgataccctcgaatggctctgggcccctcagtcctcatcatggtccccgggaacagcagccactggggagcatgggacctcctggtaaagggcttccccgcatcacctcctttgatcctcctagcaacccactttgcagatgaggagactaaggctaggagaggtgaagccgtgccctgaggctacagagccggtgggcgatggaactgatatttgatccccgtgggctgacacccccaggcaccccagccccttcaccaaacgagtgagccaacctgctccatctgccccagtgcgcccaccctgggccatgccctgcccctcctttgttctttcagattttcccaccaccccaagaagggcatttgcaggagcccctgctggccaatgaggaatcagaactggctgccccttcccaccctttgcaggcagcagaggacactggtttaccaccagggctttggggctccaagtccagggctccctcctgggactgtcctcaggctcttgaacagaagcttctggatgccacatacatgaggtcaccacccaggggctggacctgagaagtcacttcccgttcagagtgacacaggacgccccaaagtccgaagcagcttgacgctgtcactcataacctcggacaaatatgctgccaacttacaaaagagagttcaaaagtttcatttcaattccttttgtgctttttagttttacggagttggaagaatcaatttttaatgttatctttttaagtccctttaattgaagatggcagatgttgatggaaagaagttaacattaaaaattgatgtttcaaatttcacaaaggcaaacaggataaaagaaatgaaaacagttgcaccttcgactgacgtttctttcaagtgtgcggcatttgtacttctgaggttgttaaagctgcaaactgctctgagactctgggacacctgtatgtctgcgtttctttggcacctctagtggccatttactcctttgcctttgaagacaccccaggaggtgggtgttcttatccccattgtgcagaggaagaaaagctggtcaggaggagtgggcgtcttgccccaggtcacctaggagggtccaagaccacggccatgtgacaaatcttagttctgccaagtcccctccagtaaaacagctgattacagggagaccaagaaagtgacacgaagccctgggggcgctaaagtgtgagggggtggtctgtccacgcaagcggcacttgccatttatcacagacgagccctcgccccagtgccgcacacctggagcccagggtctcctgcagctccccagcctcccaggggccgccctcccaacccgccgcactcttgagcctcctgagagaagctaagtcgctgggacctccagggatgggggctgttcatgggcacccaagggctctgtccctcctgagcaggagaagcagaaacccagaaggcacccagcctggctgccgacccagtggccttggaacagctgggcagtaagcccgggctggccacacccctctttcctgctaggagcggcggtcacatggcccagggtacgctgggactgtggccgcttcagctgcttggctgagggtaccaggcacctggacagggacacagctgaggatctgggaggaacctggtgtaggggagaatcctgccgggctccagagaacccaggcgagggcctccactcaggaccacccgggacccccgcctggcgccagggctctgcagaccctccggtccagctgggcttgccacgggtgcctgggatgtgcctgattccctgccccggaacctggccccggacactcacctgacaggcagtggtgcaggagcccagtgagcccggccaagttgtgcactaggagggtcaggggaacacggatcacagagtcccccgcgagatcgggacacccattaccctgtggggatccaagaggctctgagaggccagagggaagtgagggtatttcacggggagggaggaggcggcgcaggcagtgggcggggccaggaaaatcactttcataagcgtgagtcagcaggggcccgtgatgaatgaacttgcacactgggcgggtgtcacgctgcctgcctcatggccagccttaaagggcccctgctgggcggcctgccagggggcctagggtggcgctccctcccagccacctccccctagccagacccccatccctggggctcagtctctggaggaggaaccagtgacctctgaatgagccagcctggcctttgccataagcgaagaggagatggctttgtcccgcacacagttaaaataacagtacctttaagtggcgaaaccccgtccagttcccgcattccacctggatttcactgcaccctccaatccccaaaagccctctggcaccagcctgcctgggctgcgaatccagctttgccatttcccagctgcagggctctggcaagctgccttagggcccgcacctcagtttcctcatctgaaaactggggccaagtcacagattgtctctaccagagtggccgtgagggtttacatgacatccttcttgtctgccatgcttagaacttgaagcctgctcccaggctcttctctcctgttttatgtgggtagcactgcacaccccacaccttgctgtttcttaattattattattttgagaaggagtttcgctcttgtttcccaggctggggtgcaatggcgcgatctcggttcactgcaacctacgcctcccgggctcaagtgattcccctgcctcagcctcctgagtagctgagattacaggcatgtgccaccacgcccggctaattttgtatttttggtagagatagggtttcaccatgttggcaaggctggtctcgaactcccgacctcagatgatccgcccgcctcagccttccaaagtgctgggattacaggcgtgagatgccacacctggcctatttctgaattattttattgtctctcttcccaaaccagaatgtgagctctgtgtgggcagggaagtatattcgtgactgctctacacagtgtctagaacagcgcttaggacacataggcactcaacatcggttaaacagaagggaggcagggagggagggaagcagggggggaaggagggaggaaggcagggagggagggaagtagggagggaaggagggaggaaagcagggagggaaggagggagggaaggaaggaggtagggagggaagcagggggggaaggagggaggaaggcagggagggagggaagtagggagggaaggagggaggaaagcagggagagaaggaggaaggaggaagggaagagggagggaaagagggaggaagggaaagagggaggaaggcagggagggagggaaggagggatggaaggagggaggaaggcaggaagggaaggagggagggagggaaggagggtggaaggcagggagggagggagggagctgccgcggtgcacacatgacctcagtgtccattcgctgttgttttcagtgttgatgttgttgtcgcccgccctcgtcctcctgtctgccaccctcgaggggcgggggatgggggtgcacctttgagtgcaaactttaagagggaaccaaaaccagtaaacaaaataatattttgaggcaattaaaaaaaatctaaatgaatgcaaaaaagccaggataaacccagacaggttccagagcagtgccttggggctgatgggaagaggagaaccaggacttccgatgccgtctgtgtttataataaaagtttgatattttttccattctggattttttttcatgaattttgatgtgtaagaacactgcatggacacagtatgtattctggtgatgggagtgctttgctgcccctaaaattttgtgcctgaggtgatgcctccccctcctcaccctcgtcctggccctggtggccacagccctgccctggagtcaggcacatcctggaagccacagccc

SEQ ID NO: 1243199 - DNA, 4001 bp, Homo sapiens
gtagtcctagctgcttgagaggctgaggtgggaggatcacttgggctcaggatatcaaggctgcagtgagctataattataccactgcactccagcctggatgacagagcaagcccctgtctctaagaaaaaaaaaaaaagcctccattttactgagcattgactctactgtgccaagcttggagcaaacgcatcatctgattaattctcatgacaatcctaccggttaagccccatgggtactagggtcaggcattcccaggttccagtcccagggcctccattatctgtgtgtcctgagcaaatgacttaccttttttaagtcccagtttttaaggtctcagaggccttgctttgtgatattcttggatcactaaactcattttgtggaaattaactgttcctgttttttgtctcccctccagaccgtgagctccttgagtgcaggaggatctctgtgtccactggtgcatagtaatttttactagtggatgtttattgacccaaacaaccaggagattctcagatccttaattaggacccgtcatttcttagtactgacaaaaatatgaattaggccaggcatggtggctcacacctgtaatcccagcactttgggatgccgaggcaggcaaatcacttgaggccaggagtttgagaccagcctggcaaaatctcgtctctactaaaaatacaaaaattagccaggcatggtggtgcacacttgtaatcccagctacttgggaggctgaggcacaagaatcacttaaacccaggaggcagaagttacagtgagctgagattgtgccactgcactccagcctgagtgacagagtgagactctaaaacaaaaataaaataaaaaattgtaaggctcttcattttaactttggagaaagtaagtgagaaaacttaggtcctaaagcccccagggggttggaggaggcagaaggagagaggaagagacaatgaagtgccaaggcctaagtcaggctccatttattcaattcaacaaacaccacgtggtgctggacttcctctatccccgggatgccaagggctcctcaccaagccgtccttcttgtcttctaagaggcatttcatggcagtgcggaactgctgggcgtctgtcttcctcaggtcctccagcagcttctggggctggtgcagacgctgctccaggtggttttccacggctgcctgtatttggggtgttgggagagtcggtgagaacagaaagagcaggagcacatggtcagcaccatggccagcggcccagcccggccccctcattccctgcagagaccacaactagtggccagcagtctggtttggccacctccaaatttcctcattagccgccaacatttaaaaatgaggggccgggcgcggtggctcatgcctgtaatcccagcactttgggaggccgaggcgggtggatcacgaggtgaagagatcaagaccatcctggccaacatggtgaaaccccgtctctactaaaaatacaaaaattagctgggtgtggtggcgcacgcctgtagtcccagctacttgggaggctgaggcaggagaatcgcttaaacccgggaggcggaggttgcagtgagccgagatcacgccactgcactccagcctggtgacagagcgagactccacctaaaaaataataataataataataataataataataataataataataataaggggattcctcacaagatcaagatttccaacttctcttgaaaaagtaaaggtttggcaacaccgggcgcacatccccttttaggcaataattggcaagccaagggacagctgcttgttgaagtaactctcaggcccagccagcccgattcccccattccatggcctgcctggtccctgtaggtgattgagtttcccatcagcagcagctggcctttgtccaggaagtttagaaccccagatggcactgtgcccaaacccaagctaccagcgcaggagcaaaatacaggcgaaatgaacatactctgtggcgccccctacagggcaaggagcagaagccatcagcctctcctgaaagagatttcctctgctgtctggggaattgttctctaaatctccgttaaacagacatgcccagtgtgatgtcatgggcaaaaggtgaactctagacccagacaagccacatgcaaatccccaccttgacacttactagctgtgtggcttggacgagttacttaactagggttgctgggtaaaatacaggatgctcagttaaatttgaatttcgggaaaaactacacatttttttttttttagtataagtatgtctcaaatgttgcataggacatacttaacttaaaaaatcactcattgtttgccaggcaaggtggcccacacctgtaatcccagcactttgggaggccaagacaggcggatcatgaggtcaggagtttgagaccagcctggccaacatagtgaaaccccatctctactaaaaatacacaaattagccaggcatgatggcatgcacctgtagtcccagctactcaggaggctgaggcaggagaattgcttgaacctgggaggaggaggttgtggtgagctgaggtggcaccactgcactccagcctgggcaacagagcaagactctgtctcaaaaaaaaaaaaaatcactcattatttatctgaaattcaaacgaaattggacatctgttttttgtttttgtttttgttttagagacggggtcttgctctgttgcccaggctgaaatgcagtggtatgatcatagctcaccgtaacctcaaactcctgggctcaagcaatcctcctgcctcagccttccaagtagctgggactacaggccacaccaccacactcagctaattttttgtttgtttgtttgtttgtttttgtagagacaaggtctcgctatgttggcaaggcttgtctccaactcctggtatcaagcaatcctcccacctatgcctctcaaagtgctgggattacaggcatgagccaccacgcagagtcacatctgtatttttatttgctaaatcagcaacatttcttctgggcctcagttttcttatctgcaaaatggaggcaataaaaggacttaccacatagagttattacgaggattcagtgtgtaaagtgttttcaatagttgctagcacacagtaagtgctcaatagtgccagctattattctctatcttgaccaaggtgaataatggcttaattaaagcctcacccctaaaatgaaaggtccttgtgggtagtatcatgactgccttgttccctactgagtcctcagtgtctagagctatgcctggcagaaagcagatgttaactcagtagatattaaatgaataaataaatatggtatatacacaggaagaaacgtatcagattaaagtggatacatctcatgagtatccattactgctagagagaaaagtggcaagcattgcttctctttcagtttccctgactgatgaagaagaaaagaaaagcagatgccatgtggggccaacagccacctccagctagtggctgtcctgggacctggcagacaacaagctctctgagtatatttgtgatatcaatgttggttgatgtttccattttcattcaaacataagtaaaaatggaaacaatgaagacatatgtcagaactttattcattaattaatgacataaatggtcttttgctaaactgaataactttctcaatactgaaagaatttttctccaattttctgtgttatccacagtgtgatgataaagacacaacatgccacactaggctaacagtcaggcaggtgctgtgcagttcaccgcagtcaccaccacaggcacgagccctattgccccttaaggcaaatatcctttgccacctatcaacacgcttgtgctattgttttcattacagtagtacatttcttggacccatggtagaaagactgatcactatatccaaatatccactctctcactgctctttatcaatt

SEQ ID NO: 1243200 - DNA, 4001 bp, Homo sapiens
tgcgatggagtctcactctgttgcccaggctggagtgcagtggctcaatcttggcttatcacaacctcagcctcccgcgttcaagtgatcctcctgcctcagcctcctgagtagctgggactacaggtatgcaccaccatgcctagctaattcttttgtacttttagtagggacagggtttcactatgttggccaggctggtcccgaactcctgacttcatgatccgcccaccttggcctctcaaagtcctggaattataggcatgagccaccgcgcccggcctgtaatcttataaagagatggatggatggatggatggatggatggataaattaataaacaaataaaatacttagactgaaagaatatatccaaaagtacccattggtgttatcttagggaaaggagtggttatgggagtctttcactttaacataactgggtatccctgatatgaggccccaagacccctatttcttatcgatcatagtactcatcatattagaattgtttattaatattggcgtttccacactacctagttccctgccccatgtccctggtatctgtctgtatgcagcttataatgcaacagtaaagggaatgggtcctggagccaggccactggttcacatcccagttgtgtgtccttgatttacccttcctggacctcagtttcaccattgtgtgcaatgggataacaatgggaactacattgtgtggcacttgtgaggattagattgtttctataccaagcgcttagtagaatacccactacatagaaagcactcaataaatttcagctcttaggccggttgcggtggctcacacctgtaatcccagcactttgggaggctgaggccggcagatcacctgaggtcaggagtttgagaccagcctggccaacatggtgaaaacccatctctactaaaaatacaaaaattagccgggcatggtgacaggtacctgttaccccagctactcaggaggctgaggcaggaaaattgcttgaaccccggaggcagaggttgcagtagtgagccaagatagcaccactgcactccatcctgggcaacaagagcgaaactccattcaaaaaaagaaaaaaaattggcccttatgctagagtgaggaggaatgatgcccgtggagcaagggtgtttgttgacttttaacacattgtgcattgattgacattttttgtaatgagcacatattactttttacaattaagagacttccattaagaatttttattaaaaatctataccatcccttcccctctcctctagggcattttacctttgaaactgtatgagatccagcagtgctacaatgggagtaaaatgaaaagacatctttaaaaggaatcattccagagagatcacagctacattctgtttgaaattcttagaagaagcaagtggagatcaagggggcacattaccattcagatagcttccatctattatttcttcctaaaaggcaaagagataacatcaagtataacaaccaaaagttggcaattccagtagaggggactctgattaacagaaaatagaatactcaccgccatgttttgcaacaatggatgcaaatctgtaagaaagccattgaatgtataactagaattgaattgtgtgaccttcaaaactacaaatatgggttagaggaaaagccccagaaagccactcatgaaggaaatttttagtgaattttaattataactgtccactctgagaaaaccgtggcttgaaaaatcctcttagaataatcctgaaaaatcatacatgcacacacacacagcccaaaaacaacttacagcatcatgtacctaatgtatctatcccacctcattccctaaactgtgtggaaaccacaaagggtgattcttccctcaggacttaccctgcctggaatttggcactgtataactcgacactccatggctcagaaaaaggaataggaaaagggagtatgtcgtaggttcctgagacattctcctgtagttaatttaagcatagaagtgattcatgtttttttaatatatatatatatacacacacacacatatatatacatgtatataaacatatatatatatatggacattcagaagacaaaaggaaaaaccaagtacacccagaatcccttgaagtcttttttaaaaataattttaaaactcacctactttcctccatctaaacccccattcttgtctaagacactatcatctctctccttggtgactacaatggcctgtttatcttaccactacccccaactcctctcaatccagcaaaaaggtatagtcaaaagtagactctgggccaagcatggtggctcacacctgtaatcccagcactttgcatggccaaggtgggtggatctcttgaggtcaggagttcgagaccagcctggccaacatagtgaaaccctgtctctactaaaaataaaaaattaactgggtatggtggtgcatgtctgtagtcccagctacttgggaggctaagacaggagaagtgcctgaatctgtgaggtagaggttgcagtgagccaagattgtgccactgcactccagcctgggcaacagagcgagactctggaaaaaaaaaagtatagactctattttatctgcaagaaatttatatccagaatacaaaaactactcttataattcaataagaagatagacaagccaaggggaaaaaatgttaaaaagatatgaagttggccaggcgcagtggctcacgcctgtaatcccagcactttgggaggctgaggtgggcggatcatgaggtcaggagatccagaccatcctggctaacacggtgaaaccccgtctctaataaaaatacaaaaaaattagacgggcgtggtggcgggcgcctgtagtcccagctactcaggaggctgaggaagaagaatggcgtgaaccctggatgcggagcttgcagtgagccgagatcacgccactgcactccagcctgggcgacagagcaagactccgtctcaaaaaaaaaaaaaaaaaaaagatatgaagctaaacttcataaaaacagatgtaaaaatggccaataagcacacaaatgattatcacattagctaacaagaactagcaaattaaactcacaacgagaccactacaaagtcactagaatgggcaaaaatttcaaagactgactatcaaatgttggtgatgatatggaacaacaggaactctgatacagctgcttggaaaaactgtttgacagtgtcttacagagttaaatatacaataccctatgatcaagaaatgccacccctaggtatttaagcaagagaaatgaaaacatgtctacacaaagatttatatagcttcattcatagtagccagatattggaaacaatcacatatccaataacaggtgaaaggttaaacatggatctccattcagtgggataccattcagtaataacaataaaaagaaattcatcataattttattctagctatgatggagtaattggcaatggataaaccgtcctgccttaaacaattaaaaagctggctgaaatatgtgcatccaaaggtttttcagacattgggcagcaggtagcacaagactgagatccctgagcaaggaaggcaaacaagctgagctctataattgctcctgctcactgcctggagtctccatccaacagcacaaggagggagaatccaaacagagcctacaggtctcactgagcagaagagacggagtggaacttcagggaaatcaaggcagctagaatccataagaagaatacttggagaggaggaagttgcacagagagaaagttctggagatctgaagaagggtcttttgagactttggctgaatatttatctacctttgcatgtaagaaacctcctgaggctggagaatgaaccaccagtaggcagaacaatccttggacctcacaggggaatgagaatagctcctgcaagctgcaatggaaaaacctccaaacacat

SEQ ID NO: 1243201 - DNA, 4001 bp, Homo sapiens
gcaatgagctgaaattgtgccacttgaacccggaaggtggaggttgcagtgagctgagattatgccactgcattccagcctgggtgacagaatgaaactcaaaaaaaaaaaaaaatgaatcttataaaaaaaaaaaaaaagatgcgctgaccaaaatagatgaccacactctcaaatgtcaaatgtgtttggggactttatggtgatgtgtgggaaactgctgtgaaattattgatggctttatcaaaatttcatttaatattattttcatgtcatcgtttcgattttaagcaaattgaaaagggccacaaaaagtggaatggaagggggtagaattgagacttgactggaaggaagaagagagagatggagaggaaggaaaatgagagagagcgtgtttgctcatctggtcttgggaactcataaccaccctgcaatccagtgttctcaatcctggctgcattgaaatcacctgagaagcattaaaatcaggccatacctcaggccacaccccagaacaataacatcagattctctgagggtggcacctggcagggatgttactaatctagaggcaggtttgagaaccactgctttatctcctgccgctccaggtgtgctcaccagagcagcggttccagaatcacctggaagcttgttggaagtgcagcgtcagctgggcgcaatggctcacacctgtaatccaaacactttgggaggccaagggaagaaggaggaagaagaggaagatgggagtcctgggcctcaaccaagagctcctgaatcagaatctgcatttaagatccccaggtgatctgtatgcatatttaagttcgaagtagctgtccctttcttttcttttctgttcttttttttagatagggtcttgctctgtcatccaactagagtgcaaagtcactatcatagctcactgcaggctggcactcctgggctcaagcgatcctcctacctcagcctcccaagtagctggcactataggcacatggcttttttttttttcttttgagacagagtctcactctgtcacccaggctggagtgcagtggcacgatctcagctcgccacaacctctgcctcccaggctcaagcaattctcctgcctcagcctcctgagtagctgggattacaggcgcatgccaccacgcctgtttttgtatttttagtagagacagggttttaccatgttggccatgctggtctcaaactgacctcaggtgatctgcctgccttggcctcccaaagtgctgggattacaggtgtgaaccaccgtgcccagccatttttttgtattttttgcagagacaagggtctcatgatgttgaccaggctggtatcaaactcctggcctcaaatgatcctcccatcttggcctcccaaagtgctgggattacaggcatgagccaccgcgcctggctgagacagctttctgattaaattttgatctccccagggtctgttcctttgctattttctgtctgggcttcgatgttacacttacctcagtatttgagatgccatctgctgtgactggacttaaatcccgactaatgctgtgtgttttctcccaaaggctaagctaggctgttctccccatttctctggctagtgacactgaggcagaggcctcagggccttgcaccccagctgtaccttctggacgccagcctggaagcccctcaggtggctgcacttgatcatctggtaaagcaggacttgagccacagtggcatccagcaattccaggtcattgtagaaacaaaccagcagccccagcctgtgtgagaagaggagggatggtggtggaggtgtaaccgcagaaccagcccattctggttcaattttgtgtaataaaatggtgagttgtttttcagttgccacggactcccaggttgaaggtcacataacctgaacatcctcagatgaaccaaatgtgcaaccacaggcggaacctaactgctcagacgagaccaaggaatgggggctgaattatgaagtggacaccacatggcatggtccacgatccaatcagaatgagtcctggcatcacctcatggcatgatccaatcagatcacacctcccagcatcaccttgtagcaagacccaatcagatcaagtctcattaccctccgcctataaaacctgccccagtccccagctcagagacacagatttgagcactgtcttctgtctccttggcagttgattcacagtaaccgtttctctctacaaaaacctagtgcttcagtgtttggttttccattgcgcatgggcaaacagacccagtttggttccataacagagcgctgagagctggtggacacgacaccccctccccagtccaaaccaatggggtcttgattatattaatagcagctaccacttatcaggtcttgcactgagccgtttacctgcattatctcattacagcaaccctacaaggcaggtgctctcattagccccatttcacagatggggaaactgagatttgatttgtccaaggcaagtcggtggagctgggacttaaatgtagatccatccacctatgccatctctccacctgggatgaataaagggaataaggaaagaaaggtgccggtagccacagaaaactccccattttccacattacaatcactaaattctagagctgatctcaccctgagggattctctgaggcagagatctgtttctaggatgccttctggtacccacccagatgatgcaaagatttcagaaggaaaacaaaaaagactggaggaaaacaatggaagggcagaagtgagattggaaccctggtataactgagagcaatgtttctaatcattaagagcattgattcaggcctactgcagtttgaagcccagctctgtgagatgtttgctctccaccaagttacttaacttctctgtgaggccgctatacacagttctgcagtgcacactctgtactcccatactgtacagagacagggtgcctctccctctctgagcctctaataaatgggaggttttctttgttcatcgtagcacatcataataaacatgagtgaaagaaagaggatgattgtgaaagttaaatgagaagtggtataccaactgatttgcatacatcctggtggaaaccaagcactcattcattaatgaatgctcttagagttagaatgaagactacctagttgaccacagtcagcctggctccaccctctcagagcgatattgacatattcagacatgcccacaggagagctgccaggtccagggaaaagatttgaaagtgtgtctcatgaggaaaagagatctgcttaacttcgagtaaagaagactcaggggaagtgagggctgaacgttaataaccacgttgagaataactattcacaacagccaagacatggaatcatcctaagtgtccaacacgtcagtggatgaatggattttttttttaatttggtggatacacaatggaatgctcttcagctttgaaaaagaaggaaattctatcatatgggaccccatggatgaacttggaggatcttatgctaagtgcaataagctaggcacagaaagacaaatactgtatgacctcatttatattatgaatctgaaaaacaaataaacaaacgtcatactcatggaagcagagccttagaatggttggtaccaggggctggaggtgggaagggagttggagagacttggacaaaggacacaatgtttcagttaaataggaaaataggttctggagatctattgtacatgctgactacagttaataacaatgtatcatatactcaaaaattgctaagagtagattttaagtgttctcaccgcaaaaaaagtatgtgaggtaatgataacttaattagcttgatttagccattccacaatgaatatatatctcaaaacatgttgcacaccatagatataatttttatttatcaatttaaaaaaataaattataaaagaaaaataggcttggcgtg

SEQ ID NO: 1243202 - DNA, 4001 bp, Homo sapiens
ccaccatgccactggcagaccaaacccagcttcaggtccgagggtcccgccacatcctgtccaggcccagccaagcaccgtgcctgagacacgctgtgcagagaggagccagctggggctgctgtgtgtcccagggccagtgggccagcccctctgcgctcatgttcctggacctggggagcaccggcgcaccttgatgacccggccccggaagaggctctggtccagctccacggcggcctgcacggagcccttggtggcaaactctatgtaggcataactgaggggaggggcagggaggggaggggtgaggctgggccctgtccgcatggccagtgcccccaccaggccccacactgaccccttggggtgtccagagaacttgtcacacaggatcgtgactcggtggacctccccacagcggctgaagtgggcctccagctcctcggcggagcccccgtagtccacctgcacccaggcccagaccagcatgtgagggagacgcctggccctgactcggggccttcttgttagaggtgaggaaagaaaccccaaggctgggccccgtggcggggatggccccaggcctccaccccacacccccgctggggttggagggaagagaggaaaggatatctcgtatggagcgcttccttctggagagctggagccttttaaaaagcttctcaaaagtggagatttcatgtgcaaccccgaattccagctcatgttgaaaaactggaatatgtgcccaggccagtgtttcctcaaggtgacggggctgcccccagggtcagacccccttcccagcaaggctgcctggcccatggccgggcgccagaccctctggtagagatggggccccattcgctgcctgccccttcaccccgcccaccactcacgttgcccacgtagacggatctgtggtcagcctccaccttctcctcgggggtcccagagagggggcagcctgcggagaacacagctcaggcccgcaggcccttggttccttcctcactcctctcacggggaaggtcgcccaggcttataggggaggtgacaccttggagcctgccaggcccaaccttaatggaaactgtgggacccttgctcagtggggggcggcctgtgcccttggttcctacccacggtctcagggctcagcagctgcccggccgcggtgccctcctcttcctcggcctgttgctgcactcctggaggccgtggcgtcccctcggcctgctccatggcacacaccttcatcttgatggcctccagctcctgccgacacacggccctgagccgggcaggcagcctgcaggctctgctcaaggaaggtgggtgtgtggcctgccagctccagcagagggtcacagccccaaggggcagcccttctctggacagggacactccttcctggggcagctggctggggatgaactcgcccctgcagagaagcccccgaaaccgcacctcaagggcccttccccaggcgagagaggccaccttgaccctgcagtctgtgtggctgggggcggggggtctccttgccaccttcgtccaggcaggtgggcaatggccctctcccctcctaagtcagctgcagccatccgtcacccagaccccgtgtctccaccagcccctgtgccccaggtcccctgagatccccagggcctccacacagctgttacctggtcaggcaatgggcactcagccaggttctcttgctccagcagagacagcagaaagcctgcatccccatcctggtcttcctctgcatcctcttcctcctctttctcctccttcccttccccaccctctggccccagaatctccttggtctcgttccaggccccccagccctgggcctcagggtctgaggagaccgtctggagccaggcctgagtcgggggtgggaagagagagcggctcgggaagggccacatggtagaggggcaggaggaaggtgggccaggcgaggcctcccctccactcccctcgcgtccgcacctgcccaggctctcctggagttttaagccctcccctgaggccagctgctcccactagagcatttgcaaaggctgagtggggctgagcttccagccttggctcccggccccgccccttccctgtcactcggacaggtacctccaggacactctccctggaggaaggagaggctgagttgagtgggggtcaccggtctcttctgcttccgcctggccacgctgtggctcactggagccttggtctgtgacagggttcacacctcagcagcatccacacggcacgaacgccacactgcatgaacactcgatctaagtgggaacacgggagtggtttcttctagtaccagggaccaagcaggctggagaggtggcttccgaccaggagaggcagggcctgagcagagaccgagagcaggtgcatgggatgagagggccgaggcaggttggggcggggtcctgggcccagaggaggggcagcaacagctgtctctgcatcctgacccccatggagtccccagggacccttgcctccctaacccttattctgggccttttttttttttttcttttttttttaggcaggagtcttgctttgttgccaagtctggagtgcggtggcgcgatctcggctcacggcaacctttgcctcccaggttcgggtgattctcctgcctcagcctcctgagtagctgggattacaggcacctgccaccatgcccagctaattttttttgtctttttagtagagacagggtttcaccatgttgcccaggctggtctcgaactcctgacctcaggtgatccgcccgactcggcctcccgaagtgctgggattacaggcgtgagcaccgcacctggtctgggtcatcttttaggtgggagccacttccatgaggccagaattattctgctgtggggcgggggctccgtggggagtgacggcgtgagttattgtggggcggggtctccgtggggagtgacggcgtgagttactgtggcggaattcagtgggcatccggtggtgtctgcacctggcttcacccatgcagggttgcagcaggaggtgacccgtgtccgcccttgcgcctccctctgcacctgccaccgcggctgctggagtctgctctggccttcatctccagtgctgccgtctcccacccactctgtgaaggactcggggccagggggtcatgcatggctcttacccctgccattggtggtgggagacggggccccctgcacagctcctacccccaggccgaggccatcctctctgtgactgcaccccggtgtttagccagtggggctgggattcctgggaatttgggactgggggaggagagagagacagggcgtggcctaggctggagctgcactgctgcaccatgcaccacccacgcagggcggcccttcctccatcttgggctgggggctcggggagcaggtggacatggaggctgccacagcctgggaacccaggctcctgcacccagtctgttctcacctctgtaaaagccagaaggtgtctgagatgggtctcaatcaatcagtttagaggtgtatcttgccaaggttaagggtgcacccaggaaaaagaaacacgaagccacaggcaacatctgtgctctgctttttccaaagagggtttggaggccgggcatggtggctcacgcctataatcccagcagtctgggaggccgaggtgagcggatcacttaaggtcaggagttcaaaaccagcctggccaacatggtgaaaccctgtctctactaaaaatacaaaaacaattagccaggcatggtggcgggcgcctgtaatcccagatacttgggaggctgaggcaggagaatcacttgaacccgggaggcagaggttgcagtgagccgagatcgcgccactgcactccggcctgggcgacggagtgagactgtctcaaaaaacaaaaacaaaaaaacccaaagagggtttggagacttttatacttaaagggaa

SEQ ID NO: 1243203 - DNA, 4001 bp, Homo sapiens
caaaaaaaagaaaaaaggaaaggcatgactctgagggtaaattctaggaaggcatgtggggtgggaaatggggccagcggtgtgattaaagaatgtacatggtagtagagggatgcagatctagataatattgaaaggccaggacttggacttctgggaatgggaaacatgatagaattatctgtaattttccagaatcaatgactagttgtttttttaaaaaaagaattatctgtaattgtgttttttgagacggagtctcactctctcgcccaggctggagtgcagtggtgtgatctcaggtcactgcaacctccacctcccaggctcaagcgattctcctgcctcagcctcctgagtagctgggactacaggtgcccgccactatgcccggctaattttttgtattataattgtctcttaaaggaagacaaggggccaggcgcattggctcatgcctgcaatcctagcactttgggaggctgaggtgggcggatcacaaggtcaggaattcaagaccagcctggccaacatggtgaaagcctgtctctactaaaaatacaaaaattggcccagagtggtggcatgcgtctgtaatcccagctacttgggaggctgaggcaggagaattgcttgaacccaggaggcggaggttgcagtgagttgagatcgtgccattgcactccagcctgggggacaagggcaagactccatctcaaaaaaaaaaaaaaaaaaaaaaggaagacaaggtagtaatctaagtcataaagatggtgctactgggtgaatactctctcctgcagctgtaagttgtgtgggagctgaggcagcaagcaaaggcctctaggggagccgatcttgggtaactgagccgaggcccttcacctcccccaactgtttcctcttcgtttgtacctggggtgcgtctccggtcaatcagggagtcctttggtgtcactggctcatcatcaaaatcaaattccgtgggcatgtgtggtctgggacaggtgaacatagttaagggtgagggcggtcctccctcccacccacacgtgtgcttctcccctgcccgttcctcctcccccgctggcttccctccctccactttcaaaggttccagcgtcccacattttcccctccctatttcctcccgccatcaggggagcagccccgggacaaggtgtaagggtgtgcctttacttttcctcttcctcttctttggcctccggctcctcatcggatctctcctcttcgctctgggcctccggcgtgggaggccggcggggcaggatctcggcttgcagctccagagtaccgtgggcagccagcagttcatagagccgctggatttcggagggcgggggcatccagggctgcccatccgcaggcagctccacctcctcgtcgctgcagggcacgcaccagtcctcggagtcctcctcggcaggctcttctcccccagcgctggggacttctccctgcgcctcctcgcccccggacccctcacgctcggtctcctctcggcctccttccccctcgtcctcggccttaccggccgaggcagaggggcctccggtatcctccacggccagagcctggaggccggaggtcacttccccttcttcagacagaggcgccgccgtactggccgcagtgtctccatggccccgagcaagggacataggccactagggcagggaccctgcgacgacagatactggagtccgaagccagggtcccccagggatcgggctcccctgggggttcgggaccgtttccagccaatcacgctcccgcaggggactccgcggccagaccgcccgtccccgggagggggcgctcagtccccaccaaggaccccgccccggagatcgaggttcggtactccgaggctcccgggccccgcagaaaccactttccgaaagagggaaagggggaggagagggacgggccactcttctcgcttccacgacgcccctctccacacccggacacggcgccttctccccagacctttcagttgtgggccacgtcaagtcagatgccgtacgcacctggagctaagacccgcctcccaggctgcgcagggtcacgctacgcaggcgcacagaaatggcgcgggaggctccgctctaggcaaggctacttggaagaggaaagcgagggaaggcttgcacatgcgcgagtaagcgcacaggcttcagcccacagtaaagatggccaccgggaagtcgcatgcgtataccacccagtaaggttctgccagaaaggcagcaccgccgggccggcgggacgaacgcaggaaccaaccgagattggaggcgagtctcatgcagtctccgtttattggtgtttcagactcatgcagcatccggcatacaaaaagggagaaatcagtttgataatagccttttttttttttttttaagaattttagtttttttcttcccccagactttttttttttttttttttttttttttaaggaaaaaaacccccgccaaatccgaaccgcgttgtagctcggtccccgcctcctcagcgggctgtcgcgtgcaacaaacctcccccatcatcttagaaaataattatagagcgcggcgccccgccctcgctcctgccagtgggcgctttggtcctattttttggattatttcattacgaagcacgtgaatgaatctagcccccacaccttcaagaaagaaactcgcggactggggttgaaaagcccaggtgggcgggtcaactccagctgacctggaagggtcagcgccgcgtccctcccttctcccctgcgtgcgttcggaaccagtactcgccaccctcacccgagtccccatacgaggcccggcttgccaactctgcgacctgccaggcacccttgggtgtccgaccctgggtggtcccagcagagaacagtccgagcctggggttggggagccctctcccaacactgctccctgcccccaagcctcgtctaagtgctgtcaattttgcagagtaaacggtgacgggaggttggagaagaggatgcttaagggagatgaggaggcaggaagaggaagggggcgggacgtggagaggaaaggggagatgataaagaagggaaggaagagaggactgagggttgagagatgccaagacaatgaaagttgggaggaggcggccagggtggaggtccagagaatttggggggctggaagaagtgcagggaggccaggagagatgcagggaggctgagagcgcagagttggggaggtgttcagggaggtttccagagtgcagggaggtttccagaagtgcagggatagggggccaagaggccggaggggatgcaggcattagtgcagggaggttggaaccagtgcagggatgaggcaggcctacagttggcagaggagcctggcaagatgcaggagcaggacagaagctgtaaacaaggccgctcaggctcccttggtccttaggggtgggggccagggccatcagttgggctccccccaggggagggatgggcccaaggcagctcccaacaggaagaaaagtcttgggatgcggggcagagcccctcacttatacactgtgggagaggagagggaaggacagacggggggagggggagacaaggagagacaaaggagaggtaaggaggacagacaggagagagcaggggcaggggttagtaaagctgcccttgccaacccttccattcctcccctgcctgtcccaagcccccactcaccgcctaagttgatgacgcaggaggcgatgatgatgaggactccccccaccagcgccacgatgcttaagagcttggctacccggcccagacgctgggccccgtccacgtccccctgctgcaggctgttccgggactggggttagggcgaggggtggaggcacatagccggggtcaggagaagccagcccagaagggatcaggtggaaaagtcatccagaagagagagaggccagccccatagatggcgggtaagggagga

SEQ ID NO: 1243204 - DNA, 4001 bp, Homo sapiens
tcctgcttctactaaagatacaaaaatgagccgggtgtggtggtgggtgcctgtaggaggctgaagcaggagaattgcttgaacccggaggcggaggttgcagtgggcctagatcacgccactgcactccagcctgggcaacagagcgagactctgcttgaaaaaaaaaaaaaaaaaaaaggccgggtgcagtggctcacacctgtaatcccagcactttggaaggccaaggcgggcagattacctgaggtcaggagttcaaaaccagcctggccaacatggagaaaccctgtctctactaaaaatacaaaaattagcccggcgtggtgttgggcgtctgtaatcccaactactcgggaggctgaggcaggagaatcgcttgaacctgagaggcggaggttgcagtgagccaagatcgagccactgcactccagcctgggagatagagcggagagtctgtctcaaaaacaaacaaaacaaaacctatgtgcaaaacatgctactagacaagttgccaaccgtaaggaattttctttttttttgagagacagtctcactctgtcgtccagcctggcgtgcagtggcgcgatctcggcagctccctgcaacctcagcgtcccctggttcaagcgattctcgtgcatcagcctctgaggcctgagcctctgggactacaggctggcgtcaccacacccggctaatttttgtatttttagtagagacggggtttcactacgttgcctaggctggtctcaaactctgagctcaagcgatctgcccatctcggcctcccaaagtgcggggattacaggcgtgagccagggagactggcctcccaccaatcttatcaatgtctggggattatcttgtttacttataaatgatctttctcacctccaccagaaggtaagccaggataagaataacatcagcacaagctggaaacatcctaaaagtctatcagtaaagtacagtctaaagaagcaagggcacttccaaggccaggtgcagtggcgggttcgtgtaatcccagctactcgggaggctgaggcaggagagtcgcttgatcccaggaagcggaggttgcagtgagccgagatcgcgccactgcaccccagcatgggtggcagagtgagactctgtctcaaaaaagaagaaaaacagaaaaggaagaaaaaagaaacaaaacgagggcacttccaaactacaacatactgtctagaacttaaaaaagaaagcaaggtagataaacatgtcctgacaggaaagctaaacggaacctgcagaaccattcagatcataccatttatgaacattcccttctccaaaaaatatacataggattcctttttggtggttagggatacgcccctcctccaccacccacattaacacacgaaaggacctggaagtaccagacttaaaagatttacttgaggccgtccggggggagaagtaaagattgagggtgtgggaggggggaggagcaagggtgtcgatacagctttatctacaaactgttacacattgtattaatgcgctgctactgtaatgaaatttgttctttaaacgccaccacgtgagcaccacgctatttccacattttcattttctgtgccccctcagccctaagaggagggggtggtcagatgatactgctgccctcggactgccgaggacacaaagccaggcctaaaaccctgggaaagcggggtcagagtcctgcgtccgcccttcccgcacccccggcaccttttccttctcctcacagctgaggggcttcccgggaggctcgtccatcgggcaggcgacagaacgaaaagagcagccgtcgccgaccccaggcctgccgacaccgggacccagttggccctgggccggggaggcgccccaggaaggaatggggagcccgggatcgcaccctcagtgcgcgatcagctgacccacgcgggccaagcgcgccctaaactccggccaattaaatccaccattcggcctgcgcacgcgcagccgtagacggccgagcagtggagcgaggccgcctaaaggagagccgcgctgtcgatgagtcccagtgggccacctggagcggaagtggaggagcggccggaagtagccggaatctctgaaagactgaccgactgactctgacaggatccggggctgagggaaggaggcggcggccatggagttgggcgagctgctctacaacaagtctgagtacatcgagacggtgcgcgggtccagatatgtatcctcctctttccaaccctgcgtccctttgaggcctggtcggcgttcccaacctgcccctaccccaccaacccctgtccctttggccattagtcccggattatctagcgatgccccgtgtaccgtctggctttgctgtttactccgcgcttggccagttgaggccttttgtatttattcctgattttctcataggggtaaagtgccttcgggaggataggacaagtcccatcctgttcatacgaattacagctcggacttcgggcccttttacactgccttttgtatctgttaacttgcgctaaaaacgattcggttctttttttttgaggaagggggttggggggcggagactctgtcgcccagtcctgagggccgcggcgcgatctctgctcactgcaacctccgcctcccgggttcaagcgattctcctgcctcagcgtctcgagtagctgggattacaggcgcccgccaccacgcccggctaatttttgtattttttggtagagacggggtttcaccgtgttggccaggcaggtccctaactcttgacctcaggtgatcgacccgcctcggcctcccaaagtgctggcattacaggcgtgagccaccgcaccctgccgatttggttctttatgatcagtacatgatatgtttgtaaaatcttggaaacagggcaagtggtcaattaacgttactatcgttattttggttttctttgctttctcacaactctgatactcatagtcattatcctcgttttaaggccgtaaagcccacgcgtggaagtgggatttgaatccgcgtctgtctgatgccaccaagctatagacattcaaattatgagtttattccttgagtccctagtttcctttgtgtttttattttttgagacaggttctcactctgttgcccaggctggagtgcagtggcacaatcacagctcattgcagcctcggccttccaggctcaagcgatcctctagcctcagccttctgaggagctgggactacagacacgcgccaccatgcccggctaattaaaaaattttttttttgttgagaaggggtctcactatgttgcctaggctggtcttgagctcctgtcctcaagggatccgtctgcctcagcctctcaaagtgctgagattacaggcatgagccaccatactcagccatagtttcctaatccatcattgcttttttgatatcctggactcactccattgtggacagcaccccactttatgtttttttctctcaaatgggagctttcttgatggaaacctgtagtccagaaacctattaagtttgctttccccggttttccgttgttttcttttaggcatctgggaacaaagtcagtcgccagtcagtgttgtgtggaagccagaacatcgttctcaatggcaaggtaagggacaaagccagctccaggctgcaaaccttagcttgcgttctgctaattgtcaccacagcagggcagataaaatgttgccatatctcctatttattgtttacatttttaattctcttgtttttaaattttttattttgtaaattggatctcctttttgttttttttttgtttcggttttttttgagacagtctcactctgtcgcccaggctggagtgcagtggccccatctcaggtcgctgcaacctccgtctcccaggttcaaccagttctcctgcctcagcctcccgagtagctgggattacaggcagctgccaccaagcccggctaa

SEQ ID NO: 1243205 - DNA, 4001 bp, Homo sapiens
gcctggcaacatggcgaaactgcatctctacaaaaaatacaaaaaattagctgggcatagtggagcatgcctgttgtcccaactacccgggaggctgaggctactggggaggatgaaatgggaggatcacctaagccccaggaggttgaggctgcagtgagctgtgatcgtaccactgtactccagcctaggagacccatctggggcaacacagcaagaccccacctctacataaaatttaaaaattagccaggtgtgctggcactcacctgtaggcccaactacttgggggtctaaggtaggaggatggcttgagcctaggagttcaaggctgcagtgagctaggatcgctccactgcatcctagccggggcgacagacagacatcctatctcaaaaaacaaaccaaaaaaaccccatgagttttgggacagagctgggctcaaaagaggtctctgacaccatgggatgcatgactatggtggagtcaaaactgtctggggctcaggttccttatctgtaaaataaggacaatgacagcaggacttcataaacactaaatgagagactctacataaagccttagctcaggggctggcacttgtacgccgttagctgttacattatccttattactatgttagttaagaagtggctccccgaaccagctgcaacagagtcacttggggaacttacgtgtgcagaacctccagggatagagctcaagaacctgaactttttttttccccctctttttctttttgagagagttttgccctgtcgcccagactggagtgcagtggcacaatcttggttcactgcagcctctgcctcctgggttcaagcgatactggcgcctcaacttcccaagcagctgggattacaggtgtgtgccaccatgcctggctaacatatgtatatattatgtgtgtgtgtgtgtatatatatatataaaatacatgatatataaaaatatatataacataataatatgtagtatacataaatgtatacggtatatataatacatatatataattttttttttgagacgcagtctcaccctgtcgcccaggctagagtgcactggcggatctcggctcattgcaacctctgtctcgcgggttcaagcgtctgtcctgcctcagcctcccgggtagcttggactacaggcgcgcaccaccccacccggctaattttttaaattttttggtggagaccgggtttcatcatgttggccaggctggtctcgaactcctgacctcgtgatccgccgcctcggcctcccagagtgctgggattacaggcgtgagccaccgcgcccagccaaacctgcacttttaaagctaccctaggtgacctgacagtgtggcgcaggtctgttgactggctctacgtgccaacgatatcacacaaacgctccgtgctcggtgtctcggggcctagttcaagtcccaggtcagccacttccctggaaaggccagctttccactggggataacaacagggcagcaacatcgactctgcagcgctgtaaggttccagggcaggggaggcgctcaccagccagactcatgctccaccgctgcccacggctgctcgctcacacgcgggctaggcacagcgcgaccacgtttgcccggcctcttccaggcagacggttttccctggccctgaggccgccggtgccgccgctgccggcctcgattcccccgggtgcaacgcccccagaccatgcttcccgccgggcacgcagggggcgcacggcgcccgccgcccagcccggagctcgccgcccggcccccggcccccggcccgactcggcttcccctccccggtagcgcccgactcggggctcaccatggcagccgctctgcctccggggctcaaactccgacttcctggccccgcggccggggatcaagcgtggtcggcgggtcagaggtcaaggaaagccgcagagagcgcgtgcgcgatacggcgctgggcatgcgcattgcctcagtctaagggcgggccaccgggagcgtcttagcggctcggggcggggtcggaggcggggtttgactgagcctgcgtcgggctctggataactgggggcgggcttgggagggcaaggggcgttaccgggagtctcaattgcccgcgtgcttaccccagtgcgctggagcagctaagcacatcggtcagacgtggggcgatttctgcccttgattttgccaaaatatttgggaatgcaacattatatgaaatcaatgaacataatatggagtaggatgctaaattctcaaaaatactttagaaaatagaaaacttcaaaataggtttcatccacattcctcctgcctgagaagctcgttcccttcttcaaatctttgctcaaatgtcacctcaatgaggcccacctggaccccttaaaacgccgtgacttgccctccatgaatgaaaaaagtaacagctttattgagatataatccatacactgtagatttcatgattttcaagtgcacagtccaatgccttttattcacagagctgtgccactgtcaccactattagttccagaacgttttcatcacccattagtcactccccagccccctcccccagcccctgtcaaccactcatttttctctctatggattcacaggttccggacatttcatagaaatggaatcatacaagccaggcgtggtggctcatgcctgcaatctcaaaactttgggaggccgaggtggatcgcttgaggtcaggaactcaaggccaggctgggcaacatggtgaaaccccatctctacaaatacaaaaattagccgggtgtggtggcaggtgcctgtaatcccagctacttgggaggctgagtggtggatctcttgagcccgggaggtacaggctgcagtgagctgtgatcactgcactccagcctgggtgacagagtcaggccctgcctcaaaaaaaaaaaaaaaaaaaaaaaaggtaaaaatgaaaaatgaaaaaaaagaagaaattgaatcatacaatgtgcagccttttgtgactggcttatcctcccttcttgtctctatttttcttccaagactctgatcaccctctaccataccacataatttacttatttattttatttatcattttgagacagggtctcaccctgtcgcccaggctggagtccagtggcacaatcctgcctcactgcaacctccacctcccaggttcaggcgatgctcatgctttagcctcctgagtagctgggattacaggcatggaccaccatgccccattaatttttgaatttttagtagagacagggtttcaccatgttggccaggctggtcttgaactactggtctcaaatgatccacccgccacagcctcccaaagtgctgggattataggcatgtgacactgtgcccaaccggttttttatttttaaattatttttccttttttttttttttttgagatgaagtcttgctctgtcacccaggctggagagcagtggcccaatcttggctcactgcgatctccacctcctgggttcaagtgatcctcccacttcagcctccgaaagtgctgggattacaggtgtaagccaccgtgcccagccaaaaaaaaatttttttttttcaagatagggtctcactctgttgcccaggctgcagtacagtagcatgatcatggctcactgcagtcttgaccttccagccttgagtgatactttcacctcagctttctgagtagctgggaccacaggcatgtgccaacacatgtggttaatgtttgttttttgtctttttgagagcgtctccctgttgcccagcctggagtgcagtggcatgacctcggctcactgcaacctctgcttcctgggttcaagagattctcttgcctcagcctcctgagtagctgggactacaggcatgggccaccatgtccggctaattttttgtatttttagtaaagacggggtttcaccgtgttagccaggatggtctcgtgctc

SEQ ID NO: 1243206 - DNA, 4001 bp, Homo sapiens
ggtcacccatcccacgccaccctctgcatagacagggcatctgtgacatgggaattttttaaaaataaaaagatgggccaaagggtcaagagcaggcaatgccttacagggctgacataattgctgtctgggattgggggatggggaggagcattctggatgtttctattcttggcaaggaaagcacctccgggtcctgcaccatcaaaaaacactcacacaccaatgttctcagggaatgaatgataggcccgtgctaagcggtctcatcttgagttgtgatgatggggaaaaaggtgtggagggctggaggcggggtggtggtcaagggtagatgtgtttaactaagggggatgggaggagagtgaatggataaaggggggggcctggggaaggtgtggacggttaagagggaggggaggaaggtgtggacgactaagggaggacaggagacggagggtgtggacggctaaggaggcttggggaaaggtgtgaacgactggggggttggggatggccagcagcacccccgtgcaacagcagcgaaggcaggccgtgggggtggccgctcctagaccctcacaacccccctctgtgggcgtgtgcccggctgcgcattcgcaccggccaggccatcgggccgcagagccagcactcaccccacgactccctggttgtagttcctccgtttccacggggtcccgctgtacacgaccccgccgccgtctgctcggccgccccccgcggcccgccctccgctgggctgcagcaggctgtagttgagtccatacgtgctggccttgttgtcgcgcttcctcttgttgctgctgcccgaggccgaatcggctggatcggcggcggggacggcggccgaagggtgcggggacgaggacgccgagggaggcgaggacgccgaggagcccgcccggcgggcccaggccccgggctggtggtggttgttgttgttgttggtcgtctctaggggcaggaagtcccgctgctccgcgggcagcgcgtggctgcccagcaggcgctccccggagcgatacatgccggccggggccggggccggggccgaggccgcgccgccggggctgccggtgctgctgccgctcccgccggtggccgtgctgctgctgctgctgctgccgccgccgccgctcgcgccgccgctgctgtgacagtggtggttgaagtagaggttcctcagcccctgggtcgtctcccagatctgcatccacagactgttggacggtccgagctgctctggctgaaaccaggcgatcctcggatccatcaaacggcggcggccgctgcccccgcccctcccggccgcccgcagggccgccgccgccgccgcctcaggcgcacgcccggcctcggctgctgctgctgctgccgctgctgccgctgctgctgctgctgctgctcggggcccgccgcgggcggcgcggtcgcgcagggagcccggccggcgccggcggcgtcgctcccgccctcgggggctccgcgggccctccccccctccctccgcccctccgcccctccgccgagcccctgtcactggggtccccgtgcaaatggcggcggcggcggcggcggctccacagaagagcgagcggcggcggcggcagcggcggcagcgagacgcgcctgctccgtagcgtcctcgctcctccggccccggggcggggcctctgccggctccgcccctctcgctccgccccccccccccaccgccccgccctcacgcgctcgccccgcccccgctgcgccgcgcagcagcccgggaggcctcgccgtgcgtcacagaggccgcggcgcgacggggccgcaaccgcctggcccaaccgtacttgcgccatctgtggagtgctcccacgtacctgggcgtccgggagcttctgaggcgcgcgcggcttctccgcctcggcttccccggtgctgagcgtggacgaggccgcatggaggttgccgcccgccccgcagggagcgcgttgtgggaggtgccactccgcccctcgctcctcgcccctcccatccctgtggccgccggatcccgggccctcgcaacccttcctgacgtcttggcttctgcctgctttctaaaacactttctttttaaaaaaaaaaaaaaaaaaaaaaacagcctataacactttttctggtggcgtggggacacgccccctgcccgagcgtgtgccccggggtcctgacgcgggctgcgcgagaccctgcacggctacgtgtgccccgccctgctgcgccctggccggggtgggggacccctcaccccggcctgaggccacagaaacctgtaccccatgcatagccctgggggagaccactaagactgagagtgtgagccaagggcggaaagccgcagccgcacactcaacccactttacagggacacgcaaacacgtgtagatgcacagagaagcagacacactcctgcgcggcgtagcaaagacgctctcctgccctaaggtgcaccaacagccttagaaagctcttctgagttcagcattaaattttaagaaaacccaaaaccttttaatcctaaaatgaagatttagcatcagcaaagattgtccactaggtcgttatttgcatgtctttcaaatctcagtggttaaaaagccaaggaaaggggaatgttaagtattttaaatcaagagactaaaagaaagtaagtgaacagcttctatgtgggccctttaaggttggtccaacgtccagaacaagtccctgatgcctgatattggccttccattttgggagctcaatatcctggaaagtttttatgacaaatagtggaaaactatcaaagaactaagtgtcgctctacctttttctttctttcgagactaactcttgctctgtcatctggagttcagtgactcattcacagctcactgcaggctcggcctcttgggttcaagcgatcctcttgccccagcctccgagtagctaggactataggcacgcgtcaacatggcatagagacgaagttgctctgcgctgcccaggctggtctggaactcctggacttaagcgatcctcctacctcagactccaaaactgctgggattacaagggggtgagccaccacgcctgaccttacttttttttttttttttggtaagagaataaatagcacgaccagaaatacggaaaacacacaaagacccttcagctgcaaacaacagcttccttggtagtttatgcagcctgtttcttgtatgggctgctctaagggaccatggagacaggcctttcagatgtatgttcatgtctttgaccttgcactacgccaatgtaggctccaggcagatattcgaggtgcctttgaaaagctccagggcactgtggccagggttcacattggccaagttatcatgtccatctgcaacaagctgcagaataaggagcatgtgattgaatccctgctcagggccaagttcaagttccctggctgccagaagatccacatttcaaagaagtggggcttcaccaagttcactgcggatgaatttgaagacatggtggctgaaaagcggctcatcgcagatgactgtggggtcaagtacatccccatcatggccctctggacaagtggcgtgccctgccctcgtgagggcttccactgtgctgccccctcttaatactccccagtaaatcctacttcctgtccaccaaaaacaaacaaaaaaaacccttcggaattttgattcattcaatttgattgttgctgttgctttactagaaatcagtattaaaagttttctctgtccgggggcggttgctcacacttgtaatcccagcgttttgggaagtcaaggcaggcagatcacctgaggtcgggagttcgagaccagcctgaccaacacggaaaaaccccatctctactaaaaatacaaaattagccgggtgtggtggcgcatgcctgtaatcccagctacttaggaggttgaggcaggagaatcacatgaacccag

SEQ ID NO: 1243207 - DNA, 4001 bp, Homo sapiens
atgtgtgcctcccagccagccatccttgcccagctgaccccagggcatggtcattggcaccagcaccaggaagcccagcagggccagccctagggagggagacagtcatctaccagatagtttcagtcacatcctcaaggggaccacggttcagacacaacacaggacagggcaagacaggtccaggtaatgctgtcatccagttggcggcctggccttggccagagacaggccctgggcaaaaggcttttggcactggttacttatcatggctcaggatggtctgggaagtagagaccatgatccccactttgcaggtgaggaaacagacttggaggggctgagtgaccggccccgggtgagcccagcaggtaagcaatggcagaggacaggcctaggccgtcccactcccacactgctctccccatacaagcaggtcacaggagaaggctaaggcagcgaaacctcaagttgagttgtgaagaggacacatgagcagtgatgccagcccggggccacttggcttgctcttcccaacccaagtcctcccctctccataagtgtccagacaaatggaggcactgggcctttttatcttctataaaggggtgaggccaggtgggggaagacaagtccagaatgaagggaagggggcttcgaggggcttgtcccatctccccagacctctccctggggagtttgattccagcctagccctttctgggaggtctccacccctccctgccggcctctagtactggcctcccaggggccaaacggggctccgaaggctgcccacccttgtgagaatgtggcctggcaaaagctcgggaaaggcacccaggctgggccaggccgctcagggccccttgcccgcctggggcagctcaaggacgggcagggctgtgtcagcagagctccgcggggcgcggaggaggggccggacgcctgttgggggaagaaggagccgccaccaggcggagccccaagacagagcggcttggggcgggggcgtcaggacggcggcgctgggaggctcctcccgggccctcctcatcgcagtcaacaccatctcccggctgggtgctggcgggagggggttcccagggcgctgggattacagaggccggacaccatgctccctacccctggggctcagagggattaagcaggctcagaccctactctgctcccctctcctgacccggcccccacccgccgggaaaacggaagctggcagcgcggcccgggacaatggcagctttgtcaccgcggctactggcggtgccagggccggggcagccctggacttgggcgctggggccctcctcggcctcagtgcccccggcccaacgcaggtagggcggccgggggtgtgggaagcgcgttgcgggacgcggctcaccgtgcgtgtagatgttgcccagttcgttgtgcaggtagaagaggctgcgcaggcagcccgagccgctgctggcgggccggtacccggtcagcacgaacttattgaactgcaggtgcggcggcgagctggcccagtccagcaggcgcggcccggccaggaacgccatggtccgcaccgcgcgggcagcccgtgctcctgctgtccccgagcctcctcctcagtggggccgcagcgcgggaaggcccatcactgcctggcgcccggcgcccggcgcccacccatcgccctgcgctcgatcggcgcacgcgctggctagggggtcccagcccgcgcccctccggcgctgcgcacgcgcgagtccgtcgcccccgcgccggggcggaggctggggacgcaccggacgcctgagcgcactgcggtcggctccgccaaggcagacgcgccgcagggacagctcgcggcggcggcggcggcggtggccggtagtctctctgcagccaggaggacgggcgcggccggacgcgggaggggacgccaggctccgcccaggctcctagttcccgccggccggccagcgtttcgcgcgccgggctcctgacgtcggcgcagcgagagccaatgggcgtggccggcggggaggctccgccccgaggccgcccaggcctcgcctcctagcatagtgtgcgcgctcccagcctcatttgcatggggtggctgtgggcttgcgacccaacgttctgggtcctgcgggctgcgctagagtgaccctggcacctcgcgtccctcagaactgtgcatccgggctttccgcgtgacacccaggtctccgtacctttgggcacccaccctcgggggcatagtcctgccacctagccctaccctgcagacggggctctgtccaaggtgctgccggacgggtccggcctacatccggtacgcccccgctccaaagtgatctttccgcaggctggactcccgagtgcagcaaggcgctccacggtacccaggcctctgaaggcgtgcctcacgcgcccgcagccgtcgggagaggccctatccttcgcgctaggcttctcggagcgtgggcccggcccaacttgctcccagttatcgcccacaaggagcacccttgcggggccctaccgaggatagacaggaaacagattggaggccaggggagcaaagtcgacctccgccccgtccaccctgagcagggaccgggaaggcaccccttattcagcataacgctgcccacgatcctcctccccttccaccccccgccttctacaggactccacccacccacccatctgtctgtgttctaggtccttctctgcattccaggcagctccaccaaagtctgcgtgcaacgcccttcatttgcatggacacacgcaaccctcggcgtttgtatggtcattaacatgctcctcccaccacggaagaactttcgaggcccgtaccaaagtagatcctttattcaaaatctgtgggggttttttgactgtttttgctgacctgtgacctctcactgaggacggcagtccaggaccacccccagaggggttcaaagacctccgaaaccagagaccacccccacatacaggtccatggagagggcctggaccatctggacccccacggtcaggccaagtcccagataatagcaccagatgtttcctgtccgacttttggtctccccaaggcgaccagaggccgagctgcccctacacaggcgcaaggccgaggcagggcgcagcacagcatctcaggtgtccatctcgccggcggcgggcccagcggaccctcggggcccagagtcagagagcggagatgagcgagcgcagggagctctggctggaggcactcagaggccggtagcccgcggcagaaccctcagcctgggggtccccgggggagcagggcaaggccacccctcggggctgttggtaccacacagcccagcttctcctggggcccctggaagcccccagcgccgggggcccttttcccggagccagcagacagctcctagagagggagcagacatcagccgagccggtccaatcccgctgcagcgtcctgctctacctgcgatcccgcgcgcgatcctgtgcgtggacccaaagcctcgctcccttaagaacccaggagttccttcctagctctgttcccttctggggctccagctccccaccaccggtccgccctcaggccctgccccagcgccccgcaccgtcggcgcagcggacgcagcagccccaggagcagcagcagcagcaccgagacagccgtcaccgtcgagaagacccgggctgcgggcacacggctgcggtgaggatgggcgcgagggggcggctccctgactcactcccgtcccgcgcgcccgcctcacccccaatcgcggccggcggagccccaggcctggggctgcagctcacgttggccccgtcgaggggcgccgcgggggtctgggccgagccctcgggggcctctgggtcctcagcggcgtcctgcagccctgcggagaggggcgtgaggcggggtggggagagcggggtgggaacagcgggcagggcgcgccgagctgaggctc

SEQ ID NO: 1243208 - DNA, 4001 bp, Homo sapiens
gggcgaggagccgggcgtacacagcgctgcccccttggtggcacataaagaggtgatagagcacggagcctgcagggggtgcaaggcaggccacgcaatgtgtgcctcccagccagccatccttgcccagctgaccccagggcatggtcattggcaccagcaccaggaagcccagcagggccagccctagggagggagacagtcatctaccagatagtttcagtcacatcctcaaggggaccacggttcagacacaacacaggacagggcaagacaggtccaggtaatgctgtcatccagttggcggcctggccttggccagagacaggccctgggcaaaaggcttttggcactggttacttatcatggctcaggatggtctgggaagtagagaccatgatccccactttgcaggtgaggaaacagacttggaggggctgagtgaccggccccgggtgagcccagcaggtaagcaatggcagaggacaggcctaggccgtcccactcccacactgctctccccatacaagcaggtcacaggagaaggctaaggcagcgaaacctcaagttgagttgtgaagaggacacatgagcagtgatgccagcccggggccacttggcttgctcttcccaacccaagtcctcccctctccataagtgtccagacaaatggaggcactgggcctttttatcttctataaaggggtgaggccaggtgggggaagacaagtccagaatgaagggaagggggcttcgaggggcttgtcccatctccccagacctctccctggggagtttgattccagcctagccctttctgggaggtctccacccctccctgccggcctctagtactggcctcccaggggccaaacggggctccgaaggctgcccacccttgtgagaatgtggcctggcaaaagctcgggaaaggcacccaggctgggccaggccgctcagggccccttgcccgcctggggcagctcaaggacgggcagggctgtgtcagcagagctccgcggggcgcggaggaggggccggacgcctgttgggggaagaaggagccgccaccaggcggagccccaagacagagcggcttggggcgggggcgtcaggacggcggcgctgggaggctcctcccgggccctcctcatcgcagtcaacaccatctcccggctgggtgctggcgggagggggttcccagggcgctgggattacagaggccggacaccatgctccctacccctggggctcagagggattaagcaggctcagaccctactctgctcccctctcctgacccggcccccacccgccgggaaaacggaagctggcagcgcggcccgggacaatggcagctttgtcaccgcggctactggcggtgccagggccggggcagccctggacttgggcgctggggccctcctcggcctcagtgcccccggcccaacgcaggtagggcggccgggggtgtgggaagcgcgttgcgggacgcggctcaccgtgcgtgtagatgttgcccagttcgttgtgcaggtagaagaggctgcgcaggcagcccgagccgctgctggcgggccggtacccggtcagcacgaacttattgaactgcaggtgcggcggcgagctggcccagtccagcaggcgcggcccggccaggaacgccatggtccgcaccgcgcgggcagcccgtgctcctgctgtccccgagcctcctcctcagtggggccgcagcgcgggaaggcccatcactgcctggcgcccggcgcccggcgcccacccatcgccctgcgctcgatcggcgcacgcgctggctagggggtcccagcccgcgcccctccggcgctgcgcacgcgcgagtccgtcgcccccgcgccggggcggaggctggggacgcaccggacgcctgagcgcactgcggtcggctccgccaaggcagacgcgccgcagggacagctcgcggcggcggcggcggcggtggccggtagtctctctgcagccaggaggacgggcgcggccggacgcgggaggggacgccaggctccgcccaggctcctagttcccgccggccggccagcgtttcgcgcgccgggctcctgacgtcggcgcagcgagagccaatgggcgtggccggcggggaggctccgccccgaggccgcccaggcctcgcctcctagcatagtgtgcgcgctcccagcctcatttgcatggggtggctgtgggcttgcgacccaacgttctgggtcctgcgggctgcgctagagtgaccctggcacctcgcgtccctcagaactgtgcatccgggctttccgcgtgacacccaggtctccgtacctttgggcacccaccctcgggggcatagtcctgccacctagccctaccctgcagacggggctctgtccaaggtgctgccggacgggtccggcctacatccggtacgcccccgctccaaagtgatctttccgcaggctggactcccgagtgcagcaaggcgctccacggtacccaggcctctgaaggcgtgcctcacgcgcccgcagccgtcgggagaggccctatccttcgcgctaggcttctcggagcgtgggcccggcccaacttgctcccagttatcgcccacaaggagcacccttgcggggccctaccgaggatagacaggaaacagattggaggccaggggagcaaagtcgacctccgccccgtccaccctgagcagggaccgggaaggcaccccttattcagcataacgctgcccacgatcctcctccccttccaccccccgccttctacaggactccacccacccacccatctgtctgtgttctaggtccttctctgcattccaggcagctccaccaaagtctgcgtgcaacgcccttcatttgcatggacacacgcaaccctcggcgtttgtatggtcattaacatgctcctcccaccacggaagaactttcgaggcccgtaccaaagtagatcctttattcaaaatctgtgggggttttttgactgtttttgctgacctgtgacctctcactgaggacggcagtccaggaccacccccagaggggttcaaagacctccgaaaccagagaccacccccacatacaggtccatggagagggcctggaccatctggacccccacggtcaggccaagtcccagataatagcaccagatgtttcctgtccgacttttggtctccccaaggcgaccagaggccgagctgcccctacacaggcgcaaggccgaggcagggcgcagcacagcatctcaggtgtccatctcgccggcggcgggcccagcggaccctcggggcccagagtcagagagcggagatgagcgagcgcagggagctctggctggaggcactcagaggccggtagcccgcggcagaaccctcagcctgggggtccccgggggagcagggcaaggccacccctcggggctgttggtaccacacagcccagcttctcctggggcccctggaagcccccagcgccgggggcccttttcccggagccagcagacagctcctagagagggagcagacatcagccgagccggtccaatcccgctgcagcgtcctgctctacctgcgatcccgcgcgcgatcctgtgcgtggacccaaagcctcgctcccttaagaacccaggagttccttcctagctctgttcccttctggggctccagctccccaccaccggtccgccctcaggccctgccccagcgccccgcaccgtcggcgcagcggacgcagcagccccaggagcagcagcagcagcaccgagacagccgtcaccgtcgagaagacccgggctgcgggcacacggctgcggtgaggatgggcgcgagggggcggctccctgactcactcccgtcccgcgcgcccgcctcacccccaatcgcggccggcggagccccaggcctggggctgcagctcacgttggccccgtcgaggggcgccgcgggggtctgggccgagccctcgggggcctctggg

SEQ ID NO: 1243209 - DNA, 4001 bp, Homo sapiens
aggatttgtttccataagagcttttcttaccctaaaaatgccaagcctggtggccctcctgctgcttgattgcaggaagttctccccaatgtcactcctgccttagtccagagcagaaggcaagctggtgagaccagggaggaggctggaactgggacacacaaggaccatgactgtatttgtagaaaacctttaatgttccccaggctgagggagccctgtgagccagctaaaaacccccactgtgaagtccctgccatgtcccagcagtgtggagtggcatggggcttcatcctgactgtcagaggctgaagccactaccatctcctcgaatgcgactcccccagccagaactggcctgctcctggtcatccagggagggcagagagctgcgggtaccaggatgtcggcagccagggtgcaggtcccagcacgggggcccctgagacagcccattggaactgggaggctggcggttctcaatgaccaggtcactgctgtcatcgtcactatcaggctcagcaggcccaggccctgcagagggaggacctgtcaaacgcccagatgcccctcgcaccacgttattgcgctggttggcgggcttgacagtgacaatgaggttatggctgttggcaaccatcatgtccgtcacttggtccaaggtcttcccggctacttcaatgccattgacctcgaggatctcatcactgaccgccagcagccctgtactctcagccagacccccacgtaccaggcgggagatgaagattcctggaacccgctccaggccctggggagccacacgcacgctcatgccatctcggatgtagaagcccagggggcggtctgaaccatgcttgtgcagccgcacccgtcggtgggtctcaggcagtaggtccacgtctatgactgaggaaacctggcggaaatcttggggcaggctgattagcaagggtggccgggtgcgcaggggtgccactggccgcagcaagagccctttcttgcgccgctgcagagagttggaggcaaaagccaggccgctggagtcagcttctgctgcagaagaggggggatgttgagatcagagacctgctccccgacttgggctgtttacagggggcactgtagctatttcctaccacttagaggtcaagccaagggcagggactgcagagggtgacgcttgggtaccctgggcatggactaacccttgtagacctgccccacagacaccttaccccacagaggctgcccactgtacccctcctcaccccgcttctgcaccagtaggcgcagtggcgggggcccgctggccagggcccggtgcaggctgtcgtcgttggtgaggggcagcaggtcgccatgagcatccgtatagccaagtagcacgtccaggcccgggatctggtgcaccgcccgcagcaaccgcgagaactcctggaagccgctcaccgaagcgcgaggcagcgcgaagcgtcggaactcggcgtcaaactggaagtcggggttgggggagaggaggagtcaggacagcctgcgcccctttctcaccgcaggctggcaggaatgggaaagatgcggctgccgcttttgcggcagccttaagcccagacctcagctccagtaccagggacgctgtccaaggtcttcttaccgccctccaggtactcaggccacagagagctggagaccagcagtggaggaaggaagacggatgggggaaggcgagcagaaaagcagaatgggacttggaggatagagggaagaggtggcggggaccaaggagctgggaaggggagaaagagggaattgggagcgcctagggccgaggccggaggagcccttactttgctcttcacctcgacgatgctatcgggactgcgcgccggagtcctctgcggccgggccatggcggggccgggcgggccggggacggtgccccaggcggcccgccgaggcgcaggtgcacagcccggccggcccgcccgcgccgccccgcccctggcggtagcacacgccccgccttcccatccggagcgtgacgtcaagggggcagcgacgcagagtggaacgcggagtccacgtttcctaggaaacggagccgtggatggagaggagccgtcctccgctcttgcgtcatcacgctgaggtccgcgcgcccccggagtctggggagcagggctccgccaatccgaggggagggcgaaggaagtaccatttatttagcgctgtgtgtgtgctcttatttccactggccttacaagaccgtgcactgtgtagatgaggaaactgagtcataataaatatgtgctgaaccgttcgggggtcacacggtgctgaaatggtttcgagtcaactcgctcggacggcactcggcctcagcctccggccctggaaccctctccagggacgggaccagcccttgttctgttccctaccggtaccacaggaatcttgacgaacggcccaaatgcctggccgctgtcagagtgacgccgcgatgagagtaaacgggccagcatcccgtgcaccagcggggtggaccagcgggagtctgcacacaggcccccgagcaggacgccctcgtgcgcaggcgcggggtgtacgtgggcggggcctcctcctccggccccgcccagcgaaggagcttcctcttccgaggaaaggcggggcctgggcgcccgcgggaaacccgggcccgttgcatccgctgggtgtagccgtggggatggcaggttcggggaggctggtcctacggccctggattcgggagctgattctggggtcagagacaccctccagtccacgagccgggcagctgcttgaggtgagcccccattcagggcccggagaccgaggcggaggcccggggtggtgggattgacgccgctcgccgccgtcaggtactacaggacgccgaggccgcggtcgcgggcccatcccacgcccctgatacgtccgacgtcggggccacgctgcttgtgtctgacgggacccacagtgtccgatgcctggtgacgcgggaggccctggacacctcggactggtgagaggccccgcgcggctctggaggtcggagtccggcaggagagcgcgaggtgggcgggccttgtgttcaggtgggcccggcagtgaggatcctgcttgttgcagggaggagaaggagttcggcttccgcgggacagagggccggctgctgctgctgcaggactgcggggttcatgtccaggtcgctgagggcggcgcggtgagtggtgagactgccttgggcgggttaccgggcatgactcttcgtgacgattctgagacccccccttccccccgaactcctccagcccgcagagttctatctccaggtggaccgcttcagcctgctgcccacggagcagccccggctacgggtgcctggttggtaagtgatgcctccgccctccagcagctctccccaccccagcctggccggcgctggcagacgcctatggggtaggagggcttgggcccccattaactacccttctctttttcttagcaaccaagacttagatgttcagaaaaagctctatgactgccttgagtgagtctggggttgggctcgggggccacgtgttgtttggtgaggggatggtgtatctaggtagacaggcctcagcatggttcctgagtcctggccactctcttcctgtagggagcacctttcagagtccacctcgtccaatgcaggtactgtagagcttgaccagtgatcctaacacgctgtgcagtgatctctccagccttaaccttatgcttcctcaataagctgtcttccccctcaccctcctggtcctcccctttaagccttgactcatcccatggtcccctgtccccaggcctatcactgtcccagcttctggatgaaatgcgggaggaccaggagcatcagggggcactcgtgtgcctggctgaaagctgcctgacactggagggcccttgcacagcaccccctgtcacccactgggctg

SEQ ID NO: 1243210 - DNA, 4001 bp, Homo sapiens
atttttagcttactaataaatactaacgtaaaaatgccagtcaatcattcagtgcctctataatgtcgtatcacgaattaaggttacttggaagcactccctaacttacttttttaaaataagcattaatttcagtggccaccaggttaaaccctctaataatgaacttagagatgcgaatgtttcaacatgagaataggcagttccagcgtctaaaacatgacttaaaacacagtaatcatgtaagaaaacaatctctatgcttgaataagttttgctgctttaaaagattcctgtataaacagacatcaataaatccctaagtatattattgccagagttccagtcttggtcaagagtttggagtggttaatatctatgcaaagaatgtatcttcaagattaagagaaaattatttctctaagtgaaaactcttagcttcctagggaagtgattccaactagacactacctaaagccaaggatactatttacccctgcatggattccttcatgattcaaacatggaaaatcagacagcaaaaatggatatccatatcaaagggagtgaaccgttcatattgacatcagcaatttaaaaactagtctttgctccccctaaaaaaggggaaaaaaaatttgcaactttaagtgtcagtgaagtatttcctgtatacacacctgttgaggcaggcaatgaacacgtccactaatgcataaagaaatatctcatttatctgcaaaaacctgaccctagccggtcacaaaagggcaaatattgtaagattccacttatatgagatgttaagggcagtcaaattcagagacaaatggcggttgctaaaggctgggcgaaaggagaaatggggagtttaatgtgtaaagagtttcagactgtgaagatgaagaagtcctagagatggatggtgatgtttgcacagcaatgtgaatgtacttaatgccacttaactgtaaagccacttaaaatggcaaatttcatgttatacctattttacaatcaagaaaaaaaacagtctgaccctaatcctcaagctctctgcaatgtacacgccgcactgttttaagcagcatcaaaaccatcatctctatctgagatcctgagtccaatcacaaacctacggcgtatcttcatttctttcgtgcttttgaaacgtttaaagggtaacactgagacctgtgaaacccgcccaaggctactaacagcaagaggccaccaccaagcataagaagttgggggctgggggattgaaggagccttggctatgcactgcaaagtgctagcctgagcttgcaagggagggatacctgaaaactccccatcgatggcgaagaagtcggcctcctctatggcctggtacactttgtgaagattactcttaaaatctgcggagaaaccgaaaagaggctcagaaccagtggcctgaattcctgctaaggggagagggaaggagggccgaggagctcccgaggctgagagccggaaggggaaaagtcccggaggtgtgcaccggggcgaggggaatcaagtcctcgaggggtgcatgggtcaggggggacaagccccggggggtgcccggcccggagaaggacaaggccccggatggtgccggggttggaggagtaagtacaaggctcctagggtgcacggtccgcagccggaaaagaccccaagaggcgcaccggcttaaggagggaaaagccctgaggggctgcctcagccccaggcccagccaaacacgccggccatggtctcggcctagcaggccaggggcagccgggtgtggggaggcggggaggtgtacggcggacacgcactgctcctgattatctccattctgcagagtggccggaaccttggccccacccgggcccgcgcccgcctcagcggttctactcgccgaattccgcggcgactgcggcagtagctgaggcagccgcagcggtgacgccggccgcgacttccggaaacagcgcgcgcctgctgcgcttgcgtcagcgcctgcgcggcggcgggggcggggccaaggctgggctcctttccctccttatagggacaggggaggggcgtggctatcgaagtccccaaggcgtggcctaatttgtgcgggctttcacttcagtagaaaaaatgtgcatgtctcgacatccagtcgaccaggaaatactgactgggtttctgtgatatgctagccactcttacaggggtggagatacagtgatgaacaggaagacgtgctccctgccccattgtagcttaaacttggggtaaggggaaattcaggcaggagtgaaacttgccatttggtaacacatgaaaatcgctattaagaaaaagagcggggcgatgtaatagagaataatgggatccgggtgcggtggctcacgcctgtaagcctaacactttgggaacccgaggcgggaggatccgttgaactgaagagttcgagaccagcctggacagcatagtgagacctgtctcttaaaaaaataaaattaggccggacccggtggcttatgcctgtaatcccagcactttggaaggccgaggcgggcggatcacgagatcaggagttcgagaccagcctggccaacatagtgaaaccctgtctctactaaaaatataaaaattggctgggcttggtgactcatgcctgtaatcctagcgatttgggaggcagaagcgggcggattacctgaggtcagaagttcaagagcagcctggccaacatggtgaaaccctgtctctattaaaaatacaaaaaattagccgggtgcagtggtgcgcgcctgtaatcccagctattcgggaagctgaggcaggagaatctcttgaacctgggaggcggaggttgctgtgaaccgagatcacgccactgcactccagcctgggtgacagaacgagacttgttttcaaaaaaaaaattaaattaaattaaaagaataataggggttgttacttaggtgatcacggaaagcaaagctgagacccttagctactgcattagcctctgggaatactatgtcgagtgcaacatatgaggcccggccctaatggaattgtatgttggtttggggttgctgttctccaatgcctagcactgggctgacacgtagtagacactcaataagcatgggttgaatgaatacattcaggttggtctttcacaaaagccaactatgaaaagttggttagtgccggatgcgatggctcacgcctgtgatcctggcactttgggaggccgaggcaggcggattgcttgaggccaggagctcgagaccagcctgggcaacacggtgaaaccccatctctactaaaatacaaagaattagcctggcgtggtggcgcacccctgtagtcccagctactcgggaggctgaggcaggagaactgcttgaacccgggaggcggaggttgcagtgagccaagattgtgccactgcactccaacctgggcgacagagcgagactccgtctccaaaacaaacaaacgaacaaaaggaaagttgattagaagacctattttcaaaatctatctcagccacttattagttctggaatgcattaaaccttcctaaacctcaatttcctgggattgtattgaggctcagtggtgctaatgaatgtgaactgggaagcagcgtattaataaatctgtataaataactgtttaatgggggcctggcgccatgactcacacctgtaatcccagcgttttcgggggctgaggcaggagaatcgcctgaacccaggagttccagaccagcctggggaaaagagcgagaccctgtctccataaaaataaaatgaaattttaaaatgagccaggcgtggttgtgcacgcccgtagtcccaactattcacgaggctgaggtgggataatcgcttgaacccgggaggcggaggttgcagtgagccaagatcgtgccactgtacgccagcctggcgggtgagagtgagactctgtctcaaaaacaaacaaca

SEQ ID NO: 1243211 - DNA, 4001 bp, Homo sapiens
taaaaataagaactcggcacaaatggccagtcacatgcttacctgcatttttaaagacagctttcaggtatttggggactacattattaccaaaccttggctttgggagattatacaggtccgaggaactcgtgtctactgcagacgaatgcaattaccccaccttcctccatacagaattgttaggaaatgtccactcctttgggggtgatttttctcctcaagttgtagccaacattttgtccgtaactgatttcagggcaaacatttctgacatcttcctccagctcagtctgccatgccttggcaatccagtttcctgtcatatgcgagccatccaagttgatgccaagtaagatttgcccagctcaaagtgaaagtgtttgcgtcttggtatccggaatcctcagccccagtagcaaagctttagtcattcaccttcatccaatagacgtttgtgaacgtcctgctgtccattttgtcaataaacaggcagccctgcaggtggtccatctcgtgctggatgatgcgggctgcccacccgctcgcctgccacaccacctgttctccattggggtccagccctgcaaaggaagttacagccctggtgagtgggaacagctgaactgcatcatcctcaacctccctacccctgcccccggtcctggctgttcccattgacaagaggcaacagcagatggcaaatgtagacagcagctcctcttctaactggaaaacgtccctcatctcggtccattaccaagcgttcaacctggttcccaactctggtaattaggttatcgagctcactgtagagctgagatgagaaatcatctttctacggtgcgacccttccgaacactcctcccacttctgaggtacctgtgggctcccaactcctaacagaggttctgcagcttgagaccccacttgtttttctgaccatcttgaaccgacgggcttgctgtgcaggaacaatcaccccgaccccagcagagcccgcattccgcgaggcatcctgtggtaccacgggggaatggcctagccccctgggctgggtcaggctggcgggggctaacccccacttctccaactccaccgtggcggatctaactggggccgaagagcgtgtttgcctcagagagcaagggagcagaaagcagacgccaggctgtcaggtaacagcggaactaggggacctctcctcgcccctgcgtcctatctgagcgggctctaccccacaggagcttctatccgtcctgaggcctctccgctcccgcatcccacttcgctcctgcgggaggtccggcgtatgaaccgcgaccacttctgcgctctcgcggagtcgggcagaagagacgcgcgcgctgctccagcagccccggtccccgccgcccgcacctgagatctgcaccgcctggaagcggggcacgcaggccaggaagccggcgacgctctcgcagccctcgggaaaggtgaccaggcggctgtcaagcactcgcaggctggggttcacgaacacgcgcagggggaagggctccatttggcggagcgcgcgctggcggggcgggcactcccgacacagcgcctcggggagctccagcgccagcacctgccgcggcacccccagctgcggcgcgcttaggcccacgcagcgccgccgccgcatcacctggaccagccgttgcgtcagccgctgcagctcgggcccgcctagctgcgcccgctccaccggggccgccacgccgcgcagcaccgggtccccgacttggcacacgtgcgagaacggcggttcgggaggacccagcaccagacgcctcaggtggcgccaataggagcgccgcagcgccgggccctcgacgccgtccggggcggccgtggagctgcaagcccggacaccgacggctgccgccccgccccacggcacggccgcccacagtggccaaagactcagcgcgccccacagccgggccatggcggcccccttaacagtgacccggcccgccccttccggccgcagcgcggggcacgccgggaagcgccgtcggccagcacacagcgaagccgcgactggatccccgccttcctgcttagactggcagtgagcaccgcccccttccgctctcctcccgggagcgccttcccgcctcccgaacccgccccggaccttccagggcgaggcagtcctggccaccccgcgccgggaacctcacgcaccgcgttctggaggcaggggacgccggctagggccccacgctgggcggttcggcctgcgtctccgctcgccctccctccgggcaggctgggcccgcgggctccaggcgtggctcctcggcgggaggctctggtgctggagctgtgagctcgggccccagcgcctggtcatccagggtgaaaagcgtctctctctttggcaggataaaggcgaggggctcctgaatggcgccgatgttcacatgccctaggttaccgtacttggagagctgagtgggaggaatgcctaacccagacgtggggaaagcaaaatggaaaacagttactaataaaactcaatatagaaatttaagggaggccgggcgcggtggctcacgcctgtaatcccagcactttgggaggccggggaggggggggcggatcacctgaggtcaggaattcgagaccagcctgacccacacggagaaatcccatctctcttaaaaatacaacattagccgggcttggtggcgcaggcctgtaatcccagctacttgggaaggctaaggcaggagaatcgcttgaacctaggaggtggagattgcagttagccgagatcgcgccattgcactccagcctgggccacaagagcaaaactccgtctcaaaaaaaaaaaaaaaaaaaaaaaaggaaatttaagggaaaaaaaacgagccattactatttttttttttgagacagtctcgctctgtcgcccaggctggagtgcagtggcgtgattgctgctcactgcaacctctgcctcccaggttcaaacagttctcatgcctcagcctccgtggtagctgggattacaggcgcccgccaccatgccaggctaatttttgtatttttagtagagacggagttactatgttggccaggctggtctcaaactcccaacctcaggtgatccatccgcctcggcctcccaaagtgctgggattacaggcatgagccactgcgcccagccatcaattactatgttttaatacagcaaaaaccacctttgttacagggaatgggaagctatactgtgaagcagaacgtaacggaacagcagtgtagggtgcctgcagcaggaacccagacctcaggcagcaccagggaaaaagcagagggcagccaggctttgcacgtgtgatgcactgacccattgccctttgggaagctgtgcctcaaccaagcccctctcctaccacaaagggacaaggacgtgaaagtgaattggaaaaaagactttaggacgggcgtggtggctcacgcctgtaatccgagcactttgggaggccgaggtgggcggatcacaggtcaagagatagagaccatcctggccaacatggtgaaaccccgtctctactaaaacacaaaaattagctgggcgtggtggtgcgagtctgtagtcccagctactcgggaggctgaggcaggagaattgcttgaacccgggaggtggaggttgcagtgagccaagactgtgccactgcactccagcctggcaacacagcgagactccgcctcaaaaaaaaaaaagactgtaaaaaccatttctctagatatttcacataaatggaatcatacgtatgtagttcttttgtgactggcttcttccgcttagccagatacagccacataatgtatgattccatttttatgaaatgtccagaagaggcaaatctatggcaacagaaagtaggttgccagggactaaggatgctgtcgaggaatgactacaaacgtgcatgaaggatctttttggagtgatggaa

SEQ ID NO: 1243212 - DNA, 4001 bp, Homo sapiens
tcgtccacggggaagtctgcccgcccctcatcaaactggacagcagcaggtgggttagcgggcgctgcagccggaccccaacccacacctgggcctgacctaccttcttgaagagaaccacagtgtccttggtgaggccaaactgctgaaagagccgcggccggtctgtgaggccaaaggtcatgtccagggcgtcctgggccaaggccaagaaggtggccacgtcctcgtcctgcaggtcctgaggggcctggccctgtgaggccacccggtcccacccacagtcactgccctcatggcccggccccccatgcccagtggctcacctggaagaagccaatgaccactaggtcccggccaccgatcagcgcctgggcggccgcctcgtcctccagccgcatggcactgggccccacccgccgtcgcagccactcggcaatgccctcagcgtcccgtggtcctgcagggagtccccctcagcctcggcctggccaccgcccccccaatgaccggcctgcccctcacctgtgtactcctccgggtgcgtgcggttcccattgcggaagaacttgagcgtagggtactccgtcacaccaaactcctcagccagctcgcgctgcgcgggcccatccaccttggccagcgtgaccaccattgactcggccgcgagcacggcagctgccttgctgtactcgggggccagggcctggcagtgcccacaccacggggcatctgggggatggggccgtgagtgccccaggccaccacaaccccaggagcaccctctccacacctgacaacccagcagggaacaagcgtgctgctccattctgccctgagccctggccgtggacaagccgagcaccagtgcctcttcgtggccccccaggctgcagcacagggaccagtaaggcttgggagagcttgaaagaccaccccccctccccccacagccaggctcagtggctcacgccagtaatcccagcactttgggaggcagaggcgggcatatcacctgaggttgggagttcgagaccagcctgaccaacatggagaaaccccatctctactaaaaatacaaaaaatattagccgggattggttgcgtatgcctataatcccagctactcgggaggctgaggcaggagaattgcttgaacctgggaggcggaggttgcagtgagccgagatagggccactgcactccagcctgggcgacaaaagcaaaactccatctcaaaaaataaaaataaaaagacccctccctttcgtgccttgtatggctggggctcccgggcccatgtggctgcctgtgaaggcctcctaggcaagaacagttcctatgtgtgtcaagggttgcgaaaagaccacagggcacacacgtcagggacctccatgggcccccaaagcctggatactgcccgagcctctgcagagtctgtgggatgcccctggcagctggaggagtggccggcaaggtggtgactctggcaccgtggccgctggccgagcagggaggcacaggtgttctcaagtcctgtgggtacccccagtactaccacactgctcctgcctgccccaaccagacccccaggcccctcctagagagctcctgggcacagtgggggcaagtgcctgcggggaggcccctcttgggcacatgccctgcatttgccggcaaagggtggggcccccaggtgggctctgccggtcccccgccggtccccagccccactggccccagcactcacagaattccaccagcagggcagggtgctcccgcagggccaggcccagggtgtggcggctcagcaccaagatcccatcctccttggggatttcctcctctggaggctcctccgaggggctcctcgctccctgttcctgaccccatgggcacgaagccctgagcagcagcagcagcagtacaggcagaagctggcggctcatggtgctgccagggcgcgtggggcgggggcagataagggggccagaagccaagcagcagctgccacgtggcacacaggcccagtcccagcaaagacaaggcccatgcggccgcccccggcccccaggggaggggaggcagaaagagacgacacccagggcaccgagagagacagggccatgtttaatgggacagctcaggggacagcgccaggccagggggtcccgggacagagcaggggcagcaggggcagcaggggcagcaggggagggtctggtcactcacggggggtgctggggatgcttgggggtccctgtgcaacaactgagggaggtaggggagacacggactgggggttcagtccttccagtcctggcagatgcagagaccccactcccaggacaggtggtgcgtcctgtcatcgtcggtgaagagggacaccaccagataggggccccgcaccagcgcacccctcggcgcttcctccaccggagtcacaaactcatactcctgggcgctcgggccatagctgcccaccatgtagacggtcttgtccactagggagggcgagggcatcagagctgtcctctgtctgcccccgcttcccccccccgccccgttccccccaccgctgccctcaccgcgcaggccccggcggtaggtgtggtgcagacacttgaggccgctgacaatctccctgtggacctgggaacagaggcattaggggttcctctgggggccaggcctctggctgttgcccccacccccatcccctccgcccattgccccggctctcaccttgaaggagatcttcactctgtaatcaacaccttccttcaggacaaacacctggtccttcagaacagccaggtcccctattggggaaacctcagctagggtcggaactcccctacaggctgagacctgctccaggagcccccacgtagggtgtggtacccatgaggtgtgcgactgtgatggcccagggctcggaactcaggggtgcagaagcgtgcctgggagggccctacctgtgttcagggtgcagcatcctgcgagttacctgtgagatccatgacgacgggccccggagcctgttccgacaggagtgtcagcctggtcacctgcacattgggcaggcttgggtctgaggagaaactggaagtctgcaggatgccccccacccccaccaggctcctcaccagccccccagacccagccctccaagcctagacccctgccatacccacggccggtggcaggggccccagcagcacccgcttgtacttggccaggctcctgtcgtccgggtccagctgccggatctccaagaggctcttcctccccggcgcccggtactcgggcacagcctcatccaacacctcgtccactgccggcggcccaccctccttgtcagccaggaggactgggggtggggaggggcgtgagcagcagccactagcggaccctggcattcgagcaccaggctggagccccctctggccagctgtacctcccactatccaaagggactcaagggaagcctctgggggctcagggagagagcgagcagagagagcagggcggcctggggaggtgccgcaccgcacccagaccttcaggaggggcctccagagaccgccaggcctgcagctcctctggcccagatgtccacaagggccccctccctgactcggagaccaaagggcgggggagcgaagacttcagatgagggcagcccagggtcaggggctacctgctagagagcagcggccctcggcggcccccaaacctactgaccctctagggccctcggcggcccccaaacctactgaccctctagggccctcggcggccccccaagcctactgaccctctagggccctccaccaccctgctctggactggggtctctgaacactttcccacagtctaggagttcctccccatggtgctcgggtgccgggggcggctgtctccaaatccctgggctcaggctctgcgccgcctcccatggcgccccgggctggtggcctcctgaagcccctctccct

SEQ ID NO: 1243213 - DNA, 4001 bp, Homo sapiens
agtctctctctgccctgctgctgttttttctcccaatctctcccacaatacctggctcagctctgcagcatcccagggctcccctgagactgtagcatccaccctgtccagccctgggactgtgctctcagccatcctgcctgcagcctgccctgacctgcccctttattctctcagccttggcccttggttctgccggcacctgcctttctagcctgacaccactgtggctccgctgtgtcccccagcctcacaaagtccaagctcagctccaacatcagctccctaccccctactcagaggagagtggctgtcatgggaaacttttattaatgagaatagccaaaatcgaggggctggtcaccagccatattgtgctgagtgtcaactgtgtgcattccctccacattctccctgtgtgcattctccctgtatgccgtggagagaccccatgtcccagccactgtggtttcccgccaagagggtgtggtaacctccttactgatcctgcctctgcttctactctttgtgcttcacctcaacccattccccacacaacaatcagacatttcctttatttttatttttattgtttgagacagagttttgctcttgttgcccaggctggagtgcaatcacatgatcttggctcactgcagcctccgcctcctgggtttaagcgattctcctgcttcaacctccctagcagctgggactacaggcacccgccaccatgcccggctaatttttgtatttttagtagaaacgggatttcaccatgttggccaggctggtctcaaactcctgacctcaggtgatccacctgcctgggcctcccaaagtgctgagattgcaggcgtgagccaccgtgcccagcagagatttcctttcgacacaggaattccatcacaccactgtgcctatcaaaaggtgctcacttttgtgcaaaaaaaagcttctgcctcttttttttttacaatccattcgcaaaaccgcacaccagccaaactgttctctgtggtctaccaggccccactggctctggacccatctgaccttatcgccctcctctctctctctcctcccgcactctggggagccacactggcctcttccctttcccaagcacaccctacccggggcctttgcctctgtctggggcacccttccctcacatcgtcagccttttctggttctctgggtcctagctcgaatccacgctcatcagaagggtcttcccgggccactctgtctcaccccatctcagctttcagcactctctgccatatcaccattgtttgcatcatattttgtattattatttatgagtgtactttgttgttgttgtcattttgaactttttaatgtaaataccattgttcacagctgttttctccccttcagaacagtgcctgtaccagatttggaactcaatgaatgtttgttgaatgaatgaatgaatggcctaatttaactcttacagcaaaccccattggttcatttcagtggttctcaaccatgactatgctgagaatctcttggagagtttaataaaaaatactgatgttcaaacccaaacccagtaggttctaatttaattgatctggggttgggtgagtctgggcattattattattttttaaaatcctcaagttgatcctaatgtgtagccatctatacaccaaaactgacacttaaaacttaaactggtgactcctggtagagaaaagcctcccaaggcagggcccatcagtcagatttcccattttcactgaagctcatacctgcaggaagccaaggccactcccagggttcctggggccaaggtggggctgtgctgggggtggggccacaaactctgtggcccttaagaaggaaggttgtagcctgaagaggaggctcctggcttctccttgtgatcagggcaggacccgcagacgactgggcattctaaagaatccacaggcagaaatgaagtcccttcctgggcacacagaggccacagcagcctcagcagcaaagttctgagttctggggttctagaggaccaggggtgaccctgtagaagaatgggccattgttgagtaagagggggccctgcctggcagcccttgctgagtttgcttgaggggctagaaacaaaactcagtgtggggtgctgggtatggcccaggagggctctgaactcagtgcctatagattggaatttgaatcccagctctgtcttgaacagctgtatggccttgagaatgtcacttactctttctgaggttcagtttccatgcctgttacatggcatctaactcatgggggtgttgtaagcaaagtaaattatgtggaatttagaagataattaatgatatgaagaaaaataaaacctggaaggatgatgaggaacgcctgagagggggatgggataaaataagaggatttatgcaaaacgagcagctcagtacctagaaggcaggagcccctcacgcatcaccaccctggcctcatctcctaggggagaaagatctccactcaccctgctccagccacactggtgtccctgccagtcctccaatacaatgtctgggcctctacacttgtggtttcccctgttagggaggctcttcacccaggtggactcagggttcaccccttagctcgttccagtctttgcccaaatgtcacttccacagttgggcctttcctggccactttgtttaaatttgtaagtgccccatccccctctcaggcgttcctcatcctccttccaggctttattttccttcatagcattaattttcttctaaactccacataatttactttgcttacctggtgataggtgctcagtaaatatttgttgaatgaataaagaaaaggctgttgatattattagcatcgttattactgtcagagtttgcagcctttggctatctgctgcccaactgttattaaatactgatggagatgactaacattcatttcactaaattttaacatctgtgggttttagtcctagcgctttgctcttctctttcttttctttttctttgagacagtgtagtggcgcgatctccactcactgtagccttcacctccagggttcaagcggttctcctgcctcagcctcctgagtagctgggactacaggcatgcaccaccacgtctggctaatttttgtatttttagtagagacggggtttcaccacattggccaggtcggtctcaaactcctgacctcaaatgatctgcctgcctcggcctcccaaagtgctgggattacaggcgtgagccacggcatgcggccccactcttctctttccatacttaacttccatacttttgttggcttgtttaaatgcatgacttcaaatacacccctttataagttactctctcatttactctccaggatttgatcaattgattacatttactattaagaccgttttccatctgcctattagaaaagctctttttggttgaaccacactcactgaatatctgaatgtcttaatttgaactcatcatgtccctttcaacttttcttggcaattattccttttctggatgttgtgtttgcaaataattcctgggatgtgtttgactcttttttctcccaggcctaaatcaacaatctagtctggcatatattattttgacatctttcacacttgtcaactgttagtcacaaactaaaacacttgggttattatcccaaatgtccttcattcattttccttcactcttgcacacagttgtttcttgacataacataggcacttttatgatgatactcatttactgataaagctgctgctgctttttttttttttgacagagtcttgctctcttgcccaggctggggtgcagtggtgcaatcttggctcactgcaacctccgcctcctgagttcaagtaattctcctgcctcagcctcctgagtaactgggattacaggcatgcaccaccacggccggctaatttttgtatttttagtagagacgaggt

SEQ ID NO: 1243214 - DNA, 4001 bp, Homo sapiens
ttctgggtattttttgtttggtttttttttgttttgttttgtttttgagatggagcctggctctgtccccaggctagagtgcaatggtaagatcgtggctcactgcagccttgcccttctggcctcaagggatcctcctgcctcagcctcctacatagctgggactacaggcatgtgccgccaggcccagctaatagacagggtctccccgtgttttccaggctggtctcaaactcctaggctcaagcgatcttccgcccttggcctcccaaagtgctgagattacaggtgggagctactgcgcacagtcattctgtacgtatttttgtagagttgtaaccccaactttgaatctggctttcctgataagagtattttttcacatctgatggctacattttgacataaataatcacaacttacttaactattctttacggctggaaatttagaggttgtttctactacttgctatttattaatataaaataccaaactggactgggcacagtggctcatgcctataatctcagcattttgggaggccaaggcaagaggatcacttgaggctagggagtttaagaccaccctgggtgatacagcaagtgccccatctctacaaaaatttttagattagctgggcatggtggtaagtgcctgtagtcccagctactcaagaggctgaggtgggaggatcgcttgagcccaagatttcaagactgcagtgagctatgatcacaccactgcactccagcctgggcgacagagccagatctgtctctttaaaaacaacaacaacaacaaaaccccaccaaactgtactgctttatgcagtaaccttttctctacttaggttttatcctagttatttcccaaacaaggagtcagtaggtccaagggtgtagactcattgccaaactgatttccaaaagcttcacatctgcctcctcaagggggtgacgagtttcctagtcccttcactagccctggtggtacttttccttggaatataataaattaaattaaattaaattaaattaaattaaattaaaaaaaaaaaaacagaacaaaaccttgacccattataatgagcttttcatgtatgaatcctgccctcgggatctcgagatcatttgtcgggacctcaagagttcccaggactgaggaccgtcccttcactcccccaccccctgccagcccaccccgcagaagtcggtgcgggggcggtctgtccgggagcagagggcgcctgacgctccggccctgcagtcaaggcaggcagcggtgcagggtgatacaccgcagccaggacgcaaaccctcttgcatccttaaagaaaacagacaggtcccaagttcaaatctctgacttcagcctcatcgctaagtgcatggactccggagcccaccaaaaccgatctccctagaaccccggcacggccgtaccccagctgggtgcccccgggcgacccgcttggtgcctctgagccccggcttgccagcctgtaaaacaggggcgtgcagtcgggacacagagctccaaggggtgctcgataggccagagcagctagtggggtgccccggtaggcagccaagggtcctcggcgagcccgcgggcccacgtggcgcgcgcacgtgagtggggtgaccgtggtcgtaggcccagctggtccctctccgccgcggacccgccccctcacctcagctctccctccgcccagtcacctgagccggtgccgcaggccgggagggtcaggcgccggcgaggcctggcggggaaagaggtgtccacatcccccgctcgttaccttccctacctcggaccctcgcccgcttctcaccagctggcgaggccacagccgcccgctccgtccggtcagttcagcgcctgcgcacagtgccacaactgcggccaccaggtcctcacctcacccaggcggtccctagtcaggacccagctccagaaggaagcgccctcccgccagccctggttggctcaattgcggaggcgggcccttgatggacagaggtattgcccaatggctaaagaggatgagaggcgggcagaaaggcgggacccgggagggggcaacaccgccccttaccccctgcctgggtgctgaaagtgttcgagcgcggggccacaggaccaggcagtcacgtgcctgagatcgccagctacgtggccgctacactctgcataccccgaacccagcggcctccccaattcctcaccgttgttagaacacctcactgcttcctctccacttcggtgtcgaccactccagaaccctctcttgagcgccacaccctgatgtccagccacctggacacctgcctctggaggcccccaggcgcctcaaacataacttaccccaaactcagctttctgccaaacttgctttttctcttctctcctaacccagtaatggccccaccatctgcccagagacccaagccaaaaccctgggaggcatcttgactccttcctctccctcaccctctctttccagttatctaatgctgtaaatcctatctcctaaatctctctccactcatccatccggcgacgcagccaccctattccaagcctctcacttgattttacggttttccctcctccacctttgacttggtcctaaccacagagcagagcagccagaatgacgcccctcccaccttttctcgtggttggtgggtagagacaaggtctttctatgttgcccaggctggtctcaaactgccgggctcaagcaatcctcccacctcagcctccccaaagtgctgggattacagacgtgagccatcacgcctggcagaatgacacttctaaaactcaaattccaaggccgagtgcggtggctcctgcctgtaatcccagcactttgggaggccgaggcggggggatctcctgaggtcaggagtttgagaccagcctggccaacatcacgaaaccgtctctactaaaaatacaaaaattagctgggagtggtggtgcgcgcctgtagtcccagctacctgggaggctgaggcatgagaatcatttgaaccagggaggtggaagttgcactgaggtgagatcatgccactgcacgccagcctgggagacagagtgagagtctgtctcaaaaaaaacaaaaacagaaacaaaaacaaaccaaaaaaaccctcaaattcctgccctaaagtcttttttttttttttttttttttttttttgagacggagtctcgctctgtcgcccaggctggagtgcagtggcgggatctcggctcactgcaagctccgcctcccgggttcacgccattcccctgcctcagcctcccaagtagctgggactacaggcgcccgccactacgcccggctaattttttgtatttttagtagagacggggtttcaccgttttagccgggatggtctcgatctcctgacctcgtgatccgcccgcctccgcctcccaaagtgctgggattacaggcgtgagccaccgcgcccggcctcctgccctaaagtctttagtggtttcccacaaaccattaagctttgaactgaccattatattggcctgctactgacaattaactcagcacggctggcggctggtaggttgagagagacagcgaaccccgacaccagataatccctccgtcccttctggtcctaacattgtggcattccagtgatgacctgcttccttataaattattttcacagaactcttgtaactatggtaagtcagatggagtccttccctggagacagagaaaaatgggagacaaccagaaaaagccacttggagccctgagagtgtggttttccagaaggaagacaccctggcttacctgggcagcctggccagcctcctggacccaaggacgtggtcacaataaaactgctcatgtcagacttgcccttgtatatttatagttccactcacccttagccctttccagaagttcaaagtcaggactggcaatatctctcttcctgcatattaagagg

SEQ ID NO: 1243215 - DNA, 4001 bp, Homo sapiens
gctcactggattccagtgtttttgtgcaaaaaagccatctcatgcgaagaaaactgcagatatgaaatgtccatcatgtggaactgccaaggccatgagaaaatttgctctttcctcttcccgtggatgacaccaaatacacaccttgcattggaacagcgttactgggtgcgagttaacctcacaaatttcgccatgactgtcactgggtgcaggttaacctcacaaacttcgacataactctcggccccagcctccactgagcctggccaatccgcctaattcatgtttttatgttacccgggccactctggtgtacagccacacatgtcgaaatagcgaaaggcatcccttcaacatttttctcagctgaaccttcttccttaacacgcatctctacaaagtccacgagtgagctgcagaaagttcaagagcctcctgacgtagttacaaaattcagcgtcactctgcctttttctcagaagagggcccatacctttcctcaggttctcaaacagactcacaaccccccactccccgccccacaaaaaaaaagatcaagaacgcctatcaaaaagccacatctgccgggcgtggtggctcacgcctgtaatcctagcactttgggaggacgaggcgggcagatcacttgaggtcaggagttccagaccagcctggccaacatggcgaaacaccttctctactaaaaatacaaaaattagccgggcatggtggcatacgcctgtaatcccagctactcaggaggctgtggcaggagaatcgcttgaacccgggagatggaggttgcagtgagctgagatcgcatcactgcactccagcctgcgcgtcgagagggagactccatcaaaaaaaaaaaaaaaaaaaagccgcatcctggaagacacgggatcaattaaatttcttgggttttccttcatttaaaatatttgccttttaaatcaaatgttaaagccatgtagacgttcttccatcacccactgcacatcgcatacaaggcataaatttttaaaccgtcgtccccagactgtagaacttagcatatggaaaacataaaaacacgagggatacttttagcgatagagagaaaatatagaaacaccagcgacacttttagcaaaacatttcacccaacaagtggtttgttttggtccttcccctaaaatccctcctacctgtcaagctcactttcccctcggtgatcctgcacattcggcctcccaggggcttcccacaacgctgagcacagccacgggcagcaaaagcacccaaatgccccttggccgggccgtgaaaggcgagttttcccgaccactgtcatcaagaatctggaaaagggggcccaggagcatcaggtgctttcagcaagaacttgcaccttctgcttctctcgcaggcggaggcgccaaggaccccgttccaggtggaagcccagggcggttcctctacagacagaaccgaaaggtaaccctggaggctcggctccaggctgcgccaagccgaaaacaaactttccaggcacttccaccccgctgggccgggtgacacctcccggcctcccccgccctccgcgcgtctgtcagcgcccccggccaggccgccgcccgccgcaacccaggcccggtctccccgccgcagccaagcagcgccctcggccggcgcccgccatccccggcccggccgcccggctgcaggtaaggaggcacccggccctcgggaccccgggccgccccgcctcgccggacccgggcggccgccggacccggcagggtaacaaaccggcgcgtccagtccgccgccgcgcgctcaccagctggctggtggtcctggccatgggccccgcgtcggcgcgggcgcctcccccgcagcgctgcgcggctcggcgcctcctcagcgtcctcctccccgaagcggagccccagcaatggccgccctcatcctgcgcccgccccgtcgcccgccgccccccgcccccggcgccgccccgcccccgcgcggcgccgggcaggacttccgtcgcgccgcagccgacgcccgcgcccattggccgcgcccatcgtcgctccgccgcggccttagtgggctccgcctccgctccagctgcatttccgggttggggcctggcgggcgggagaggcccgaccccgcctggggagggggacctcgcgcgaaccaatcccagggcctgcggggcggggctgggcggggctgggcggggcagggggcgagctgtcattccggcatcccagaccgggaaactgaggctcagaggggaccaggctccggccaaggtcacgcccgaggtagcggcggagctgtgctcgaacccggaactcggattccggagccggctctgcgtaaactcagaggcgcaactttgctagtttcacaactaacaagcgttcacggaaggaaatctgggctatcaagtcacattcacggccgggcacggtggctcactttgggaggcggaggtcgaggcgggcggatcacttgaggtgaggagttcgaggccagcctgccaacatggagaaaccctgtctctactaaaaatatacaattagccgggcgccttgtagttgttaatgtcgataatgtttttttgtgtttttttgttttgggtttttggtttttttgagatggaaatttgctctgttgcccaggctggagtgcagtggctcgatctctgctcactgcaacctccgcctcccgggttgaagcgattctcctgcctcagcctcccgagtagctgggactacaggcatgtgccaccacacacaggcaaatgtttgtatttttttgtagagacagggtttcaccatgttggccaggggctggtctccaactccagtgatctgtctgtctccgcctcccaaagtgctgggattacaggtgtgagtcaccacgcccggccaactttatttttttttgagacagagtctctgtcgcccaggctggagtgcagtggcgcgatctcggctcactgcaagctccgcctcccgggttcactccattctcctgcctcagcctctccgagtagctgggactacaggcgcccgccaccacgcccagctaatttttttgtatttttagtagagacagggtttcaccgtggtctcaatctcctgacctcgtgatccgcccgcctctgcctcccaaagtgctgggattacaagcgtgagccaccgcgcccggccaactttatttttttttatactgacacatgcccatgcagttcttgagtaatgcacagaaaaatcggaagcagtgaaggacaaacagcttgaggaactagtacacagtgaactctagaacacggagcccagggtggaggagcctcggggcaggggccaagggccaagggtcaagggtcacaagaagaaagcatctgagcaggcaccaggggacaggggagagaggggcagctgaaggtcaaagaagaaaggacagttctcagttgtcctgggggccccagtggcagccagaatgcttggccaagcccaaggcaagctagaccaggaaacccctcgccctctggcgacacagacaaatctccccatgggtcaggtccagtggctcatcccaggacaccgcacagacagcggatgtctcacctggcccagcacggttctcccgacccgggctggaggaaagagactgacccctctctttatctcaccctttcctgccgagaacctctgtctatggccaatggatgacctcaggccaagaatgcaataacttggcctgacgttgtgaggtcacggtccatccagggaggggcaagaaaatgaccacaaccatcccgggaggggctggaaagctgcctcatgtgcgtggcactgtgctgcgtctacgtgttcctcactcgcctctacaatgctcatggcacgagggaggaaacgggggtgcagaggctaaggaacgtgcccaaagccctacagctggtgtattagttatatactgctgtgtaacaaattgcc

SEQ ID NO: 1243216 - DNA, 4001 bp, Homo sapiens
cggtcacaaggaagactggatgagcgtgggttcacacaacatttcccacacttgcctcagcaaaagaaccacctgggacacttgtttaaaaatgacagattcccacggtccacctcggcagattctgatcctgccactccagggagctgtatttttcaacaagtacaccaggtgatcacgcaagtttaagaaattaacacaagttggccgagcgcagtggctcacgcctgtaatcccagcactttgggaggctgaggcgggagaatcacgaggtcaggagttcgagaccagcctggccaacatagtgaaaccccgtctctactaaaaacacaaaaattagccgggcgtggtggcgcacacctgtattcccagctacttgggaggctgaggcaggagaattgcttgaacccaggaggcagaggttgcagtgagccgagatcgcgccactgcactcccgcctgggcgacagagtgaaactctgtctcggaaaaaagaaaaaaaaagaaaaaagaaattaacacaagtccctgccactggaaaagcttatccgtcaggctggctcctcctccaccaccagaccccatcccggtacatcacgtttacatgcatgcggaaaatgggcttggagattcttgattcaaatccgaggtatcacacatcggcccccaaaggtcaaacattaagaaggaagcttactgccctgtcccagatttttctaggtgacttcttcctccggactctgcagcagtctttagttctaaaagcacaagcggaccgcacgtctcaacgcgggaaaacagttccatctgcagggatggaggaccgggctagacaagctggagttggctctgcgccgcaggggtgtgcaagcccgagacgggggagcccgaggtcaccccggccgccctggcatcggggctgaagtgcaggctcctggaggagcggtgcgcacgcccaggggtagccgagaacacaagccaaggcacgagcggacaaccttacggggacgagtactggcgcccggacgcgacttcgcgagaggccaggcggaacccactggaagcgtgagctagcggggaccacccccgggcgaaaccaaaggagaaagaggggaacccaggggtcccggggcgcttaggcccgcgcggacggggaggccagagttgccccgaagctatctccttacctcaccggtccccacgggctccgcgctcagctacagcccggcgggagcaatgcggcagccacaacagttgcctggggtcgccgcgggccggaaagcggggttcggggatgggaagggggcggggcgaagcgagcaaaaagttccggggaagccgagaccgcgaccttccgcgctttacggcccccgggcaagggtactgccggcgcgtgacctcagcagcgcacgagcgcgccgtgacgccttcgcggagccccgcccctgccacgtgggcttgtttgggtctcgcgaggcaccgcccccgcggcctctttgccaccctcagaggcgagctgtggaagccttgactcttagggccgttttagaaccggggcctcggaccggcggggtttctgcacgtggaaccggaacatctgagatgatcgcaggccctgtggagtgtggggagcgcgggagttctttcttccctcgaggcccgtgccagggcttactccaaagccagtgggtccccagtcctaagccaagcagtcccgggggaaaacgcttctcatcgccgtgggagcgcggatcttggaagtggctctgggctttcttgggcgaggctctcacagagtagatcggaaatccattctgctggcccgccccacctcggaggacggactaacggacctgagttcccggccctatcttactcttctcagcttctcagcttggctcagctcagaggaagaggaatcactgaagtctcagagaagtctccactcatcccttcctcactgtcacatcagccttttctttccttctagaactcatcactgactcaaggatataagtttgatgactgtcttttccactggtgtgacacgatctctgtcgacagaaccttagtcttatgcatagctttattctcagcacccagaacagtgcctggcacctcttccactgaatattatatgcataagggtctcatgctgcagccaccattgcatcttgggccacactatccagttcccgtttgttggattcaatactgtctcaccacacaaaccaatcttgtgttttattaatttaaaaaaaattttttttttgtagagataggctcactatgttgcctaggctgggcctgaactcctggcctcaagtgatccttccatctcagcctcccaaagtcctgggattacaggcgtgagccactgtgcctgccccaatcttgtgttttattgctggccacctgtagccaggcactgtgcaggatgatgggatccagcaatgtacaagaaagaggcggtttctgctcttagggagtggcagtcaagttccagggacccctctgtcacaaggccaggccacagcctacatagtttataccccatttactggccagtcaaatcacacaaagacagcccagatgaggtctgccagacagtggactgaaactatgccataggctcctgtgctagataaatacttccatattttagctaggattgaatgcttggggacacctacctgtctaaaaaaagagaaaacggctgaccaatttgagacattctcggggaaggctttcctgatgcccagatgtggcgatttcatgaaaaatatcacaggttttcctcatgaaccatttggttcaagccatttccaggcacatgaatttgggagaaacctggttgtctgcaggagatggtggatgaaatcaagtgaaatacttaatgtgttgatttcattctgtttacgtgcagtaaatagcaaacaaatggtgtagatctgtccctgatttccttctccatcaccatgatcggcctccactccaaaatgctaagtcaggctgggtgcggtggctcatgcctgtaatgccagcactttgggaggccaaggcagttggatcacgtgaggtcagaagttcgagaccagcctgatcaatatggtgaaaccccatctctactaaaaaatacaaaaattagctgggcgtggtggcacatgcctgtaatcccagctactttgggaggctgggacaggagaattgcttaaacccaggaggcggaggttgcagtgagccaagattgtgtcactgcactctagcctaggcgacagagcgagactgtctcaaaaaaaaaaaaaaaagggaagtaagtcctaaggcccctttcattgtcaaagatgggtcttgtccttagtaggttctcataaccactgatgcactattttttctaggggattgagtgtttttattttattattattttttagatggaggctcactctgttgcccaggctggagtgcaatggtgtggtctcggttcactgcaacctctgcctcccaggttcaggggattctcctacctcagcctccccagtagctgggactgtacaggcgtgcgccaccacgctgggctaatttttgtatttttattagagacagggtttcgctatgttggccaggctggtctcaaactcctgacctcgtgatctgcccacctaggcctcccaaagtgctggaattacaggcgtgagccaccgcgtccagcctatttttattttttgagattagctctcaccctgtcacccaggctggagcacagtggtgcaatcacggctcactgcagtcttaacttcctgggctctagcgattctcccacctcagcctcccgaatagctgagacctcaggcgcgtgccaccgtccccagctaacttttgtattttttggtagaggtggggtttcactatgttgctgaggctggcattaaactcctgacctcaagagatccacctgccttggcctcccaatgtgctgggattagaggcatgagccaccat

SEQ ID NO: 1243217 - DNA, 4001 bp, Homo sapiens
gaggaaagatcaccccagttcttcaggattccaattacaatcacatgaagcccacccaccttcttaggaaattgataacaccactttgcatcgttttgtactcaactgctggtgttataaacatgatcttgaccaggatttctcagcctcaacactgctgacattttgggccagagaattctccagcgtggggggctgtcctgtgcaacgtaggatgtttagaggcgtccctggcctctacccactaggtaccggcagcacctccctgcccccattgtgacaatcaaaactatgtccagagatagccaaatgtctcctggggaaataaattgccccctgctttaagaaccactcatctggacaaactcaaagtaccaaaaggtagacaccctgctaatcagacgaccggaaagactttattcccagccaggaaaacacgtaacattcaccccagagatggcacaagaaaaccatattatctttttcttgtcttccacccaatttatgctaagcaacccaggagtaggctataccactgtgagcacatgaagacatctggcccaacctttacaattattgccttcaactctccagtgacaagtgaacaaaatctacagcagctgctgccttgaaaaaagacaaaatatattattcctaccagctcaaaattaaaatgtagccgtcttaaaacacgagcattgctcctgaatgccacatgcatgaaaaaccgggtatgcactggattggacaagcagactcccaagctggaacagacagaagggctttgagggagggcagaatgtcaggtaccgaaagcaggaatccgtgaagaaacccaaactggtttccatttacaagccctaacactgggacaatgagaatccgtttcacatggtagagcagtcagcctggtacaccacgctgccgttcccccaaggggaaaccagaggtaggctctgttaccagtggatttcgagttgactcggggatccctcctcgccactggaatgggggagccaggaagttgtggagcagctgcgatccccaaaactcaattcgcaatctacgcaacacccacccctttctggaactcagaggttctcgcccggtgatcgcaggctcagcatcagaatcacctgcgtggggcggagtgggagcggggcggtggcggttaaacacgcagttcccggtcccgcccccagaggttctgaccccgggactgaacctccgcattttaccaaaggccccaggtgattcccactcaggctgaagttggaaaaccactgctttggcaattttcattcctaactcggagaccaagaaaaacctacaggtttgcagctggctctgaaataactgcggcttctttccgggagcatctggggccgccaacggagagctcccggtcctccgaaagggccagccgagctcaggccggccactcgcggaacctcggcagggcccaaggtcggccccgcggtcccagtcctgggctccgggcccgtcgcggcccccaccgaaccccgcccagcctcttcggcccacggggacccaagagacacccggccccgtgacgcgcccgggccccagccgccctcccggcgaggcctcctcaggcagggcctgtcagcccgcgtccccctgtccgggtcacaatggcagctcgcgactgggaaacagttgcctcggaagcgggagccccgggccgcagcaccgtccccatcgccccctcccggcacggaccttctccagggacgcgtccatggctgaggcggccggtggtggcctggcggtcccgggctctacttcctcctcccgcgccccgcagctccttccacgctggcagcgctgacgtcccccgcgcccgcggccggcggggcggagaagaggaggagctgccaggcggcgccgcgggctgccgaacctgatggttgagaggcggcggggcggggccccgtagcgctgggcggagccctctgggattccgtacctgggcgccacgccggccctccctaacgtgcgcaggtgaaggggggaggatgcccggtggattgttcaccaaactctttccagcagcctgttgcaatcatcaaggtagaagtataataatcacaaagtactattcatggagtgaaaggctggaaatactagtgacgcacctcacttccgggcccaggcttccaagtctcccgcctcacctcccgccggcatccctcgagaatggaacaggccattcgccaaggaggcggtgagcgagtgggcaaccttgcgcatgcgcaggactcgcagcgtcctcggcgcccggggacttgggggttttggggttgggggctgcttagtgaacgctgttcagagaaggcactgatctaagctgaggtgttgtctcagaccttaccgccgaattctagacggaaaaaattgttgtaacaaccggtccagcctctttcatgtcacaattatcacttgtcaggtaatgggtagtagtaataatgataatattaatacatcagctgctgttcttccattttcctatttcagcagctctaggagatcattatccccatttcgcagtgccgatctaggtaggattcagacccaagccccatgagtccacatactgcttccactcctactttactttaaatgttttaaaaagttaattttttattaatttttttatcttgttaaccgatgaactgaagagaaaaaaaattaaaatctcattttaatagagaaggtaggggtgtctcactatgttacccaagctggcttcaaactcctggcctcaggcgatcttcccgtctcagcttccccaagtgctgggattacaggcatgagctaccacgcccggccacttttgcaattttactgcaatgtgtttcgaacgaatggggagggcgtacatttgcttagtagattcctcccaccttaatgtgggaaactgatatagactaccacagtggcaatcaatggaacacttcacctctgcgatgacgctacaaccacaatcttactccttttctctcctgttttatactcttcgtcccgaaatctgtgtaaacagggtcacattttcagcgcagtaactccatgttttgagctatctacgttgtatttggtaaattgcctggttatgttaataaaattattttctaccaaaaaacccttgtgtgctggtttagactgtactgtggggattattctgactctctaaagagctttccaaacagaaggaaagatagatttatgtctttcaagaattgaagattgaatgtacccctgcttgagcaaaacaagtcacttttccaacgtgttatgaaatttttcaaacgtagaaaagtttaaacagttgtacagtgaacaaccatatacccactacctagattctacagttaattttccctatatttgctttaatcacatatgcatccatatatccatccatcgatatatgttagtacatttcacctctgagcacctcagcatgggtatcattcaaaactagtaaattttactaaagtcacctccaagtttctgtggattacattacaaagtataatagattctacaaaacaaatactagagagaaaagttaactttactgttttaaaagtagactttgaaaacccaacatgaaaaagtggaaataatcaaccgtattatttattatatttagccaaacatttattgactgccatcttggacagttgtgctggaaatagtatgtaaaagaataagaggctggttcaagagcagcctggccaacagagtgaaactccgtctctactaaaaatacaaaaaattagctgggcgtggtggcaaacacctgtaatcccagctacctgggaggctgaggcaggggaatcacttgaaccccgggggcagaggttgcagtgagccgagattgtgccactgcgctccagcctgggcaataagacgagactccatctcaaaaaacaataaaaatacaaataagaggctgggccgggcgcggtggctca

SEQ ID NO: 1243218 - DNA, 4001 bp, Homo sapiens
ccctggcctctacccactaggtaccggcagcacctccctgcccccattgtgacaatcaaaactatgtccagagatagccaaatgtctcctggggaaataaattgccccctgctttaagaaccactcatctggacaaactcaaagtaccaaaaggtagacaccctgctaatcagacgaccggaaagactttattcccagccaggaaaacacgtaacattcaccccagagatggcacaagaaaaccatattatctttttcttgtcttccacccaatttatgctaagcaacccaggagtaggctataccactgtgagcacatgaagacatctggcccaacctttacaattattgccttcaactctccagtgacaagtgaacaaaatctacagcagctgctgccttgaaaaaagacaaaatatattattcctaccagctcaaaattaaaatgtagccgtcttaaaacacgagcattgctcctgaatgccacatgcatgaaaaaccgggtatgcactggattggacaagcagactcccaagctggaacagacagaagggctttgagggagggcagaatgtcaggtaccgaaagcaggaatccgtgaagaaacccaaactggtttccatttacaagccctaacactgggacaatgagaatccgtttcacatggtagagcagtcagcctggtacaccacgctgccgttcccccaaggggaaaccagaggtaggctctgttaccagtggatttcgagttgactcggggatccctcctcgccactggaatgggggagccaggaagttgtggagcagctgcgatccccaaaactcaattcgcaatctacgcaacacccacccctttctggaactcagaggttctcgcccggtgatcgcaggctcagcatcagaatcacctgcgtggggcggagtgggagcggggcggtggcggttaaacacgcagttcccggtcccgcccccagaggttctgaccccgggactgaacctccgcattttaccaaaggccccaggtgattcccactcaggctgaagttggaaaaccactgctttggcaattttcattcctaactcggagaccaagaaaaacctacaggtttgcagctggctctgaaataactgcggcttctttccgggagcatctggggccgccaacggagagctcccggtcctccgaaagggccagccgagctcaggccggccactcgcggaacctcggcagggcccaaggtcggccccgcggtcccagtcctgggctccgggcccgtcgcggcccccaccgaaccccgcccagcctcttcggcccacggggacccaagagacacccggccccgtgacgcgcccgggccccagccgccctcccggcgaggcctcctcaggcagggcctgtcagcccgcgtccccctgtccgggtcacaatggcagctcgcgactgggaaacagttgcctcggaagcgggagccccgggccgcagcaccgtccccatcgccccctcccggcacggaccttctccagggacgcgtccatggctgaggcggccggtggtggcctggcggtcccgggctctacttcctcctcccgcgccccgcagctccttccacgctggcagcgctgacgtcccccgcgcccgcggccggcggggcggagaagaggaggagctgccaggcggcgccgcgggctgccgaacctgatggttgagaggcggcggggcggggccccgtagcgctgggcggagccctctgggattccgtacctgggcgccacgccggccctccctaacgtgcgcaggtgaaggggggaggatgcccggtggattgttcaccaaactctttccagcagcctgttgcaatcatcaaggtagaagtataataatcacaaagtactattcatggagtgaaaggctggaaatactagtgacgcacctcacttccgggcccaggcttccaagtctcccgcctcacctcccgccggcatccctcgagaatggaacaggccattcgccaaggaggcggtgagcgagtgggcaaccttgcgcatgcgcaggactcgcagcgtcctcggcgcccggggacttgggggttttggggttgggggctgcttagtgaacgctgttcagagaaggcactgatctaagctgaggtgttgtctcagaccttaccgccgaattctagacggaaaaaattgttgtaacaaccggtccagcctctttcatgtcacaattatcacttgtcaggtaatgggtagtagtaataatgataatattaatacatcagctgctgttcttccattttcctatttcagcagctctaggagatcattatccccatttcgcagtgccgatctaggtaggattcagacccaagccccatgagtccacatactgcttccactcctactttactttaaatgttttaaaaagttaattttttattaatttttttatcttgttaaccgatgaactgaagagaaaaaaaattaaaatctcattttaatagagaaggtaggggtgtctcactatgttacccaagctggcttcaaactcctggcctcaggcgatcttcccgtctcagcttccccaagtgctgggattacaggcatgagctaccacgcccggccacttttgcaattttactgcaatgtgtttcgaacgaatggggagggcgtacatttgcttagtagattcctcccaccttaatgtgggaaactgatatagactaccacagtggcaatcaatggaacacttcacctctgcgatgacgctacaaccacaatcttactccttttctctcctgttttatactcttcgtcccgaaatctgtgtaaacagggtcacattttcagcgcagtaactccatgttttgagctatctacgttgtatttggtaaattgcctggttatgttaataaaattattttctaccaaaaaacccttgtgtgctggtttagactgtactgtggggattattctgactctctaaagagctttccaaacagaaggaaagatagatttatgtctttcaagaattgaagattgaatgtacccctgcttgagcaaaacaagtcacttttccaacgtgttatgaaatttttcaaacgtagaaaagtttaaacagttgtacagtgaacaaccatatacccactacctagattctacagttaattttccctatatttgctttaatcacatatgcatccatatatccatccatcgatatatgttagtacatttcacctctgagcacctcagcatgggtatcattcaaaactagtaaattttactaaagtcacctccaagtttctgtggattacattacaaagtataatagattctacaaaacaaatactagagagaaaagttaactttactgttttaaaagtagactttgaaaacccaacatgaaaaagtggaaataatcaaccgtattatttattatatttagccaaacatttattgactgccatcttggacagttgtgctggaaatagtatgtaaaagaataagaggctggttcaagagcagcctggccaacagagtgaaactccgtctctactaaaaatacaaaaaattagctgggcgtggtggcaaacacctgtaatcccagctacctgggaggctgaggcaggggaatcacttgaaccccgggggcagaggttgcagtgagccgagattgtgccactgcgctccagcctgggcaataagacgagactccatctcaaaaaacaataaaaatacaaataagaggctgggccgggcgcggtggctcacgcctgtaatcccagcactttgggaggccgaggcgggcggatcacgaggtcaggagatcgagaccatcctggctaacacggtgaaaccccgtgtctaccaaaaatacaaaaagaaattagccgggcatggtggcgggcgcctgtagtcccagctattctggaggctgaggcaggagaatggcgtgaacccgggaggcggagcttgcagtgagcagagatcgcaccact

SEQ ID NO: 1243219 - DNA, 4001 bp, Homo sapiens
acattttgggccagagaattctccagcgtggggggctgtcctgtgcaacgtaggatgtttagaggcgtccctggcctctacccactaggtaccggcagcacctccctgcccccattgtgacaatcaaaactatgtccagagatagccaaatgtctcctggggaaataaattgccccctgctttaagaaccactcatctggacaaactcaaagtaccaaaaggtagacaccctgctaatcagacgaccggaaagactttattcccagccaggaaaacacgtaacattcaccccagagatggcacaagaaaaccatattatctttttcttgtcttccacccaatttatgctaagcaacccaggagtaggctataccactgtgagcacatgaagacatctggcccaacctttacaattattgccttcaactctccagtgacaagtgaacaaaatctacagcagctgctgccttgaaaaaagacaaaatatattattcctaccagctcaaaattaaaatgtagccgtcttaaaacacgagcattgctcctgaatgccacatgcatgaaaaaccgggtatgcactggattggacaagcagactcccaagctggaacagacagaagggctttgagggagggcagaatgtcaggtaccgaaagcaggaatccgtgaagaaacccaaactggtttccatttacaagccctaacactgggacaatgagaatccgtttcacatggtagagcagtcagcctggtacaccacgctgccgttcccccaaggggaaaccagaggtaggctctgttaccagtggatttcgagttgactcggggatccctcctcgccactggaatgggggagccaggaagttgtggagcagctgcgatccccaaaactcaattcgcaatctacgcaacacccacccctttctggaactcagaggttctcgcccggtgatcgcaggctcagcatcagaatcacctgcgtggggcggagtgggagcggggcggtggcggttaaacacgcagttcccggtcccgcccccagaggttctgaccccgggactgaacctccgcattttaccaaaggccccaggtgattcccactcaggctgaagttggaaaaccactgctttggcaattttcattcctaactcggagaccaagaaaaacctacaggtttgcagctggctctgaaataactgcggcttctttccgggagcatctggggccgccaacggagagctcccggtcctccgaaagggccagccgagctcaggccggccactcgcggaacctcggcagggcccaaggtcggccccgcggtcccagtcctgggctccgggcccgtcgcggcccccaccgaaccccgcccagcctcttcggcccacggggacccaagagacacccggccccgtgacgcgcccgggccccagccgccctcccggcgaggcctcctcaggcagggcctgtcagcccgcgtccccctgtccgggtcacaatggcagctcgcgactgggaaacagttgcctcggaagcgggagccccgggccgcagcaccgtccccatcgccccctcccggcacggaccttctccagggacgcgtccatggctgaggcggccggtggtggcctggcggtcccgggctctacttcctcctcccgcgccccgcagctccttccacgctggcagcgctgacgtcccccgcgcccgcggccggcggggcggagaagaggaggagctgccaggcggcgccgcgggctgccgaacctgatggttgagaggcggcggggcggggccccgtagcgctgggcggagccctctgggattccgtacctgggcgccacgccggccctccctaacgtgcgcaggtgaaggggggaggatgcccggtggattgttcaccaaactctttccagcagcctgttgcaatcatcaaggtagaagtataataatcacaaagtactattcatggagtgaaaggctggaaatactagtgacgcacctcacttccgggcccaggcttccaagtctcccgcctcacctcccgccggcatccctcgagaatggaacaggccattcgccaaggaggcggtgagcgagtgggcaaccttgcgcatgcgcaggactcgcagcgtcctcggcgcccggggacttgggggttttggggttgggggctgcttagtgaacgctgttcagagaaggcactgatctaagctgaggtgttgtctcagaccttaccgccgaattctagacggaaaaaattgttgtaacaaccggtccagcctctttcatgtcacaattatcacttgtcaggtaatgggtagtagtaataatgataatattaatacatcagctgctgttcttccattttcctatttcagcagctctaggagatcattatccccatttcgcagtgccgatctaggtaggattcagacccaagccccatgagtccacatactgcttccactcctactttactttaaatgttttaaaaagttaattttttattaatttttttatcttgttaaccgatgaactgaagagaaaaaaaattaaaatctcattttaatagagaaggtaggggtgtctcactatgttacccaagctggcttcaaactcctggcctcaggcgatcttcccgtctcagcttccccaagtgctgggattacaggcatgagctaccacgcccggccacttttgcaattttactgcaatgtgtttcgaacgaatggggagggcgtacatttgcttagtagattcctcccaccttaatgtgggaaactgatatagactaccacagtggcaatcaatggaacacttcacctctgcgatgacgctacaaccacaatcttactccttttctctcctgttttatactcttcgtcccgaaatctgtgtaaacagggtcacattttcagcgcagtaactccatgttttgagctatctacgttgtatttggtaaattgcctggttatgttaataaaattattttctaccaaaaaacccttgtgtgctggtttagactgtactgtggggattattctgactctctaaagagctttccaaacagaaggaaagatagatttatgtctttcaagaattgaagattgaatgtacccctgcttgagcaaaacaagtcacttttccaacgtgttatgaaatttttcaaacgtagaaaagtttaaacagttgtacagtgaacaaccatatacccactacctagattctacagttaattttccctatatttgctttaatcacatatgcatccatatatccatccatcgatatatgttagtacatttcacctctgagcacctcagcatgggtatcattcaaaactagtaaattttactaaagtcacctccaagtttctgtggattacattacaaagtataatagattctacaaaacaaatactagagagaaaagttaactttactgttttaaaagtagactttgaaaacccaacatgaaaaagtggaaataatcaaccgtattatttattatatttagccaaacatttattgactgccatcttggacagttgtgctggaaatagtatgtaaaagaataagaggctggttcaagagcagcctggccaacagagtgaaactccgtctctactaaaaatacaaaaaattagctgggcgtggtggcaaacacctgtaatcccagctacctgggaggctgaggcaggggaatcacttgaaccccgggggcagaggttgcagtgagccgagattgtgccactgcgctccagcctgggcaataagacgagactccatctcaaaaaacaataaaaatacaaataagaggctgggccgggcgcggtggctcacgcctgtaatcccagcactttgggaggccgaggcgggcggatcacgaggtcaggagatcgagaccatcctggctaacacggtgaaaccccgtgtctaccaaaaatacaaaaagaaattagccgggcatggtggcgggcgcctgtagtcccagctattctg

SEQ ID NO: 1243220 - DNA, 4001 bp, Homo sapiens
aggatgaaaaccacgacaaggaaaacactgaagatggaaaaggtattttatgtgttttaggcaaaggctcttcacacagtgcatgctcaggatgaactattagacatgaaacctgaggaaagtgctcgctagggcccagtggcagggaccctggaacccgaaggtactgacaaagatgatcctactgctgttgaaagtgagatcttcaatgcttcctccctggaaaagggtgagctcagaaaagagtgagctgctgtgtttggggacaaccaggtggaggaggcagcactatggtcctcggagagccagaccccaagcaccagactaaaatatgaaagacttacaggttttgctacaaggctagtcagacagcaatgtcaaccttcccaaggacaagcagtccaaatgacaacagccctgcagtgaaaaagcctaaggctgtctggcacctgcctgcctagttcagcctctttgccaacctcaagtcttatcaaatcctgatgctgtgcggaaaaaagccataaagaacaagaattgctcagtgcaggagtctgcatccttcagtaagcccacctgggggctagcagaagtataaagtgattagagcctgggcaacatagtgacacctcatctcttctatttaggctgggcatggtggctcacacctgtaatcccagcactttgggaggccgagggtgggcggatcacttggggtcaggagttcgagaccagcctggccagcatggtgaaacaccgttgctactgaaaacacaaaaatcagccaggcgtggtggttcacgcctgtaatccaagctactctggaggctgaggggcaagaatcgcttgaacccgcctggaaggcgggggttgcagtaagccaagatcatgccgctgcactctagcctgggtcacagagcaagactctgtctcaaaaaaaaaaaaaaaattagctgaatgtggtggtgcatgcctacagtcccagctatgggaggctgatgcaggaggattgcttgagcccaagaattggaggctgcagtgagccaggagcataccactgcactccagcctgagcgacagaacaagactctgtctctaaaaataaaatacagtgacccatatgctattttaagatttatgtgcccttttaataaaaatgaaagggccaaagtccctatttacattggtataattttttaaaggctccttactatgtgatttcatttttatgatgttctccatggaaaaggcaaaaaaaaaaaaacgctgtaaaaaacagatgggggtgtgaggagctgcagtggggtggggtttggctgcaactgggcattgcaaagtaattttagggagtggtggaactgttccctatcttgatggagggggtggttcaacgtgggtatagcttgtcaaaacggtagctgtacttttaaaaggggggatcttactgcatggaaattataccttgataaaaataacgatggccaaggcgggcggatcacttgaggtcaggagtttgagaccagcctggccaacatggtgaaatcccatctctactaaaaataaaaaattagctgggcatggtggcaggcacctgtaatcccagctactcgggaggctaaggcagaggaatcacttgagcctgggaggcagaggttgcagtgagctgagatcgcgccactgcactccagcctgggggacaaagcaagactccttctcaaatgatgatgatgatgatgatgatgatgatgatgatgatgatgatgatgataatgatgatgatgataacaacaacgatggagagaggttatctcccaggccaagagtgcaccgttgccattttacagaggaggaacattgacgaaggcttggtccccagggcttcttcacccgcttccttctccccagttaccttttttgtttttgtgggaggccttctgcatggtcccgggaggtcaggcagcccgggagggcctcccggagcagaggctggagtcagtcccaatgccaacagtttcgaaccttgcccgcgggcactgccctcgggatggccgccagggggcgctgcgccgccactgcccagaaattgggcggcagtgaggtcgccgcaaggcttcccgtggaccctgcaaaacgtggcgtgggcattgcacaccattgtactgtatggaaacttctgcagaggttagcaccgtgcctgacccacggtggtttcttcattccttcttttctttttctttttttaagagacgggcagggggtgggggtctcactatgttgctcaggctcaacacaactgttgcactatgggctcaagcgatctgcccgcctcagcctcccaaagtgctgggattacaggcatgagccaccgcgcttggcttcttcattcattcttggtgaacctaagaaatagggagggggagaaggcacagaggagggtgtctcaaagatgtgaggtggtctgcagaggaagatcacagccagaagatcacaggagatcacagaatacctagaagatcagagaatcccccgctgcacttctaataatggtattttaaaaaaattgttacatcagtagctccaatgctttggaactgcactttttttcatgaatgttttgaataagaaaaggccccagggtggcctaaaaaaaaatgagtcactattaggagaggcactattaatgcttccttcttttttccaagataattcttcctcccacacacattcactcatacaacaagtatttacagggagctgttctgtcatttactgatactggggacacaacagtaagcaagacaaacacagaaacacaggctctatcctcttgaaacctgtacttaaaaaacagatgaagtggacaattttaggaaaatataaattattaaaaataaattctaggccaggtgtggtgtctaacacctgtaatcctaggtactcaggagactgaggcaggaggactgcttgagcccaggagtttgagatcagcctgggcaacatagtgagaccctttctctataaaaaaaatttaaaaattagctgggcatggtggtgcacatctgtagtcctagctactcaggaggctgagatgggaggatcacttgagcccaggattcaaggctgcagtgagctatgattgagtcaccaccttccagcctgggtgatggagcaagatcctgtctcaaaaaataaaaatgaataaatgagttagtaaattctagaagaaagagaaaacctaatgaggtaggccctggtgttatccccggtctgatgaaactgagaggctaagcaccttgccccatcccttcaacaaacagtcattaaccacctattaggtgtcaggcactgtgcaaagatttccatggtagatctggttatgtccaagcttattctgttgtttctgtggctctacacagacaataagccagggcagattcctctttaggttccttttttttttttttttttttgagatggggtctcattctgtcacccaggctggagtgcagtgacaaaatctcagctcactgcaacctccgccttccaggcccaagcgatccttccacctcagccaccagagtagctgggaccacaagcctgtgtcaccacgcccagctaatttttgtatttttagtagagacagggttttgccatgttggccagactggtctccaactcctgagctcagggtgatccacccgccttggcctcccaaagtgctgggattacaggcgtgagcgccaggacagatttctcattagataaaacctgtgtcgtagagaccagtacaaagggctattctccacctcaagtctcctgtgggtgacttcttgtgacaggtcacctttcctcttccaaacagtctggcaggggtctacatagataccaacttaattctatcataaaatacatctttttcctccatcttcctaccagcaggggaagggtaagagtttgtgggaatagagcccatcagcatatatggttctgtgatggagcatatc

SEQ ID NO: 1243221 - DNA, 4001 bp, Homo sapiens
cagaggctccttcagtggaattttgcctacgacacagagcacagctattaatacacttaaaattcaaatccattgcctgacacagttgttcaaagttaaaaactggtagcagcactgctctgagctccctgcactgcagcccggagttcagtgaaggcgtccacgccatggtagctgctccgtccaaatcacctgggtataaatgcacacttgagacagcagagctttagctgggctgcgtttacagaactgggcagcagccctgggtatctgaaacggaacagacactcagttgtgacatcagagtggttttcaaggaagtaagggaggtgggagagtggtgagggcagcactttgcacccaagggcagggagatgccacctgggagcagccgcctcctccactcccaccctgctgggaggcacagggacacagaaggctccgctggactttcagtcatactgatggggctctggtccatgcaagcctctcccaacagtcagaataatcagtccctctgccccctgaggggctggatccctgaatgagtttttcaataaaatacaggacacacacccctagacccgcctcagtcccatcggcaggccctggttacctgaatcccggacaggtgcagagcctgcccctgccaaccccacccaaggcccagaacccagcccacaacgccttccaagcctaaaagtgcatcttcgattacaagcatctgtaaacaaaatcgtcccccaaacgtgtacttacaaggttaacaatgaatgcctttgcttaactccaattacactctttgaagccacttagccgagcagatgcttaagccccacctattaatttgggtaactggttttcaatttctttttttttattctgcagattaaagacactcaatctttaaccttgaagggcaggcaaaaggtcggctatgctgtcaacatagaagtcagggaccattttcttcttagacacgcagtcactttcctgattattcttcacatcccctagagtggagactccggtgagggtcaggatggtcttcaggccacaggtggcgcctaggaggatgtctgtgtccaggcggtctcccaccatgacggtgcgctcggggttgatgccgtattcctgggacacgcagtcgaaaatgaagcggctgggcttcccgatgatgtcggcctggcgctgggcggccatctccacggctcggaccagacacccggtacctgcggggcacaggggaccgggtcaaagggcagggagggggcccgccgcccgccccccagcctcccgccccagggcgcacggacccgcgatgaagcggccgttctcaagcggaagccggttgtccatgttggtgcccacgagcaggcagccgggctgctgcaggtagcgcagggccttggtgagcttcatgtagctgaagtgcgggtcaaagcccaccaccaccgcgcgcacgtcgggctccagcggcgcgtgcagccagtcgccgggaccctcgccctgcagtggctcgggccccacgcccacgctggcgacgcccacggcctccagctccgcggccagggctgggctgcccagcacgtaggccttgggcgcgggggcgccggccaggcgctggcgcaggtagagcgcggtgcagtaggccgtgccgaagacctccaggctggcgccgggccccgcggggccgccgaagcccaggcgccgcagcttctcggcgtaggcagcgcgggtcttgctgctgttgttggtgatgaagcccaggcgcttgccgcgggctcgcagcgcccgcagggcctcgggcgcgccaggcacggcggtctccccgcgccacagcacgccgtcgcagtcgaacagcagcgtgtccacgtcggccagcagcgcctgtgcccgctcggcgctcagccgcacgcagcgggcgtcgtcgccaccggcctccgccgccgccatcgccgcccgccggccgccgccgcccgccggccgctcctcgcagccgcccgccgcggcgccctccccgcccccggggcgctcattggcccagcgcctcgcgcccgccgcccattggcctgcaccttcgccaatccgcccccgcctcccgcgggctgcgggagctcagcgccaatcggtgaggcccggcgcggggagaggggcgatcattggctaccggccttgggacgccccggtgattggctggcagggctccaaccggcattcggagtgaagcgctcgctgcggaaatgcgccagaggggagagcagcgcaggcgcaaggccgctgttcccgggctgccgcgggccgctcacccattggaagcgagtggtcagcctaggtgacgaggcccttcacggagtgacccgggccaggccggctgtccattggccggtctctcccgcgggcatgggcggggctctcgcaggagcgccgcgggagggggccggggcaccttcgtcggccgtgcccgtgcctctgtgccgtggacgcgctcgggacacggggccaccacgtgggtcgcttaccggccagtcccgcgagccagcccggggctccttccccggcaggcgtgagtacgcgcctcagtcctttgcaaaaacgcgttcccggttccttggaggtaacacgaaccagccattaccaggctgggggattagggtctaaggacactgtctagaacctggtactcagtgattgctcgccgtcatcgtcatcaattattaggtatttaattgaggcaaaacattacagtaaagggcatgaaaaccgtgcagctcgatggaagttttacatttattattattttatttacttatttatttactttttgagacggagtctcgctctgtcgcccaggctggagtgcggtggcgccatctcggctcactgcaagctccgcctcccgggttcacgccattctcctgcctcagcctcccgagtagctgggactacaggcgcatggcaccacgcccggctaattttttgtatttttagtagagacggggtttctccgtgttagccaggatggtctcgatctcctgacctcgtgatccgcccgcctcggcctcccaaagtgcttggattacaggcgtgagccaccgcgcccggccttttatttttttaattattattttttgagacggagtctcttgctctgttgcccaggctggagtgcagtggcgcgatctcggctcactgcaagctccgcctcccgggttcacgccattcttctgcctcagcctcctgagtagctgggactacaggcgccggccaccacgcctggctaatttttttgtattttttagtagagacggggtttcaccgtgttagccaggatggtcttgatctcttgatctcgtgatccgcccaccttggtctcccaaagtgctgggattacaggcgtgagccatggcgcccggccggaagttttacatttttacatgtatatatatattttgcgacagggtcttgctctgtcccccaggctggagtggagtggctagatcacagctcactgtagccttatcacagctcactgtatccttgacctcctaggctcatgtgatgctcctacctaagcctccaaagtatttgggaccagaggtgtgtgccactacgcctaattttttttttaatttaaattttttgtagagacggagtcccactatgttggccaggctggtctccaactcctggcctccagtgatcctcctgtcttggcctcccaaagggctaggattacaggcgtgagctgccgcacccagcagatttttttacatatgtatatgcttgtgtaaacataacccagaccaaagtataaagtatttccaacaccccaggaagttccctcttgttcctatccagtcaatagcagatagcacattgctgactacttttctgactcctatcaccatagagtcacaaccaagcctccggactgctttatacttgggattatacggtatgtgcttctggctcttgcttctacggtttaacataatgtt

SEQ ID NO: 1243222 - DNA, 4001 bp, Homo sapiens
atttaaataactgcactcaacaacagttaacactagaattttttttctcagctaagaaaagagaattaaggttttcaaagcttactgttatgacatgcatttcagaggaaacaaagactgacgaagaaaatcaactctatgagcttatgaaagttaaagagaaatgttgcaaaaatatatgttgggggcagtactcaggtccctgtaagaaaactccagttattctctttgttcagacataaccaatccaataacactttttatatccagatagccacatcgttagtagccaactcagtatttctatatcacacaaaaacaatttaagaaaaagtgtgaaacaaatacatgtgactattccaagtcactttattgattcttagtagtactaaggactactttttgaaaaaattatctcatacttcatagatggtaattttactataaccctaagtatataaagctgaactttttgtaaggtataaaaaaacagagtgttcggtgtatgatttctgaaattagattttcagaaattagatttactttctccaaaaaaaaaaaaaaaaaagtcagtgtgcacaacagacaactaagaacttcataaataggaaaagcccaaaacgtaaggagaacatattaggtgagaaaataattttttttttttttgagacggagtctcactctgtcgcccacgctggagtgcagtggtgcgacctccactcactgcagcctccgcctcccaggttcaagcaattcttctgcctcagactcccgagtagctggggttacaggcgcccgccaccacgcccaggtaatttttgtatttttagtagagatggggttttaccaggttggccaggctggtctcgaactcctgacctcaggtgatccgcccgcctcggcctcccaaagtgctgggattacaggcgtgagccaccgcgcccgtccgaaaataatttcttaatatcaatgcaagtgcaaagttaattttcctagctaacacctttcacacccacccccaataatgacacttcatcaattctttaaaagggaagctccttagctgaaaacctgcattccgcctttcacctttcctgtttaagtgcatgccttttgttcaagattatatccagccaaccaggaatacaggaagttttaataacgccacaagtcatgacgttgcaatttgaacaagtcagttcgggacacttggaactgttaaaactgcctgcaaggcaccttctgacctctatgctttcgggtttggaaaccacacaacctggggccacttaagaagcccttttctttctgggccctaactatactcttcaatatctgaggcccagtctccttcagtttctgctagatagatgacaggtctactgcttagaacctgtggggaatgtaaaagggatataagacataaagcaaggagcccagacgccggctttctgcagccagatcgtagttacatctgacttggtctgattaagctatctgacttttgcagagaacattcacaggaaagacacattcacagggaagacacattccctttcccaggaatgtgccgccgcccgatttttaagttagaagactctaagggaagtccggaccgctgcctactttccgagtggggctcacaagcggaatagagtcgggggcacacgcagagtggagctggctctgccacctaatttttagaggtggaggaagatattagaaacaaggccagggccgccacctgctttctaaggaggaactcggggcacaggttcattcccagggcccccacctgcctcccgccaaggcgcttgaggcgaagcaccacccaaggtactcgggtggggggcggcgccccagccagccaaacctgagcgcttggtccgagctcttcgctccaagaccttccagctcacttctgccgtgagtcccgccgcccccgccatcgcgctccggtcgccgccttggccaccgcccccggggccgcctgtcagcaatgccgggccacgccccccgcacgacactgtcgggaggcgcgcctgccggaagtgagcgtgagggcggctttcaccctagctccactgcttttttagcgtcggaagggcagccctagtgggagagagaaaaaggagccggcagcggctcttacgcgtcccggggctgcgcgccactctctcggccggtaacgcggtgctttgcggctgtcgtcaagcgcggcgttgggccggcgggcgggggctgaggggctgccatggcggcggcgggccggctcccgagctcctgggccctcttctcgccgctcctcgcagggcttgcactactgggagtcgggccggtcccagcgcgggcgctgcacaacgtcacggccgagctctttggggccgaggcctggggcacccttgcggctttcggggacctcaactccgacaagcagacggatctcttcgtgctgcgggaaagtcagtgcttgccgggccctccctctgttcgctgtccgtgtgcctctcccggtgttccccaaacccattgcccaatggccggtccttctgcatttcctggtccttctctcccagccctgtggccttccctttagcattcttaacagcttgtccttttgcaccaccctttccaaccccaggttctgacccagctaccctacagtttgacctaccctcaaaagccctgacagcacctcagttttgttcctaagaagtctgcggccctcacccagtcaccttaccccctcctccccatggaatcacctgttttccaaagtgcttcctgattcctaggaatctttgtagcttgcctcaacgttcgctcccaaggcccactcattcctttctattttgcttcagtcttccttccccgttgatgaacatgaaaaggtgcaacctgacaatctcttctcatagggggcttcttcttgcctccccacctacctaattcgcccacccctttctttgtcaaggccacaactttctatgaagcgaatgtacccttccaagggcctaaacactaaacagctcacacaagcattttgcagggaccactgataaacccaatgcctccttgggaaagcagtctcaaactacagaaatttctctcttgagctgcctgttctttcgtgtactccttcctcatcttggtcatcaccttagtgttccaaatgtctactttctttgctaacttgttcttggaaattctttgctttgacaatcgttaaactaacttttttgtaaatcttgatgctgacagtgggcattagggggtcttagggttcttgagtacctacagaagcaggtgctgcttaaagatcaatgctgtgaaggaaggaaggaagagctactcagagcttgcctgacaggatcctgaaccagacttcttggagcccttgcggggatgcaggaacctcttacaaaccctgaatattttcccaatctttttgactcctcattttgcagtgtactgccaaacctgttgctgctgtgtccaaactggatacagagagtagccttgactttaaagatggcctgtgtttgattaaacaattccaaaagtctgtctcaatgagtgctaattgagctccaagaatgtgtcaccctctggaggatggccccataggaggagggtcttggaggattcagcattttgtgctcacatgcttaattatgtctttgtcagatatctacaatgggagtccctgcatccttggtgtgatgcatctgtgtaatgaaccaaacagccttacaagggacagcattgctagattcggggaagacaagtcttgacatgtagtatagttataaggcatctttatatggttcttttaagtcaaccaatctgactcctcgcagaatccactggcttcagtttctcttgatcagctgctttttcccatgttcatcctttctatttctctgctactttgaacattgaacttgtgatataatgttaggcatctccattggactagtgggactatgcttgagagggca

SEQ ID NO: 1243223 - DNA, 4001 bp, Homo sapiens
ttaaatcaagggatgtaaactattgatccacaggccaaacacagccctcagatgtgttacgttttggccggtgcaattttttttttatttttttacacaaatctgaattcatacatcataggtggggcaaaaccctccaccttccacaacacttcctactctcttactcttggccacttcacagtttcaatttcctgcgcaaccactaagggcatctgagtttgaggccatgttttaattatgacccagctttaatgagcctctttgagaatctgatgaaagctggagacatctaccacacgcatacatttttgcgattttaaagacccccccctgaactcctactcatacctcaagacccagcccaaaggtgactcctcctgagaaggtgtgcttttctggaatcccatagcacttgatacagacctctacctatctagcctgatgcctttttaacgttcacgtgccaatttcagtcacttcgggtggagtacctccagggcatacgcatcttttctgccctccccgtgttgagctttgtgttgaaggcataaatgaatgaatccgtgaaaaaatggggttgacccaaggtaagagtctagtcactaggtgttctccactgatcactgattcttcccatttagaactattcagtcaaccaggcgcggtggctcacgcctgtaatcccagcactttgggaggctgaggcgggcagatcacgagatcaggagttcaagaccagcgtggccaatatggtgaaacgcccgcctctactaaaaatataaattagccggcgtggtggcgcgcgcctgtaatcccagctactcgggaggctgaggcaggagaatcacttgaacccaggaggcagaggttgtagtgagccgagatcgcgccactgcattccggcctgggcgacagagcgagactccgtctcaaaaacaaacaaacaaacaaacaaaaccaactatccagtcttctcctgagaaaacctgaacttgaaagacacacacacacacacagacacacacaccaccaccaccagcaccaccagcaccagcaccaccaccaccgaaagacacacacacacacacacaccaccaccagcaccaccaccagcaccaccaccagcaccaccaccaccagcaccaccaccagcaccagcaccaccaccaccagcaccagcaccaccagcagcagcagcagcagcagcaccaccaccaccaccaccaccaccaccaccaccaccaccaccaccaccaccaccaccaccaccaccaccaccaccaccaccaccaccacccgcgaactctccagccttcaaacggaagcgggaatgctggggctcgacctctttggacctccgtttccctggccgcggccttacctgccgatgacgtccttagggtcgtacttctggtaaaactctttggcggcggcccagtcgggcagctcatcctccggccccacgtccagcgtcatcctgaaggaggcgggggcctgcgcggaggaggagggcagtgagggcagggaggcccacaggctctgagacgacccgcatggcggctcccgggggcgcagcccttgcagctggggcgccagggtcctggggggtgggggggggtgggggaaggacccggactggggagaccccgcagaagagcctgggggcgggaggatggcagggcagggaggggagtggggagatgtgcccaggaggcagggggaaggggcgcaagggcaggcggctgttgccgcgcaggcgcattcgggcgggcgcaggaaggggacgggggtctagcgcaggctcacctgagggggcaggcagaggagccagggtcgacgcgagctgcgctgtcgccgggtttgcctgcagtcgctcaccttaacccccggcggcgggcgacaacccaaggctccgcctccatcctgcccgccaatggtcagcgccgcccgaagactgaggctcagaagcccttccaattggaaaccggccgcccaattggggctggggcgtgagtcggcgctcggctggacctaaggctgcaacgcgacgccggggcgcggcttcagacgcggccaatcaccgagtggcatctgcgggacagcagagggcggagcttgttgtcacgtgggcttggaggcctggaatgggacccggaagttgggtttactgggaaacgtgatctctgggtggcggggaagcaggaccttcccgcgcctctagttcccagacttgagcagggttccctcggtctcctccaagcatccctaactgaattcagcattttctcttttttcagacagggtctcgctctgtagcccacgctgaggctgcagtgtagtggcgcgatcatagctcactgcagccttgaacttcggggctcaagcgatcctcccgcctcagcctcccaaaatgctgggattacaggcttgagccacaacgcccagcaagctcttttcaatattagcagcctggcccaaagcgcctgtcctgagtacactccagcccttaaaacatttggacacacgcagcttggactccagcttggcctcttagttcggacttaaaatgccagaggaagccttttctgtgtccgcttcaactcctcctaaatacatccaaagccctagcgtttactatctgggatttacacactttctcaatcttccaccctctcccaaaagccttgtatcacactctgttctaaacccaccaggttgttagattctgccaggagtgactcagtgcatagctcaaacctggcattcactaacaaatttttatgaccgtctaagacctaggaactagactgagagcaatgaaacaacacacacacccctaccctgtggaggttatgttccagccaaagaggaaaagaattaacttatctccctacagctatcttagaaatgacactttgggattacaattatgagggaagaaaaatgaattcaggtaactttttatagagtactatgactctataccatcaatctaaaggcaaaattgcaaaaaatcttgaactttacttagatttgttgtttggtaatataacaggataataattctgaagctgagtaatcaatatattgatgtgactggaagccaaggttcttaactgtgggaatctggaatctggaatctggaatggggaaagtggagaaagaaccctatgattgactggaatttttaaaaagatttttaaaagatgtaaagtagataacattaactatttactggctcttacctctgctttcagaatgccctaagcagtaacttcccagtagaacgcctagtgtctagatgctgatttctcaataacagtacccaataaaaggaactaagtcttttcaggagaaatggccaatttctaggcttcagcagggaaagtacaaggtgagtctggagtgatttgtgccagacattactaatgagcggggcttatcacaaggacacaggaaccagattgaaagggtttccataggtcaatatcggggataaaaataataatgaagagcatgagggaacttgctgatgtgctgcaaatgttatattcctataggtggtgagtgactgactacacaggtttatttacgttaaaacattcgtcggctaggcacggttaactcacgcgtgtaataccagcactttgggaggctgaggtgggtggatcacaaggtcaggtcgagaccagcctgaccaaatggtgaaatcccatttctactaaaaatacaaaaattagccgggcgtggtggcacacgcctgtaatcctagctactcaggaggctgaggcaggagaatcacttgaacccagaaggcagaggttgcagtgagatcacaccactgcacttcagcctgggtgacagagcgagactccatctcaaaaaaaaataataataatcaagctgcacacttaagatctatgcgttgggccgggcgcggtggatcacacctgtaatcccagcactttgggaggccgaggcgggtggaccacgaggtc

SEQ ID NO: 1243224 - DNA, 4001 bp, Homo sapiens
cctgggtagttggggaatgagggacagaaaagtacttctcactctataccctttttaaaaatttcattctatttacacttttcaaaaaaaaaacaacaacttttcttttttttttttttgagacagtgtcttgctgtcacccaggctgcagtgcagtggcatgatctcggctcaccgcaaccttggtctcccaggttcaagagattctcatatctcagcctcctgactagctgggattacaggtgcgcactaccatgcctggctaatttttatatttttagtagcagcagggtttcgccatgttgaccaggctggtctcgaactcctgacctcaagtgatacacccacctcagcctccccaagtgctgggattataggcataagccactgtgcccagccaaaaaaatttaacttttaaaatacttatttttaaatttagatatctgacctatggtgtattccaaatcaaagaactctcaaattttccttggtcaatagtttttaaattcaagattcataaagtcagccttccaaggacaaatcttgaagcccagtgagtccgtaatcaacatcagttccggcagaattaaaatcctaaagtccagttctaagcagaaacacattattatttatattacggtagaattagagtggtaaaactgagacctcacctgaccaggtctccatgaagctgtaaataaagactttctcttccctctccagcacatatttctgatgctggtgtctctacagtgcaaaggacgagatgtaagtcagaggaagaggaggaggaggaagaggaagaggaggtggtggtggttgtagtggcagtggtagtgtctgctccataaaggtaaacacagcctctctttacatcttctcttagccagtctctttctcgagaaccaaacctacttctcctattcaaacaatttctgctcccattgcgtttcatatttctctaaaaaatatcaagagaaagaaatcgttagctagaacatctgactgaattagacatttcagtcctcaccccacctctctctactttatattccccaacattctgctcaagtatcccctccttttgtggagcacttcacatctatcatgctcattcgtaataactcagataacttaattttctttactgctgtctgtgtttccatccatcatcttcgttgacctctcttttccttgtgttttcagaaacgtgtcaagaataacgaaacagcgggttgcagtggctcaggcctgtaatcccagcactttggggggccaaggtaagaggactgcttgaggccaggagttcaagactagcctaggtaagatggcaacatcccatctctacaaaagaaatttttttttatatattagccaggcatggtggcacacgcctgtagtcccagctacttgagggtggagaacagattgagttggagaacagattgaacccgggagattgaggttgcagtgagccgtgattgtgccactgcaaccctatctgggtgacagagcgagaccttgtctctcaaaaatagaaattttaatattttgcctgggcacagtggctcacatctgtaatcccagcactttgggaggccaaggctggcggatcacctgaggtcaggaattcgagaccagcctggccagcatggtgaaaccctatctctactaaaaaatacaaaaaaattagccagctgtggtggcacacgcctgtaatcctagctacctgggaggcagaggtgtgaagattgcttgaacctgggaggcagaggtttcagtgagccaagacagcgccactgcactccggcctgggtgacagagcaagactccatctcaaaaaaaaagaaactttaggctgggcaaggtggctcacacctgtaatcccaacactttaggaggcccaggtgagggatcatttgaggtcaagaattcgagaccagcttggccaacatggtaaagccccatctccactaaaaatacaaaaaaaaaaaaaaaacaaaaaattagccgagtgtggtggcacgtgcctgtaatcccagctacttgggaggctgaggtaggagaatcacttgaacccaggaggcagagattgcagtgagccgagattgtgccaccgcactccagtctgggcaacagagactctgtctcaaaaaaaaaaaaaaaactttaatctataaaccatacacagtattgtcttatctaatttaaacttcatctaatccttaacaatacttatgtttcaccctgtaattttatttagttcaatattgctttagagatacaactgtgttaatatacccagttcattcatttgaataatattcccttatacaaatacaccaaactttatccactctcctgttgacagcattcagtttgcttccaatttttcactgctagaaacaatccagcaataaacatttttgtacatgtctccttatgaaaatgtgtgtttctctagggtcctaaccctttgctttacatcccaaataagccaagtgtagtatcaacacaatactgcacaaatatactttccattcctgccctgtttcaaaaaaaattaatgtcgcatttgataatttaggtatgtgaaattcatatattgccaagttatctcaaagcaaaaacaatttctacaggtaatataacaagtttctaaagatcagcatttgcctgctctatttttatgatgggctatttctgttctttttgataaaaaagaaatttccactgacatttccgcagccatacctctccagcttcgttccctactactgccctttactccatgtttcaatcacctccaactacctgcagctctccaaacacaccaagtacaccacaattctgtggcctgtctgaaatggctttctccacctcatccatatgacaagttattcttcaaaatcctactcaggcatcaccttctctatggagccttccatatctcctatccttattctccctagacagaattaatgactaccagacatttttactagacagaattaatgaattatctagacagaattaagaacttcttcaccttgagtacacctctaatactacatcgatgacaatgggttttatttatttatttgatatttcttcctcttctccatttctagcatgttaacacctgggtgacacagaagtgtttgtagaactcagctgacatcacagaaacctattcccaatctgtaccttagtccaattagctctggcaagaagctgaacaaacttgggggggaaaattcccatttctatggagaaccctacatctttgcagcagctgcaaagtgaatgggagtaaataaaatactttcagtagtattcctcattggaaaatagaaatacctataaatacagcaaatactatttttataattactaagattaaatatttgagggtaatacatttctaaagatgtcagagaaagaggaatgaaaagttagcaggtatttctatgtgggaaaaaagaaaaacaagagtaagaatggctttattgtttaaatttagaactcaggaaaactgatcattttgcagatcttggggatttaggcattgctattcaaaaccatgaggattattgaatctaactttagagaagtaggataaatccctgctacaagtgagaactagttttctcatcaaatgcattttctcaaagctgaacatctcagaatgaaagggctttcaagggcttactgcataaacatagggaccatcgtatttgtactaagtaattttaaccactgaatagtcaaatactgctaatagttaaatatttagtaggtaaatactgttaaattttaaatactcctcattttttaatctttgggaaagattaactggaccatctgaaaacagtattccatatagtatagcaatatttatacaaagctccgcattctctactcagtggagaaaaaagagtaagcagacactgtttcacacaaacaaaaaagtcgtcttcagaacaactttctaaggtcaa

SEQ ID NO: 1243225 - DNA, 4001 bp, Homo sapiens
ccttctactgggcaagtttcatatcctgaattcctcatgtagaactctagaaggaattccattccacctgcggaaggacacctagtttacgtatttgacctacagaaaaatttctctgcaactctttcaaatgctagtaaaaaactccacccagtcagcctcccacaacccctccctttaaccatcttctcctccccactatcgccaccctaccttgtgcattccttcgtaaacttacttctcatcaccttcaaggttccactcccctcttgcctacatctgttttcatatcctcccactcccccaattcctgccaagaagccccgctagctgcctgttgcataacggctcccccattccgtctccctcggcagtcggccccgctcccgggagcaggaatgcccctttcggcccggcccctcctcccttccgcaacacgcccagcaagtccccgcgacgcagctccagcggggattctctctccaagctgggcgggtcgtccttgccggctggcacctcgggtagcgagccccgagggcagaggagccggctccacccggcctggccccgaaccctccgcggcgccggccaatcgccgctgccatcctcccgctggggtgatgtcttcaggtgtccgggaggggagaaagccctgcgtacttccagccccgctcctgtgccaggaaccggcggccctccgagccctccggagccggcctccgggccccgagcgcggcgaggcaagcaggggcggcgaagggtccgggtgggcggcggctacccgcagcccaaaggcgtgggcctgcgaggcgggcggcgcgcggccagggatgggcagcagcggggtaccgaggcgccgaggcctggacgcgggcgcggcgcggaggcctcggcgtccccagccgggtgtggggcggccgactgactgacgccgggcgggggccgccgactgcctcagccactgcgcggggcgggggcggcagcggcctctagcctccctcgttccctccctagtccgcttgcccgctcgcccgctcgctcgctcgctggtccatccgcctcctcaccttcaggacccggatccctcccggccggcggctcgcgggcgcttcgggcggctccgggggctccagcgggcccgcgggccccggctccacctcccccatcggcgacccaggattcacagagacgcccggcccgcgcgacggcgtgcggagcctcggcggcgcgcgcgagcaaccggtggccccgccccccgcggcccgccggctccgcccctccggcggctcgccagctccgcccctcccgcagccccgctggacctaagcagctgccggcgccgagtggcccgggcgccaccgagccgcattccggccgcggcccgcgtggcggaacctggcaccaccgcagagcgctgggcctccactgcccgccgccctaggcttggaggactagagcgcaaggaggggtatttgctgctttccccgccctctaagaaacccgcgggagaaagaagcaggtggcgccggcacctgtcaattgtgacaagacgctgccctccgccagggtggctcttgtaacttccctcacctgccaagccgttgaacgaactgttgagaatactcaccttggcaaggccttttctcttccttatcagagatgcgtgcgaccttcttaagcaaattcaacccaacctcgtacaaaacgtccgctcacctcccagccatgttttaattcccttgcctcctcctggagcaaaattatcagaattcggtgctctgcttcaagcagtaatatggcctgtgacccggtttatgatttatttgcaaggctgattcagaaaaaaacttttaaaagttaacttcttttcttttctttgttttgtttttcttttcgttctcgcagtgatagtagttttgttgccaatgggccaaatttggagtcagccagcctgtttccagatctcccctctgcccttctttagatctatacccctgtgcaagttacttgatctaagcctttcgttcttaagctgtgagaaagagattaaaatctgccaagtagttatgatgaagatttagtgcatacaaagtgcctaacgtatagtggggatccatagtagccattataattccaaaattctaaattgaagatccaatcggtttctcgaaaagtactctgtcgattcctcctaaattttcctaggaaggcttctagacttccagatttttagggcttcccctcatacatagggtgttgaatcttcaagcaacttgtaaggaattagacagcaaaaaacagtaatttcttcactttcatagaactgtaattccagtactttgggaagccaaggcaggcagattacttgaggccaggagtccgagaccagcctgaccaacatagcgaaaccctgtctataccaaaaatacaaaaaaatgagctgggcagggtggcgcacgcctgtaatcccagccacttgggaggtggaggcaggagaatcgcttgaacccgggaggcggaggttgcagtgagacgagatcgtgccactgcactccagcctgggtgacaaagcaggaccctttgtccctattatccattgcttcagtttgcctcattcagactaactgtatgtctagaataattgcaggcttagtacaagacttttagatttaacagagcagtctgtgtcccccatctgagatatgtatccatttggagatattttaaatgccaggaccaaatttggctcttgcaggttccgacccctttctgacctactttctcccttcacaagttagctttgtatataccaaaattccaatctccagtaatcttcatttcttggcctcattttaatgcattaaaaacgatttgtcactgtgagtctggtttaaggtgggagaaaactcttaggtcatccacctcctggattttccttccaccttgaaattattttcaggaaaggtactcaaagtagttggattcccatttcagtgcttactgggtaatttctcccaacaagaaaactggtatataagcaataggcaccaatatggagacagaagcaaattttaacaagggcaggcaagcagtgataagaaaaaaatgtggtttagaacaagtgtttctggctgggtgcagtggctcatgcctgtaattcagcactttgggaggccaagacgggcagatcacctgaggtcaggagtttgaacccagcctggccaacatggcaaaaccccatctctactaaaaatacaaaaattaggcagtgtgggggcacgagcctgtaggcccagctactcaggaggctgaggcaggagaatcacttgaacttgggaggtggaggttgcagtgagccgagatatcgcgccactgcactgcagtctgggtgacagagggagactcttgtctcaaggaaaaaaaaaagtgtttttcaaaagccttttatattttttttatttttgagacagggtctcgctttgttgctcaggctggagtacggtatggacacaatcatagctcactgcaggttcaacctccatgggctaaggtgatcatgccacctcagcctcccagtagctgggaccacaagtgagcaccaccctacgcttggctactttttgcattttttttgtagagatggggcttcaccatattgtccaagctggtctcgaactcctgagctcaagccatccgcccacttcagcctcccaaaatgctgggattacaggtgtgagccaccacacctggctgtaagagtctgtttcttgaggcattatacattaccttttccagatttcatgagtagaagctctttattgactgactacacaaaaaggaaagatcttgttgcagaactaaagtttcagctcatgctggggaacagcagtggtgaataattgtttaattaaagggatagtaggcataagcattgctatttacttcttcattctggcaacagtagttcctctttcaaaagggaaaacataaaaaaaaaaacc

SEQ ID NO: 1243226 - DNA, 4001 bp, Homo sapiens
gtatggcccgggcttcagcatctttcaaattaagagactttatttgggaccagttttaggtttaaggaaagtaccatacagacagacagtcagtcatcactattctttaaaagtttcatagaagactgacacggggcctgggtgagcacccctgggctacctccccatcctccccaaggaggccaaaagcaagaagaacagtgatccctcccccagatcccccacgcggatagcaatcgagaaggcagaacccaggccccctgaccaatgcccagggggcagcaaaccacatgtgccacagaatcgggctcaacacctgtttaggtacagcccatgaactcaggagggcttttacatttaatggctggaaaaataccagaagaagaagattttgtgacatgaaaatatttaccatctggtcatttaaagaaaaacattgccaactctgcccaaggagcagctgccatctgagagggggggcattccctgcagggaggacacccgctcccactcagacacaagaggaaatggaacgatcagtgtgaacgggacgtttcagaagctttcctgtttccctctctaaggcctgtcagctctagactctgcctctgtgccaggctgtcctgcttgttttcaaggcacaggaaggaacacagccgggccctgtttacggcccatctgaccctgcactgggagcaggtcccaggctgcccagtccacacagggctgaccgcactgaagagagttgctcaaaacctctcctctccagcctcaatggttttcattgattcctgtctagaaaatcttccccaagtttcaccacctttctgtgcgaccgatcaaaacgcagtctgtctgggagcctcaggcaggcggctctagatccccaaagctagcgctgggcgagctcccacctggagcgaggcaagggctccgaaagggcttttacaatcaaaaggccccacctgccgtgtccatggcggactcccaatgcaaaccgtcccacttgtccgtgggttaattccatccgactgcttcccagatcaatcacacgtggggagcccccgggcggagggcgcggaccctgggtcccggctaggccagggtcggggaagggtaggggtgccaggccgtgcagcaccaagccacccgggtgtgcttcgcgaaaggggcaccactgcccggcaagcagggaacacagatgccaggactggggacccctgccccgccctgacaccaggccacagcctccgggggtgtcccctcccccagaccagggcagaggccggcccccgcccctgcgaaactgagcccagtagggcaagggaggaccagggaggaacccacactatttttttccaaagtgtgggaccgcctcagtccggcagaggggggtgcagcggtgagcggggctgggccctgggcacggacgttcgttgggctcgggaagctccaaattaaacagctccaggcaggaagcccgccttctcccagattgtcaggaagtcctgatgcaactttgcgcttttttttttaaacccgaaagagaaaaagagattcgtgctccccccaccaccgccgcggcccttcccaccggggcaaacaccgcctcgcccggcggcctcctctccgcagcgccccggcggagacgccagccgcgctatgcccggcgctcgctcgaccgcccccgtgggcacgcggtgccgtctcccccagccgccgccgcccttccagcccggccctgggacaggagccccgccgccgcctggcgcgctcatgcttcaggaatgcgggcgcccgggtcgcgcgtccctgggaatttccgcgcccgctcgcccgcagccctcgccccggccggcgtcgtccggtgtccaggccgtggggagccgagacgcagccccctcccgtcgcccccaggcgcccgccccccactcaccagccagcagcgcgcagggcagcagcagccagtacaggaccgcgccgagcacgtgcggctccatggctggagggcccagggcccggcccagaccgagcggacgccgcggcgctatggggcggtgcgggggccccggggccggcgcgccatggctgacccgcggggacccgcgcgccgccttctcctcttcctccttctccttcggccgccccgccggtgccgacgtcccgggcccgcgctcgctcaggcgaccgccctgcccctcggcggagcgcagcgctcggctcactggggccgagctgggccggacggcggctcccgccctcctccgcccgcgggcctttataagctcggccccctcccgccctccccggcgtgcccgcctccgcgcttccccgacggcccggcgcgcccaggcaccccctccgctgtcccgcgcggcccgtcccgcctccggcccgccctggtgcgttggggcctggagacccccgactggcgctggcccggagcggacccctcccctcccgcagtcttggccccgcggctccgagcgtgcgcggcggtgggcaggggcgcttctcgctgggtgggctgcggctggggcccgggcgctacataaggggtcccggggcctctggctcccccaggcagcgccccacgcgcaactgcaccccgcgtgcccgagcgactttcgctttgctccccgaggcgcgagcacgcagcgccccctggggaccgtggggaggctcggagttcccgcggcggccgggcctagtggtcccggagggagcacgcgggatgctcgggtcgcagcagtgccgcgatccgcgttggtctgacgggggctcgggggctgctcccagccacgccggccaccgcgcgcggctttgcccgggtcgctctggcgtgagacggtgagagtgagagccacggcctgtgcacctgctgccgcggcgccctgccacggagaggtagggtctgagtccagggtgttcgggaccctcacccaggccacgtcagtttggccttcgtctgcccttgagatgggcacagaaagagggcaaagggctctacaccgtttaattgggctcagttcatggctctcaaactcagctgcgtaaggcagggagtggggctggggggactgtggccactgagcctcaaggcactggcaactcatgagagcccagcacaagcccacaccctccagctcaaaaaaaaaaaaaaaaaaaaaagatggcggggcagtggctcaggcctgtaatcccagcactttgcggggctgaggcaagggggtagggggtcgggggatcacttgacgtcaggagttcgagaccagcctggccaacatggtgaaaccccgtctctactaaaaatacaaaaattaggccgggcgcggtggctcacgcctgtaatcccagcactttgggaggccgaggcgggtggatcaccaggtcaggagatcgagaccatcctggctaacacggtgaaaacccatctctactaaaaacataaaaaattagccgggcgtggtggcgggctcctgtagtcccaactactcgggaggctgaggcaggagaatggcatcaacccaggaggcggagcttgcagtgagccgagatagcgccactgcactccagcctgggcgacagagccagactccgtctcaataaataaataaataaataaataaataaataaataaatatacaaaaattagccgggcgtgatggcaggcgcctgtattcccaactactcaggaggccgaggcaggaaaatcgcttgaacctgggaggcagaggttgccgtgagccgagatcatgccattgcactccagcctgagtgacaagaacgaaactccattaaaaaaaaaaaaaccacccagaaatggagattttcatgggaagtctagtgtttaaaggctgatataggccgggtgcggtggctcacgcctgtaatcccagcacttttggaggccgaggcgggtggatcacgaggtcagcagatggagaccatcctggctaacacggtgaaaccccatctctactaaaaatacaaaaaatta

SEQ ID NO: 1243227 - DNA, 4001 bp, Homo sapiens
tgctcacgatctgtgcgctttctttgtgtgtattctttgtgcttcatctacaaagtttaccttaaaaaaaaaaagtgccttgtgtctaccgaaggagatgggagggcagaagctactcttctctgtcgagtagtgagagaaaactcaacgtactgtggggcaaacgcccatcacactcccacctcagcctctgggacggtcggcggcacaaagaagcctgcactagcagctgctgggatcacacagccagaggaagatgaaagagaagcgatcgatagcagaggaggtatgggacgggagaaagcaacgtgagcatctttaaagactgaggaaacacacacacacacacacacacacgggcgccaggctagccacacacacacacacacacacacacgggcaccaggctagccagacacacacacacacaggcgccaggctagccagacacacacacacacacacacacacacacacacaggctaaccagacacacacaggctagccagacacaaacacacacacacacacacaggctaaccagacacacacaggctagccagacacacacacacgggcaccaggctagccacgggtcccaggctagccagacacacacacacacacgggcaccaggctagccatggttgccaggctagccagacacacacacacacacgggcgccaggctagccacacacacacacacaggctagccagacacacacacacacacacaggctaaccagacacacacaggctagccagacacacacacacacacacacgggcgccaggctagccacgggtgccaggctagccagacacacacacacacacacgggcaccaggctagccagacacacacacacacacacacacacacacacacacacacacacacacacacacacacacacacacacacacgggcgccaggctagccagaagagcttcctctgctaagaatgagcccgagtgctcttgagaagccattcccagaccaggcaggtagggaggtcgaccatataaagtagtaagactaagacttccctctcctccccgtgaatgagggaatgggggcaccccagcccagttaggacgggccagggccatctctggctgagccgcccctccctgccaccgctccacaagagctctggagaatttgcgtttcccagcgccttgtttgaaaaataaacaccaacctggcgcggtggctcacgcctgtaatcccagcactttgggaggccgaggcgggcggatcacttgaggtcaggagcttaagaccagcctcgatgggggtgaaaccaagtctctactaaaaatacagaaattagccgggcgtggtggtgggcacctgtaatcccagctactggggaggctgaggcaggagaatcgctggaacccgggaggcagcggttgcagtgacccgagatcgcgccattgcactccagcctgggcgacagagcgagactccctctcaaaataaataaataatgaaaaacaaacacgagttcagcctgggcaacatggtgagaccccgtctcaaaacaaacaaacaaacaaacttgcttgccttcctcaagcagggccttcccctctcatttgggaagagcctacgattccgttttttgccctttcctgcaaaccgggacaactgcgaagggcccacagccaggcccgggccgccgaccgcccttgcacagggtccacaggggcccaggtcggcgcgggcccgggggcggccccacttctgggaggagaaagcagcggcgccgcgggcgggagtgcggagcccccagcccaggcccggagccgcaggggcgctgcccgaggtcccgccgcgcgccgcccaccccccctgctcaccgggtgcttccggggccgcgcgctcgggcggcggggtccggatggggttggggaccccgatgggcgggcccgggcagacgacggcgctcgctgcctccagccccgccgcgggacccgagccccacttccgccggctccgcgcgttgccgcgcgacggtccggcccccaaaggcgcccgggctgcccgcccgcccgcccgacccgagcgttccgcggcgcagcgtgcccgcccagtccccaggcccggacctcccgagcctgcctccgggccgccagccccgcgtcagctcggtttcctcacctgagaaactgactggacctggccttcgtggaacccggaccccgcctggctcccagcctccccaagtgaacaggtccccaggccctgcgggattccaggaaggccccagccccagcccggtcccgcccccgtcactctgttgtctgcagaggggccgcccccagatccccaaggccagtggtgccgggaattttgagccctggtaggaccagcccagaggctgccgccagcgatcgtcaggagagaacacacaggcgtccagcccctcccgatcccaggaacaagaccccagcccagacctcagcggcaactccgtttattgagcacctaactacattgcgcagttagtcccccacccacaggacccagacatatgagggacctctcaggggggatgtcctgtgatacaggggagccccacctccccaccccacaggggtagagccagacaccgtcccctcccagctccctcccccatacaggcccttccctggaccccagacccacggagtaacccagacgcctctcctttcacgcctcatttccccacttgtaaaatgggaggagagggttagacccctattttttctcagttttccaaagcagcaggagtctctccttgtaggaagctcccccagaccctcccagcacggctgcactgggaggacaaacagcatggagctgtttgtccctgtctgcagaatgaaggcccagacagctttcattcatggggacgcggaagaaaaggcatccagggttcagccagccatgggcctccagacactccagggttgcctcccccttacctctgccaggcccagagaagctactggaggctcaggactctaggtccctctgaggttggggacatttaggggccacacccctgccccaggccgccccgcccagcccagcccagccacaccctccctgcctgtctgcccccgattaggaggcctgggcaggggcacctggtgggagagtctgcctagctgtgtgccggcagctggcccaggatctcaaggcttcagctgccagccccaaagtccaggcacagggcctgagggggtgtggggggcatgaatgcaggggccagggcactgaatggggacagcagagagcagccctggctggggaggctgcaggcctggcaggggcagcctgggaagcagactcagggctgctcctgagatccggagcctcaccagcaggagaactcgagccaagcccagggcccagcccaggtggtgctggcatcaggcaggcaatgcccatagcctggaggctccacccatcctgagggttcctcccgcggtgatccaagggcctgggagctggcctcaggcacaggagggctgctccaacccagcctcaggtcaggccagctccttgaggccctggtacaccttgatggagttgtccttggcatcagccaccaggagctggccctggggtgcacaggccactcccaagggctgcccaagcccctctgacaccaggcagatgggtggcccagcccggggaaacagggtcacctggcgcctctgctcgtctgccacaataacattgccctctgagttggagcagatgcccgctgggcagccgaaagtgtgccccgtccagccccccagggagcccaggggttggcgggcactgccaaacagcctcacatccccaaactcctcactcacagcaaggcccccatcaggccctgggcccacccagcaggggccctccagacccagcatggaggctggggccaggggctcccaagcaggacccaacgagaagctgtgcacagccccaggcaagtagtccgtcaccagga

SEQ ID NO: 1243228 - DNA, 4001 bp, Homo sapiens
gccaagggcctggagaacacgggccttgctctccgctcagcagccaccagcgcccttctctcccggacagctcctgaggggctgctctcatggacaccatcaggtgctgggaagcaggaaccaccaggccctggacagagtccccagtgaccggcctggcagacagaggagccctcagctacagcatcacaaacaacgggtggggtaggtctgatgcaattctgtgggtgctgttgccaggcaggaggaggccatctccacagagacagccgcgagacacacgcgtccgcagtcagggagcgcaggagcaatgtggccccgaggggcacgggctccattggtccaggagaacccattcttctcccaccctcgagaccacccagcaaagccccaaggacacacggctcccctaaggaagggtggccacaggcgggagtgacccagaaacgttacaaaaccaaatgccagaacccacccaatgtttagcaagcctggggatgtgccacgtcccccagggatccagcacgcacccaaggagacactgtcccggcgaggagcctggagcctgggaaatacaaggcatcagactggtcccaagactctccccagcgctggggacaactgtctgcttatcttagtcccctccgcccttttcaatccaaccctgggtcctgggcacctcatagttccaaacccctgctatgcacatcccggctgtgatgcctgggacaggtcgtgtcacctctccaaacctgtttcctcatctgtgaaatgcaaatctccacggtccctatgcctcggatggtcagagtcaggattccgcatgacgacccccaacaggagcctggcacagacctggctctgggcagcgtctccataaaggccacctgttgtttttatctcccgaaagcgaacatgacaaggctttaaccccccacggcaatcccccctcacccctgttctcaggatagccttggaacccaatagcagagcgcctgaggcccttcatgaccccagcccacccgcgagcccacctcccaccctgcccctacccctcacacctcccgtggccagcctccagcctcacggtctttgctcacaccgttcaccccccttcttctggacccacctcatcgccccttcctaagcatcagcccaattcttgcacatccatcaaatccttttccagacacctcctggaactcttccctgccgccccctacagccatccccacctctccgggtaccccgcagccccaggccgcatcccaattcctctccaattagcgactgtttgtcctcccagctgagcgcggcctccgcgccccgcccccgctggcgtctgcagagcccccgggtgggacgtctgtctccagacccggggtttttcggctccccggggccgtgccaaccgcggctccaggcgttccttatttagcagggccgccgtgccgcgccggagcctcgccctgggagcgtcctggcccgcgtcctgcttcccgtcccgggccagggaacgcgcccacgcccgcccgtcccgcggcctctcccgggtgccgctgggcccgctactcacagcgctgtggcgtccgcggggatgcgcagcgcgggaccgagcgtccgcagcccgcggcccgagcagttgacgcggcaggcggcgccgggcgctgggccgcagaggcaggggggctcgcagggcccgcagccgcgcccggggccccccgccagcgccccgagccacaggcccaggcccagggccagcgccaggcgggcgggcgcggcgggcggcatcgttagggcagcgcgcgcatggccccgccgtccccaggcccgcccgcgcgcggaggccgcagctcaggcggggcccgcggacggcatggcgggcgcggggctggatggggctgcggccgcgacctgctgctgagcgacgcccgctcggggctcggggccaggccgctccgggagctcggccgcccgctcggacgctggcgctgcagtgcgggccccgccgcggctcctcctcctcctccccgcgcggcgcggggcggacggggcgagggggggcggggcgggtgcaggctccgcccccttcgccacagcgcgaccgggccagcgatgagggactggcatccggaggcttcaccctccgctccacagggtcggcagcagggcggggcctccggaagctccgccccacgcgttcccggggcgcatgcgacgtggggcggagcgtctggaagctccgcccgtcgcactgcagagtcggccgaggcgcacgagctatttttcacgctccgccccgctgcaggctaaagtgcgtgggcgggaagcggtgggcagggtgccatctggctccgcccttctcctgtggtgtgggccaggcggcgggttcctcctcctgcagcagccacaggctccaccctgatccttcttccgcggtgtggatccttctcccgcaatctccgtgcgcggcccgagtcagtacccgcagcctcccgacgcacccgctggctccaagcctccctaccccaggtttcctggctgagagagagacagagggagagagggggaagagagagaacaggcaatgggaggttgatggtgagagcttattgaaagacaagagggaggaaacccacatccttcattccccatccattcatttattgccttatttattccattgaatcttcacagctctagaaaaagtgtgctacaattattccctttattaaatgaggtcactgaggcacagacagtttaagaaatttgccagcagggcacagtggctcactccggtaatcccagaactttgagagggggaggaaggtggatcccttgagtccaggagttggagaccagcctggccaacatggcgagaccccgtttctacaaaaattagccaaaattagccaaactggctcacgcttgtagtcccaggtactcgagaggctgaggccggaggagcgtgtgagcccagtaggcagtggctgcgctgagccgtgattgtgccactgcactcccgcctgggcaaaagagtaagatcctgtctcgaaaaaaaaaaaaatggaaaaaagaaaaaaagaactggctgggagtggtggctcatgcctgtaatcccagcactttgggaggccgaggcgggcagatcacaagatcagaagttcgagaccagcctagccaacatggtgaaacctcatctctactaaaaatacaaaaatcagctgggcatggtggcaggcacctataatcccagctactagggagcctgaggcaatagaatcgcttgaacctgggaggcagaggttgtgccactgcactccagcctgggcaacagagcaagactccgtctcaaaaaaaaaaaaagaaatttaccaggtcacacagcaggtggatggtaaggctgcgattgtattccaaacccagcttttaattgcagtcaaatgacagacttaagattcaaggactccagtggagggaagaaacagccacaagaaactgctgccaaatgagcaaaacagattaaccaagtctcaatgattgtttgaaggcggttgtggaataaaatgcaattgtttagaaaggatttcttaaatagaaaagacatatgtttaaagaagcaaattagttacctggaaatgaaattctaaactatttgaaaaaccatgggggccgggcgtggtggctcatgcctgtaatcccagcactttgggaggccaaggtgggcagatcacaaggtcaggagttcgagaccagcctgaccaacatggtgaaaccccgtctctactaaaaatacaaaaattagctgggggtggtgccacgcgcctgtaatcccagctactcaggaggctgagacaggagaatcgcttgaacccaggaggtggaggttgcagtgagctgagattgtgccatggcactccagcctgggcaacaagagtgagactccatctcaaaaaacaaagaaacaaaaaaacaaaatccatgtggtgagacagagcaaa

SEQ ID NO: 1243229 - DNA, 4001 bp, Homo sapiens
ccggtagctcatttattaaaacacttccatccacgctggtgttgttctgtggctgttcggcacaggccatgtctcatttctcaaacccagtagcttctacaggggcaaagagaacctctgggtaccaaggtgcccagtaggaaagtcaggcttagcattgctctgactggtagagaccccactgtgcaccaccagctatgtcatgttgagcacgtcttttctctctagacttcattttcctcctccgtgaaaggagagtagccacgcttacctcatgggatccgtgtgaggcttaaatgcaaatgttttcttgtccattctctctctctctttttttttttttttttttttttgagacagtttctctctgtgttgtccaggctggagtgcaatggcacaatcttggctcactggaacctctgtctcctgggttgaagggattctcctgcctcagcctcctgagtagctgggattacaggtgcgtgctaccatgcccagctaatttttctatgtttagtagagatgaggtttcaccatgttggccagtctgatctcgaactcctgaccttgagtgatccacctgcctcggcctcccaaagtgctgggattacaagcgtgacccaccacgcccagcctccttgtccattctcaattgtgtctaggcactgggaaaacaaaaatggccagggtatggttctttccttgaagggcttgtagtctaggagggagacagacaacttagctgtttaagccacagcaaaagtactgccttggaagtgtgaacagggccctgcaggctcgtagagaacgactcacctgactgcactgggtgggggaaggagccttcagagaataaaggaggactaagactttcaggaccattaaaattagactgtgaatggaactatgctaagcacttggtctgctttaatgtcagagcaagtggggaaagacaagtgggacactttaaaaaatagcttagtcattattttctgagactcagttttctcatctgtaaaatggggacataaggccgggcgcagtggctaccacctgtaatcccagcactttgggaggccaaggcaggcggatcacaaggtcaggagatcgagaccatcttggctaacacggtgaaaccccgtctctattcaaaatacaaaaaattagccgagcatagtggcatctgcctgtaatcccagctacttgggaggctgaggcagaagaatcacttgaaccagggaggcagaggttgcagtgagccgcgatcgtgccactgcactccagcctgggcaacagagagagactctgtctcaaaaataaataaataaataaataaataaataaataaaaaatggggacatgatttttctcattgttattgtaagaattcaacatgatagtgacaacgaagcactcaggatagtgcctggcactatcctagcaagaatcaaagcagtcagagtattactattaggaacaggcaaagaagcgaacatttctagagggtcagaatttgatgtgccagattctgtgctaggcattagacatgaattatttaatccacaacacaaccaaagggaagggtatccataccatgagaattaggtcgtattaatttgttccatgtttctttgggtgagaagtgatggcaagaattgcaaacacaagtttctcataaaacagcgatcacggcacctaccctccgtggttccattccgtgccaagttccacgtgagtccaatccaccattccctgtcctgggagatgtgcttctgcagaaaccactgggtgccttcgtcctgaatgaagaccaaatggcctccttgcccctcgcaccagctctgggcatcacggaaggtgcgtccgagtggcacaaattcatagcaagcatctctgaaggccacctggctgttagagcaaaagctgccttcctctggcttaacagtggtggccctaagcctcagagcaagcaccaggagtaccaagcccactgcactcatgcttgaaccactgctggggcctctggatggagctcgctcttgggactttcatatgcgggtgccctcacatccacccgtcatccatcttcccttctgtctttgcatcacataatggcagctaccttttgttgaagaaacaaaaggctcagcttgacagtgtctgcgtttttgcgtcacccagctctttgttccacgcctgctccaaagcctattaatttgtcagatggtcttctcgggaaagataaagttgctatatcacctgtctgcttatctttcagtcaactgttagcggtggataaaaagtccttgctattggttttatgtcattaccctgagggctgtatgtttcgtgcaaagccatcagcatgtgggaagtgtgtgataaaagaaaaatgggaggaaggttggagaatggcaggaaggcaggaagacggtaaagaaaccaagttgcttttatatccaagcccattgtgccgagcggcagctgtgcccaaatgatacccattctctccccagcgtggctgaaatcctaatagatatttggtcccctctctgattcaccacattattcatcacccatacctgctggagaataaaaatcccctaaaaaatttattggatgtcataagctcagaactgaccatccttatccactacttacaccttcccgtgggtttccatggtccatggatcaagttcaaatttcctagctttgtatacaaggctttgtatggtctggcctccgagagtatttccaaacacatcctcccaaatgtggagaaacaagctgtctctctgcttgctggtggtaaattggtacaacctctattgtgggcaatgtgataatatccataaaaattttaaaagcacaaactctataatgtagcaattacacatctaggaattacaccaacaggtaaattcatacatgtgtgaaatgccatatgaataagattattcttggcagaatttgttaagaaggaaaaattggaaacaacctaaatgtccattgataggaaacgggttcacaaaacatggtctatcatatataaccacttttaaaatgaacaaattcttcctctgcaaatttggaaggatccctaaggtttttgttttttatttgtttgttttgagacacagagtctcgctctgtcgcccaggctggagtacagtggcgcaatctcagctcactgcagcctccacctcctgggttcaagcaattctcgcgtctcagcctcccgggtagctgggactacaggcaggcaccaccacgccctgctaattttttgtattttagtagagatgggctttcaccaagttgcccaggatggcctcgaactcctgaactaaggcaatccacccacctcagcctcccaaagtgctaggattacagatgtgagccaatgtacctggtgagatttttgttaatattaaaagctaagtatgagatattgtatataattcagtcccatttgcataaaaacatatctaaatatttatttgtatgtgtataatatagctcataagaaacatacaagaggccgggcgcgttggctcacgcctgtgatcccagcactttgggaggccgaggtgggtggatcgcttgagctcaggaattcaaaaccagcttggccaacatggtgaaacctggtctctactcaaaacagaaaaaaattagccaggcatggttgtgcatgcctgtaatgccagctacttgggaagctgaggcaggagaattgtttgagcctgggaggcagaggttgcagtgagctgagatcacgccattgcactccagcctgggcaacaagagtgaaactcagtctcaaaaaaacaaaaacaaaaacaaaaacaaaacaacaacaacaaaacacatacaagagctggacgagatgactcacacctataatcccaaaacgttgggaggccgaggcgggcggatcaccctgaggtcaggagttggagaccagcttggccaacgtggcaaaaccccatctctactaa

SEQ ID NO: 1243230 - DNA, 4001 bp, Homo sapiens
aagcggaagtggtgcgatttacaccagagcctgcgctgtggcctctgcactaagctgatgccctggctgggtatggtgactcacagctgccatcccagcacttcaggaggctgggacaggaggatcgtttggctccaggagttcaggaccagactgggcaacatagtgagatcacatctctctatttcaatatttaaaagaaaaataaactgacacccaatatctgagtgtttctgggtttatctgggttccctgagaggagataaaagggaggtttcgcacctgtggctctgattcggatgacctctccccgggactgcagaaacgagctgttcaacagcaacgtggaggtgttgctctggaggagggttaaggaccttggccaaaatcctctgagtctgcaggcatccaggaggggctcagcctgaaagacaggatggcccagggctgctgacgctacagccaggccacaggactgcagcaggacagtggcttctgggtgctagacagcctttcagatttattactgatgaacggaggacaggcagccccagctccccaagaagtcacctggaatatacactttccagcctcactgcggtgtctgtcttagattgggctccccggaagcagagcctgagatggggatttgtgtgcaggttatttatttgtttatttttgagccaggcacagtggctcacacctctaatcccagcactttgggaggctgaggtgggtggatcatctgagctcaggagttcaagaccagcctggccaacatggggaaactctgtctctactaaaaatacgaaaatcagccgggcatggtgttatgtgcctgtaatcctggctacttgggaggctgaggcaggagaattgcttgaacccaggaggcagaggttgcagtgagctgagattgtgtcattgtactccagcctgggtgacagagtgagactctgtctcaaaaaaaaaaaaaaattaaaaagaaaatatttttgagacggagtctcactctgctgcccaggctagagtgcagtgtatgatctctgtgcactgcaacctctgcctcccaggttcaagtcattctcctgcctcggcctcccaagtagatagaattataggcacgcatcaccataccccgctaatgttttcgtatttttagtagagacggggtttcaccatgttggccaggctggtctcaaacccctgacctcaggtgatctgcctgcctcggcctcccaaagtgttgggattaaaggcttgagccaccatatccagccttgtgtgcaggttattgatggaaggaggattcacagggaaaagcagtgcagagagggaaacagcagagaacaaaacaaggcaaaaaacagttactggaggcatccagcctctgcctggtcacacggagagccctgaagtgtaagttgcacaactgaaatcaccctacctggggacagagaagctgggctattagaccctccacccatcagtcgttggccaatggtcaggccacaaaagctggagttaggatcgtccgcctgggaagcaggacttttgctgagatgccaagagcacccgctgcaaagtttctccagagcttatgctcctttgtgcccatttgccctgctgtcaattccctgattttctccccagcccaataccctgagtcccacaccacaggctctgaatggaattgacccaaccctggcccagtaccgggcatgcgacacgggtgtgctgaaagcgcaagggagatttccattcttgagtggttgtcactgtgctcacctgctctgttggggtgttgtccaaataccagctgaacatagccactggagagtcctcccccatggtgaccctgagcagaatgtctttgctggcattaactggcctgcagttcctctcacagctgaaaggcagacagaggacagagtgaggaagctccccgaggcattgctatcatctggatgtttgtcccctgaaacctcatgttgaaatatgatccccaatgttggaggcggggcttcatgggaggtgtttgggtcatggggttggattcctcatgactggatgaatgcctccctcgggagcgagttcttgctctattagtcaccaccggagctggttgctaaaaagatggccgggagcagtggctcacgtctgtaatcccagcactttgagaggcccaggcgggcagatcatgtgaggttaggagtttgagaccagcctggccaacatggtgaaaccctgtctctactaaaaatacaaaaattagtgggatgtggtggtgggtgcctgtagtcccagctactcgggagtctgaggcaggagaatcatttgaaccagggagatggaggttgcagtgagccaagatcacaccactgcactccaacctgggtgacagagtaacactccatctccaaaaaaaaaaaaaaaaaaaaagagcctggcacctcccacccttctctgcacacaccaggtccccttcatctttcactgtaagtggaagcagcctgaggcccttatcagatacagatgtccagtcttggattttccaaccataagaatcatgagccaaataaatctcttttcttctttcttttctttttcttttctttttttttttttttttgagacagagtctcgctctgtcgcccaggctgcagtgcagtggcgcgatcttggctcactgcaacctctgcctcccagattcaagcaattctcctgcctcagcctcctgaatagctgagattacagacaggcaccaccatacccaactaatttgtattttcagtagagacagcgttttgctgtgttggcctggctggtcttgaactcttggcttcaagtgatccacccgcctcaacctcccaaagtgctgggattacaggcatgagccactgcgcccagccaaccatttttctgtataaattacctagcctcagatattcctttataacaatgcaaaatgggccgggcgcggtggctcacacctgtaatcccagcactttgggaggccgaggctggtggatcacgaggtcaggagatcgagaccatcctggctaacacggtgaaaccccgtctctactaaaaatacaaaaaattagccaggcgtggtggcaggcgcctgtagtcccagctactcgggaggctgaggcaggagaatggcgtgaacccgggaggcggagcttgcagtgagccgagatagcgccactgcactccggcctgggtgaaagagcaagactccgtctcaaaaaaaaaaaaaaaaaaaaaaaaaatgcaaaacggactcagacaggcattgtgaccactggcctggtcttttgtccagtccttctcaagtcctttgagagggtaggaaatggccctttttcaaattaaagatggaataaaagccgcccctgccccaaccaacactgggacgtagccttggttgtgaagatggactgagtcatggcctgactgaattcccatgtcattcactgacagcgtaatgatacggaaggtgaatgaggctgagacaggacctgggttctaatcctgtccttgtcacttatgaagggtcaccttgtgtgcatcacttaaactttttttttttttttttttttttttgagactgagtctcactctatcgcccaggctagagtgcagtggcacgatctcggctcactacaacctccacctcctggttcaagagattctcctgcctcagcctcccgagtagctgggattataggcgctcaccaccatgcccggctaacgtttgtatttttttagtagagacagggtttcactgtgttggccaggctggtcttaaactcctgacctcaggtgatccgcccgcctcggcctcccaaagtgctgggattacaggtatgagccaccatgcccagccgaatcacttaaactctctaagcctcagtttcctcacctgcaaaatgaggggatagcctagataatttctgtgattctttttagttcagataatagtaaactaatgc

SEQ ID NO: 1243231 - DNA, 4001 bp, Homo sapiens
agtgtgcatgtggaaaatggtgtcaccaatacaatttctcccacactctgcccaagtcaaaacacgaggaggacatcaaggcacaactcttccaactcccagtggggatggatccaaggaagtcactccagataattttctcatgctaatcagcatcatgaaaatcaaaagccctgtatcatcccatggtctaacactcacagactatttaaccaatattctcacatgcactccttatttagaatcagtttctaaaatttgggtctttggcagcatgtagctttatcacttaccagtctggcaaatgaaatagtatttcagtaagcacttgtcccctttggatgagatccgaatgaagtttctggacaggtaggtgcagctgaggggctttgggggcccgttggctgcaacgtctgctgaggggagatcagacgcagatgagcctcatactcgaaagccaggcttttaggtttattttttattattgtttttgagacagtcccactcagtcacccaagctggagtgcagtggtgtgatcttcactcactgcaatctctgcctcctgggttccagtaattctcctgcctcagcctcccaagtagctgggattacaggcacccgccaccacgcccagctaatttttgtatttttagtagagatggggtttcaccatgttggccaggctggtctcgaactcctgatctcaggtgatccatccacctccaccttccaaagtgctaggattacaggcgtgagccaccacacccaccctgccaggcattttttaaaagtaaatatgaaagccaaatttgactgacttccaatagataaaaatgtagaatttcctcccatacattatagtttattttttcatatgtgttccttaccacaaggcttagtattactttatctacacgttaatgaagatgatgagaatgatataataatggcttggatttgtctctaaaacttcaagattatggtgcataactttgaaaacactttgtaagggccgggcgcggtggctcacgcctgtaatcccagcacttttggaggccgaggcgggcggatcacgaggtcaggagatcaagaccatcctggctaacacagtgaaaccccgtctctactaaaaatacaaaaaattagtcgggcgtggtggcggccacctgtagtcccagctactcgggaggttgaggcaggagaatggcgtgaacccgggaggcggagcttgcagtgagccaagatggcaccactgcactccagcctgggcgacagagcgagactccatctcaaaaaaaaaaaaaaagaaaaagaaaacactttgtaagaaagacaataggtagatactcttcctcttagttttgtgttaggaaacttagagatcagaataatgaagagatgtttattaggaaaaaaatgaccatcaaagtttctgtctttggaacgtagcataattcttttagtgaaaggtcaggtaagttaactttagatgggttccaggaaaaattgcatcatttttgctaacagacaaatcaaaggctgtcgcacaaaatggaaatatttcagaggaaagatggtaatgaagtaaagtgactggtttttctgtctacaaaagcagaaagattaagattttcttttttttttctgtcccagaataaaatataaggaagtttccttcataaacactgaaccccagggtcttacctgggtatttgttgtcttgatgctttttcaatggcattacattttgcccaatccaccacttctttccttcttccagatagtcccggatgagatcttgaacttccttgttccaaatatgagctaggaatcctctctgcacatgacagtaatgctgtgcttcctcaaagctgcattgaaatctgttaagctggtaacaattattttgcccatgtggtgctgggctgtttagctcacttcctagaataatacttgttctgatgtataaccaaagccagcttcctcctttgaagaacattttctctgaattgtagcaagaaaaagtgtgggggtttagcagctgcctggtcctttaaatatatatattggcgggcttgtcttattagtattattcttttatgaattgggaacaatttaccaaggatacaaaaggttttgttttgaggacccaggtgcaggtcctacaagctgaaaacaaatagcagagatcaataaaacaatggccctttttatctggggccccaccatctgtgtctacctaccgaatatgcctttagcaaatagagatcgattataaagctgagtctaagctgcactgggtagaggatgatgaatatctaacatctaagttagtgctgctaaaaattaataagtgtagctttttcttttctgaggcagggtctcattctgttggtcaggctggagtgcagtggcatgatctcagctcactgcgcctcaacctcccacctcagcctcctcagtagctggggactataggagtgcactaccatgcccacctaatttttttttttttttgagatagggtcttgctatgttgcccagggtgttcttctgggctcaagccatctgctcacctcggcctcccaaagttctggaattacaggtgtgagccaccacactcagccacattttttttttttttttaaagaaagttattcttgcagatcccctaggattgattttttttttctttgagatagagttttgctcttgctgcccaggttggagtgcaatggtgtcatctcagcaacttctgcctcctgggttcaagcgattctcctgcctcagcctcccaagtagttgaggcatgtgccaccacacctggctaattttgtatttttagtagagatggagttttgccatgttggtcagactggtctcaaactcctaaccttaggtgatccacccacctcggcctcccaaagtgctgggattacagacgtgagctactgcacctggcctgactttttaaaaaaataaatgttattgtgtatatttaaggcacacagcatgatgtcatgggatacatatagatattaagaaggttactatagtaaaacaaacatatccatcatctcacattagttacccacttttttttttgtttttgtagcaagagcagctaaaatctcatctagcatgaatcctgtctactgtatggttttattacctgtaatcttcagtttgtacactaaatctcttgacttgttcatcctacatctctgctacccccaggactgatttaaattactgtattctgtctcttaagtacatgcaaacagaactaggcataaatgctattttttttttatggggtctcactatgccacccaggctggagggcagtagcatgatcatagctcagtgcagccttgaactcctggactcaaacgatcctctcaccttggcctcccaaactgcaggtgtgagccaccgtccctggtccatgaactttatcttaaaactcttacacggtcataaaaacaaaacaatattaaatggaagaatgaatacaaattaaatacaaacaaaactgaaaatcaatgagatccaagttttgccaagctaaatggcagataaacagggctctggcctacgactacacaggttcctttgaatctggcatgcatgctattttatgatatggggagggttcagttctgataccacgtttctttatttgactcacacacacacatacacacacaaaaaaaacctttgttcacacagcaggtcatttggtctccacctgttgcatatccatcacgtgtattacagctcgttctttcttggtgccaaaaagtgatcataaactcaaacaaatgtgggcactgaactgcttggtaggtttcagggttaagatggttatccagatagtccaaatgatgcttatgttactctaaaaatcagtacagaagtggtcaccaaaattatgaaattctctaaaacacagactgcaagaatacatcctgtttgaaaaacactgcagtaatcagcc

SEQ ID NO: 1243232 - DNA, 4001 bp, Homo sapiens
gagttcgagtccagcctggccaacatggtgaaaccccatctctactaaaaatacaaaaattagctgggtgtggtggtgcatgcctgtagtcccagctactcgggaggctgaggcaggggaattgcttgaacctgggaggcagagattacagtgagccaagatcatgccactgcactccagcctgggcaacagagcgagactctgtctcaaaaaaaaaaaaaaatttaattggattggaccgtggaacactttatgccccaaggtattgtttgtttgtttgtttttgagacagggtctcactctgttgcccaggctggagtgcagtggtatgatctcggcccactgcagcctccgactcccaggttcaagtaattctcttgcctcagcctcctgagtagctgggattacaggcgtgtgccaacacactagaataatttttatatttttagtagagatgtggtttcaccatgttggtgaggctggtgcaccaaagtattataaaaaacaatagagcggctgggtgtggtggctcacgcctgtaatcccagcacttcgggaggcaaggtgggtggatcacttgaggtcaagacttcgagaccagcctggcctacatggtgaaaccccatctctactaaagatacaaatttttgccgggcgtgctggtgcatgcctgtagtcccagctactcagaggctgaggcaggagaaatgcttgaacccaggaggtggaagttgcggtgagccgagattgcggcattgcactccaactgggcgacaagagcaaaactccatctcaaaaaaatatacataatagtaaataaaaaattaaaaagagcagtctccagtacctgagggagtacaggggtgaggggagcgatgctacctgggcctggctggcaggctgccctccatcttgtggagactcttcctctgactctaactacctcagagtcccagcccagggtttctccaagtcaggagccagggtgttgggatcctggaggtcactggtcacaagcacagcctccaggcccaaccctggcacactcggggacctgggcctgtgcatcttaacccagttctcccaccgtccctgccctacgacttacgttctagcatgactggcctggcccaacagcctcagtggtgggacgggggaggcaggagcaggggctcccacgtgaatccagggtgtccctgagctaaggccaggcgggggtgacctccgcagcttccggggccctgggcgatcgggccgtctcgcctcaccctctcaccaggcccgacacatctgctggccacctttcccggtagacggtaagttcctcccaggcagggccgcggctgacttcactccgtgggtgtggggaagccctggcgaacagagcagtggacgggctgtcacgagggaagaggggctgttgcagaagaagagaggctgtcccggggcaggggctgtcacggaggaaggactgtcacggggagggcggcggcgcggggttgatggacagcaggcggggtctccgggaggggcgagtagggcgggaccgccgctgggaaggggctcgaggcaagggaaccaggaattggggaggacgggaggcaggggctcgcgggggcgggcctgaggggacgcgagcgggccgccggggaggcctgaggggcaggggtaacgcagacctggcgaggcggaggggagcggcgaggtggccacgccgaggcccctcacggcggggtctgggctcacctggggcgactgggcggggcgcgggtccgcgagggcccagattccgggtccgcggaggccacgggacccctcgggtggctcagcgggccggagtctgccgtcgactgttccggacgcccgggcggaggactcccgtgagggggaacggcccgtgaacgcgcgcggagctgctcgcgccaaaaattccaaaccggcctcgaggctcctccccctccccagtgcagcccgtcaggggtgcccgggctccgaggctccgcccctcgtgctgcgtgcgcgccgccgagccgccccgccgctcactgcgcaggcgcacaggattctccgcgctggcccggggcgtgggtggcggcctggttctgagtcgctgcgcggggcttcagccgcccagtccctgggacgcccactgccctccaggcctcgcacccgacacccaccgccctcgctgggctggcgtagtgtttgggtccataaaagggaccgccatcccggtgctcggagcaggcgtagccccagggttactccgggtaggaccaggaagtccctacggcctcctgggtcccggcaccccccttctcactccggccgtgttctgaaccagggtcgcggtgggaggccagacgcacgacccccaacccctagcgcacggcttcgggagccagaaaaagccgcctcttccaggaagctctccagataggcaggactctgcttggcctgacctcgcctgcctgcagcttccctgccaacaggcctcagatacttttttttttttttttagacagggtctcactgtcaccaaggctggaatgcagtggtgcagtccccaggttcaggcggttctcccaacctcagcctgccgagtatgtgagatcacaggcgcgcgccaccgcactcggctcatgtattttatttttagacagggtctcattctgttgtccaggctggagtgcagtggggcgatctcgactcactgtaacttccgcctcccccgctcaagcgttcctcccacctcagcctcctgagtagctgggaccacaggcgcgcgccaccacacccaactaatttttgcatttttttgtagagacggtgttttaccatgttggccaagctagtgtcgaacttctgacctcaagcgatccgcccgcctcggcctcccagaaggctgggattacaggcgtgagccaccgcgattggccgcaggatcatagttcactgcagcctcgagcagccacttccggggcagctcctccattctctgagtttgagacttgctctcagctcagatcccttcagcgctctcctggctgaacgaccttgggaatgcactgagcctttctgagcttcggattagtctcctctcctggaaaaaaaaaaacagctgaggacgctgggatgatcccctaaagtgattagcaggggccctcgcggagcaagtcgggctagggattgttccttccctcaccgaggggctctttatctgtttaactgggtgggaggagtacgcttccggccaaccctcccccaaacgctggccttctcactctcacctctccttccgccttatttttgctattgccctgatctctgtccgatgttctatcttttgtttgtgagtttacttgttgactacctgctccttctagccctggcctccagaaccagtcccccaaaccctccatcctccccaagtctctgacaggtcatggactgcaaagcttcccacccattcagttcctgcaccctctgtaaacgttctgtgcatggagcagcagtgtgggggaggagaggctgggatcctggctgggggcggcagcccacctgcctgcacctttccttgtccttcgcatctctggcggctgtgccccagtgactcaggcaggatccttgttgatgactccagactggcccccaggaggcctggggcacacacaggcccctccccagctgcctagggctacctctgccagccccatctccccaacaggtccccttccaaccgcccattttttaaagtctgattcacaatgataattaaaaaaaaaaaaaaaaaagcatggaaacacatgcttccgatgtaaatttcactgtgtgaggaaaggctgtaatataaatatatgtaaatggaaataagtagatggagcagataagtgcgtggtgtgagggaaactagggctgcgatcctgcctgccccagtttctgcgtgtgtaaaatggggataaaaataatagttttctagactaggcaacatagcaaggccc

SEQ ID NO: 1243233 - DNA, 4001 bp, Homo sapiens
agaccagcctgaccaacatggagaaagctgtttctacgaaaaatacataattagctgggcatggtggtgcacgcctgtaatcccagctacttgggaggctgaggcaggagaatcgcttgaacccgggaggtggaggttgcagtgagccgagctcgtaccactgcactccagcctgggcaacagtgagactctgtctcaaaaaaaaaaaaaaaaaagagctgagctctgatataagctgccctggcacacagtgagcttccagaaatggtcccttgacctctaaatgcaccaagacccagggaacacgccctgtctgagcaccctgacaatgtcccagtcccaacaccgtaccctgaagctgtccccaaaggttcccctgccaccgtccctgaccactctctggtatctcagagccctagcaacagccttatagagggagggttctaggcgtggggcaggcatgagcactgtgcttataaccaagcaaaacactccctctgtgccaacataggtgtggcaggtcacgctggggtctgtttgccctgtctgcccgctgcagcctcctcgggggagggccagggctgtctgtccatcctgtgaccccagggtctatgcgcacatatgtgtgtctgtgctgctctgtgtgtgtgtgtgtgtgtgtgtgtgtgtgtgtgtgtgtgtacacggtgcatctgaattgtcctgagtgctgtctcgggtatccttgagctgtgtgtgcgtgtgtccccctagcggtatgtcagtatttttccctgtgggagccgcacacctgagggccaggtgagtctggggctggtcctgtgcctgcgcatctgtgtgctggcggtgtctgcatagtactctgcgggtacatgtatctgtgcaccccagaaatgggcagtcacccacgggacctctctacagtgaccccaaaggatggatagtgagatagggacagtatgttctattttttgtttttttgtttgtttgttttgttttgttttgttttgtttttggtcaccggggtttgttgtacaggggcacaatatattcttctcccacccccaagccggccctttctgcccctgctcctcccaccctctggtgtctcacatctcagggacaggtggaatgaagggtaagttcgcggaccccagatcaggacaaccgggaggcttccgggctgccggagagggtcacagccggttaggggagggagccaggagaggactctgcgcccctggggaaggactgggctagttctgggtccctgggaggagtgagtggggggccctgcagaaggctggggcgcatcgtgtgggtgagcattagaagagcgagctgggggctctagggcaactaggaacttggagagggatgggaggcagggctgctgggtccctaggaagggctggaggaataccggaacgcctgagttccgggaaagccccttcctcactcaccctcgccggacccggggccaggtagaagcagcagcagcagcagcgacggcagtagcaggagcagcatgattggcaggcacacaggtagcggccccatcggagggtggcagaggtgggacggtgctgcagggccaccggaggcaccaagcccggcggacacacaccccggctgtcacgccccggctccgcccccgacctcaccttccctcgcggcccaagcagagccagctaggggcgggcacctggggcggcgcaaaggcgtcctgatctctgtatcttggtcactgaaggggctccagaggccgcggggcgctggggacaggaccgggagtcaggcccagggaagtctcctcggaataagggaggaaaaggcgctcttttgatgttattactcccccagcccctcccccgctcacctgggcgcccaaagggaacagaagacttggaggaggggtagtcctgaatttgctttaacattttattttatttggccgggcgcggtgactcacgcctgtaatcccagcactttggaaggccgaggctggcggatcacctgaggtcaggagttcaaaaccagcctggccaacatggtgaggctgtctctactaaaaacacaaaaattagccgggcgtggtggtgtggacctataatcccagctacttgggaggctgaggcacaggaatcgcttgaacacggaaggcagaggttgcagtgagccaagatcacaccactgcactccagcctgggtgagagccagactctgtctctttctcgctctctctgtctctctctctgtcagtctggagagagttgattgtccctggtcagtctctctagtcgagagagagagagacactgaggctgggcacagggctcacgcctgtaatcccagcactttgggacaccgaggcgggtggatcacctgaggtcaggagttggagaccaacctggccaacatgatgaaaccccgtctctactaaaaatacaaaaaattccccgggtatggtgttgagcgcctataatcccaactactcaggagcccgaggcaggagaatcgcttgaacccgggaggcagacgttgcagtgagcgaagatcgcaccactgcactccagcctgggcaacaagagcaaaactccatcacacacaaacatacacacacacacacacacaaaattaaccaggcatggtggcacgtgcctgtagtctcagcggctcgggaggctgatgtacaagaatcgcttgaatctgggaggcgaaggttgcagtgaaccaagattgcaccactgcactccagcctgggtgccagagtaagacactatcacaaggccgggcacggtgactgatgcctgtaatcccagcgctttgggaggccgaggtaggcggatcacctgaggtcaggagttcgagaccagcctggccaacatggtgaaaccctgtctccactaaaaatacaaaaaaattagccgggcatggtggtgggcgcctgtaatcccagctactctggaggctgagtcaggagaattacttgaacccaggaggcggaggttgcagtgagccaagatcgcgctattccactccaacctgagcaacaagaccgagactatgtctcaaaaaaaaaaaaaaaaatgactctgtctcaaaaaaaaaaactagaagtcttgatctgtgatcttgggaaaagctgttcacatcaaggatgccatctttttctggcgaaaaacttccctcttgtgagattatgaacccaaagttcaaggtcctgaagttttgctgtattgtggatggcaaggacattctttctctgatgttctcagaagatccaatctttggttctagattgtgaaggaattgattgtccccagtcagtgagccataaaaagctttcagtacctggtgaaaatacactgtaccataatgatctactgttgtaatatcagccctcttgcatgggaaagcaaccagaaaacatgcattgaaaatgataattgacaactgaaatgttcaaatggcccatgaggtagccaaatgcacctgaagctttgattgtcttcccaggaacatgaatttgacaaacgaaacattggttatgaactattttagcaatttataattcagcacaccaatacatatttaatttagatcattttatcttttccatgatgagtcatggaatgcagagtcttttatttttcatttttagacagagtttcattcttgttgcccaggttggagtgcaatggcgctatctcggctcaccgcaacctccgcctcctgggttcaagcgactcttctgcctcagcctcctgagtagctgggattacaggcatgagccaccacgcccggataattttttgtatttttagtagagatggggtttctccatgttggtgaggctgatattgaactcccgacctcaggtgatttgcccacctcggcctcccaaagtgctgggattacaggtgtgagctaccacgcccaactgcagaacctttaataacaaacactttaaggagtcaggaaggacaaggtgaccatct

SEQ ID NO: 1243234 - DNA, 4001 bp, Homo sapiens
gaggtggaaatggccttgcctatggtcccttccccttgcccagggtcttctgtatcacatcgctggtctctctttcctccaccaccatttcaggatccacccctagaggattctgatcttctgacagtcaaggtcagatccctgctctgtgcccaggagctgcttatccaactgcccaccgtgaggtctcccagggctaaggccagcagcctcactccctgagaagctgggcatgttaggactcctgctgctctgtgattctgggtggggtctgaggctcttctgctgtgaccaaggataaacagactgactgaattgatgagtgcggttagcatcaatccaggcaaaatggctatgtgccattttgtgtgccacagaccacatgcttcctaatgccacgcccctcagacttagaactctgcaggccaacccaggactccctgaggccctcaagataaagttcagatgacccaaccagtcacaagtcctgtgcagtccactcctcctgtgactcgatcccaggcagcctgagatgctcacgtctctccccgacccattactctctcctggccttagctccagctatatactccaggaagccttacttgacacccacccatccaggctgggttggtggattctctgtgcttgccccacacagacttcctctctggggatcactgttattcctatcctgcaagctttggggaggcagggccaagtctgcccaaatcccatggtgaacctgggcctagtatccccctggagcttttcctggctgggaactcctggtggggcctgcctggcaccaccctacctgccaactctacccttctgtgatttgcatcgtccccatttaaagtactctcagcagaaagagcatggagatcatgctgcactagactccacgtgtaattcatgcctcagatgcctctgctttcaggaatcctggctggccacggacacaccagctctggatgggagtgacggcctcaatgaggcacccaaggccccccagacagaggtctcatccctgcccatccctgcaaggaaatacagtggccgttgtagagttgccagggttgtgatcaaggagcggggtgagcaggggaggtcaccgagcctccacatagtctagtccaagcatgtgtggcagggtaagagtacaagcatgttgcctgacacaggttcatggccattgtcccaaccctttcccctgacttcagttgtcttcagtttcccttaggccttttccctcaggcaatgccacacatctgataagttgtgggagttggtggccagctaggacagcaatcctttccctaaggaggttcctttcagcaatgccttctggcatatgtggcattggaggggtcgagggtgacagcctcctaaccaggcccaggtcgatgcagaagtcaactcaggagccactctacacacccccaccatccctcaggagtggggctgaagcacctgtctttccagcttaaaaatgggataaggggaggcaaggcttgggaatgatgcggacaggtggaactatgaataaccagatggtaactctcccactcacccccattttctaccaggacaggaggtggggagctgaccacacccgcgcccagcatggcgggaggtgagccggcagatctagatcacctaagtgacaagacagataccaatacgctcccccatttcgtgactggaacagaagcagaccgggaaggcagccccgcccgcggcccgtcccgcccgaccgacagatccaccacgagacccgtgcctcacccagcaccactggggggtgacgtccggccgggagcgctgggtccgcgagcagcattagcagcagcaagaggaacaggaggccatccgggagcagccccacacggtaggggcggaggtggaggcccatggtgtacgacggtcgccgcaggtccgggatgcaggttcagctctctgggctctcgcctaggcgggggcggtggcgacgcgcttaaccccgccgcccgcatcccccgcatccccccggccaatcagggcccgcctcccgcaaatggctggccaatagggactcgccgccatatacgcccctcccagtcggaggtcgccgccccgcccttgcccaaccccctgcttcctggaccacgctgagcgccgagcgcatcgatggatcgaggtatcgcctggctccgggctgtcagtcgcccacccgggaacccagctcgccgctgctgtaccccgcccagccctgggtacccgaaatccacgctgcgcagctctcacttggcgaccccctgacctggaggatctggaacggacaagaccgggagaggataaggggtgcagcgctggccgctgctgagcgaccccggttaaagcaagaagagaggaagtgagtcccggacagttcttgggcctcaggtgaccaggagctgaccaggacctttgtgcagcccccacaccaattcttagcacaccctgccccgagggcacctgggtgcggccagtcagcccctgtaactctgccccggggttacagatgcggggggaaccgggagaggccaggtcagcatgttcagttcccaagagaggggttaatctgttcgttttaggggcgcagagtgcagcgtcaccccgccagtccgggcagttcgggcgcggggttgggagtgggcttgagtctcgaccctgcgccatgggccatctgcaagttcccctgcagagcaggagaggcatcgggagctcgtggtccccctccactctcgcaaacctggggaaccagagaggacatggactccctgcgccaggaagcaggggcgaacagagtgggcaaagacctgacagctggttatatgccagcaccataggtcactgtgggatagagggacgagagtatttgggaaatagaggtcttgatcctccacacacccaccccttcgaaggggcagctgcaccctggtcatcccacctggtcccaagaaatttgtcctgccccttccttccttcttcttggtaagcagctgacctggctatgaagccactatcttgccctgcccttctcgagttcttatagtgaaacatgttggtgactgggctaccaccaccctccctctttcttttttctttttctttttctttttttttttttttttgagacagagtttcgctcttgttgcccaggctggagtgcaatggtgcaatcttggctcaccgtaacctccgtctcccggattcaagcaattctcctgcctcagcctcccgagtagctgggattgcaggcatgcgccaccaccctggctaattttgtatttttagtagagacggggtttctccatgttagtcaggctggtcttgaactcccaacctcaggtgatccacctgcctcggcctcccaaagtgctgggattacaggcgtgagctactgtgcccggcccctttttcttttctttccttttttttttttttttttttttttttttgagaaagggtctctctgtcacccaagtgcagtagcacaatcacggctcactgcatccttgacctctcaggctcaagcaatccttcccacctcagcctcctgagtagctgggactacaagtgtacacctccaagctcagctagttttttattttttgtagagttggggtctcactatgttgcccaggccagtcttgaactcctggccttaagtgatccacctgcctcagcctcccaaagtgctgagattacagatgtgtgccactgtgaccagccccaccctctcttaaggtccagccatctcccgctaaggccctggctcagaactcccactcccaaagcccctgcctcccccaccttcacccgtgacccaacagaagatcagtgaagacccatctggtgaaaacccagcgtgggagaccagagactcttctgcaggcctagggacgggcagaagtccagtcaaaggttatgtggaggaagagaaggatcaagaggtgctgggccaccttggactc

SEQ ID NO: 1243235 - DNA, 4001 bp, Homo sapiens
acaatagttgcaactgtatgagtataatacaattccctttttataaaggtgatcttctggtaaatccaggagagtggttactatttatcggaggctgggagagggtagaggatacaacttgactttatttatattaactgatgatgtaacgggcaaatttttctctttgtgttcttgctgttttctaaattaagaagtgtttgtgtgtgtttgtttgtttgtttgtttgtcttgagatggagtctctcttgtcacccaggctggagtgcagtggcatgatctgggttcactgcaacctccacctcctgggttcaagtgattctcctgcctcagcctcctgggtagctgggattacaggcggccaccaccacgcccaggtaatttttgtagttttagtagagatggggtttcaccatgttggtgaggctggtctggaacgcttgacctcaagtgatcagcccagctcggcctcccaaagtgctgggattacaggtgtgagccaccgtgcctgaccaagaaatgttttcaaaagttttctcaccagcagcttttcattgactctacccaatgagtgcaaaagggctattcatggggtctgtgcttttccacttccagaggaactgcccatactccagtcgctggtgggggaaggcagctgcatcattaggtgacttaaacatcagtgaggctcacaatgacgattgtccctgagctggtatacacgtgactgcacacacacctttgcaagagaaactgcttgaggctggcatagacttcaaaattctgtaaaacttccccgcagaactgtagtcaaggacgagggcccatgccccagagaatgcccttgaaccagagagtcaggaactgcccaaggactctccatggatgcgccccgattctcagcgaacctcgtggaacagcaataagccccaattctcgacacagccctggaaaattgggtggctccagtatccagagggggaaacagactcaaaaaggttcttcaacttgcccagggtcccactgatggaactgaaattcaaattaagttccgacgggcaaggccacctgtttccctcgcgccatgtcacccctttaccaccccgccccccatagtttctcaccctagttcaagattagggtaccaagagagccccgccccaccgtcctgctggaatccaggagctccccgtccaaacggggcacgtctttaacctgaactcttgcgctgtgcgggtaatgccctctttgggattccaaaacacaacaaaacacaacacgcacagacacacgcataattacgcagacagctgcggagcgggcatcgcgagtgtcctgcaagctctccaaaagtctccgggaaggactgcgcctcccgcggtatcgctcccacccgccacccgcaaccaccgaagtgagacagggaagtgtggctccgagcgtccgcgagctctgggcacaagggccgtcaagagagacggcgccaccccacgcagagccgctcgaaaagaggagttttgaacgccagcccccacacgacccctgaccttcctcccggtccccattcaaagctggggccgccccaccgcacggaccggagaggtggcgccggcccggggtgaggaagtggccagcggctgggccaggatccctgccgtcaccaaacggaccccgggcacggcgggccggggtccccgagggtgcgccccgtccctgcccgctccggctgagccaggacgcagaccccctcggacgcagcgccctgggagccggtccccgcggggcgcaggtccctgggcgccctgcctgcctcgctcccggccgggcagctcacctggccgtgccgcccgggcacagctgcccgcctgccccgggtttgggctccggggtcccgcgcgcgcagcccgcgtcccgactcgggtcactcagcgccgctcacgccctccgccgccggcgctcgctacttctgcttcggccgcggcgccgcgccacgtgatcctcgggggccgccccccgcaccgcccagcctcgccccgcctcgccccgccccaggcgcgcccagccgggtccgcctctcggagcgcaccccgagtgcagcgtccccgcgccctccccgccatggagcggcccaggcctggagccccgcctctgcgtgccaaagaagaaactgaggcaacccgaggggaggctacctgcccgaggccacttggccaggtgcaaagggaattccccaatatcatggcattcctggagagccggccgcagtccaggtgtttgccgtatacttaacacactcccggccgggcgcccgggctcacgcctgtcatcccagctctttgggaagcctagacgggaggatcgtctgagctcgagagttcgagacagcaatgagctaggatgggtgtggccgagagacactccgtctcaaaaataaataaataaaaattaaaaataaatatactcttcacaattacccgccaggaattgccaattcatggccctaatttgaagccctcgttgaggctgcgctggagtcagaccaacccttactgctaccttaggcagaccacttaaaaaccgacagcctcagtttccccatctgtaaaacgtgatcaacatagtgccagccccaaagggagtcaggagcaaagaaccccagacaattgatgtcccgttttcctgatctcatgggaagaagctaatatgttctttaagaaatttatttttccgttcgtgtgttgcatgaagctatctgattcaaacccttcctatgctctttgatggaggtatctttgttgtgactagaggcagtttcaggggcacctagacagctgtcaggcacttgaatttcacttccaagttgcttgagttatagcttctgttttctaagaggcagggtctcactctgtcacccaggctggagtgcagtggtgccatcatagctcaccacatcctcgaactccgggactcaagcgatcctcctgcttctgcctcctgaagagctgggactatagaggcacaccacacttggctaattttctcttttttcgacatgaggtctcactatgtgtcccaggctgttcttgaactcctgacctcaagcaatcctcctgcctctacctcccaaagcactgggatcacaggcatgtgccactggtctgttatagcgttttttttgtgtgtgtgtgtttttggttttttttgtttttttttttgttttttttttgtttttttttttttttgagacaaagtcttgctctcttgcccaggctggagtgcagtggcacgatctcggctcactgcaacctccacctcccaggtttaagcgattctcctgcctcagcctcctgagtagctgggattataggtgtatgccatcatgcttggctaattttttgtatttttactagagacgcggtttcactatgttggccagattggtctcaaactcctgacctcaagtgatccacccaccttggcctcccaaagtgctgggattacaggcatgagccactgcacccggcctgttatagcgttttttaattgaggaatatcactctcactgtcaatgttgtatcccaagccataggactcgtttgtgacttcacaagatctgtggattcatttctttcagcactcccaactggcgtgtatagctgtgctcatcaccacagatcacttaacacatcaattttttaaagagatcttggaaggactcattatgacatcaaccacttgaagtcattgggccaattccccaggaaaaatgactacatctaggggcaattcctttgcctcactttttttttttttttttttttagaacttcagcttgtatttatttcaaccaatctttttcacacttttgttttagtatgtgttatataaagtacataatatattagttcagtcatatatatgtataatttattattacaaagtctacatggataggggagtgggttaagtctcttgatggcaaaatgagattgcatataatc

SEQ ID NO: 1243236 - DNA, 4001 bp, Homo sapiens
aacgtgcatctgggaagcaggttcctcctcttcccaggcatccctgaaactgcacacagcaaatctccagtcggtggcatggccctgagagtctggggactcatccccattctccaggggcctttccatcacgccctcctaaaggtgggcctgctcggggccagcgggagagggctgggtctcagtgtgaaccgcgctgaagacagtcgagtgggactcagtgggcaatgcaggcgaagggcatgggccgcaggaggtgccagtcttagtgccagggcacaggaactgcaattcaggcctgggaagagggaataacgttaagggtgtccctctgtccaggtcccccgtcggacgcccgtgggcctctgctccgtgcgcgcccaccctcagcgtcctcacggccacgctctgcaggcccatgcccgtgggggcggccccgccatggcaccacgatgcctcgggttcgctctcctgccggcccccccaggccctggccttgttgcagggcctaccgcgcgcccccccgtcgcccgctggcgacactcacgcccccgggccgagccgcggggaaccgtgaagtcggacagccttcgaacagacggcggcctcgacggccactacagcgcggccgcgcggcgtcacgggacaccgcctcctggccgctgggaagggagggcagtgccgccggggcgccgcgcagcgccgcgccgccccctggaggccggaggacggagccacagcccgagcaggtctcgacggggcacagccctgccggcgcggaagacaaggtgcgggccctgcagcaacccccgcccgccgccgtcctctccgtgggcccggacagcccgccagccccgccccgccgcacccccgggccccgcagaccgcgcgcctcacccgcggcgtcgcagtgcgtgggttggggcagcgaccaacggtcggcagctccaccgtgcccactccccgggcctggcgaggacgccggaagcgctctcccgccaggaaggccgcgtgggtgagcgagggtgagtgcgcggggggcaccgcgggacggggcggggcggggtctcccaggggcttccgcggctgaatgagccgacgggaggggaaggccttctgtgtagggaagcggggtgctgcctcgccgcgggcacccagagacaggtcgcatgatcccacgtgggatggggctgccatccgggtgggagtgagaccaatgggtggagctgacccaggcctgccagagtccaccagatcctctacccctttgccatccctggcacccccttacccccttctccacaaagtccggtgcaggaggctggtgctgaggtggggttctggagccagagcccccagcccaggcctggcttctccacttacctgctgggggcgctccaggaactctgctctttgagcctcaccctcctcacctgtaaaaatggaaagtcatttttctcctggggttgccgtgaggactggggaagactccctgtgttatacgttcacccgctgccagcactcgggctgtgttggtgccctgccccctcatttcacccgcagtcagggaatcctgaactgatgaaagctacccaagtgggtagctgtgcgatttgaggtccctttagggcatgtgggcctggcccgacactccccagaatttgtgggaagattgtgggaaggtcagctctgcgaccaggagaagaccctgagccccacagtgtgcccaggcccatggtccctggggagagggggcaccgggtgcaacggcttccctggctctaaggcaggcacctctttcatgaacctggggattacaacaggcacagtgggaccaacagcaatctccccacccagcccagcccagcccccagagtccagactttcaggcagctaccgaggagccttcttcatgagcaggtctggctgccagaggggagccttggagttgtcctgctccatccctaactcccagccagacctctcttcccaccctcctggcttcaggaagcatcatccaaccttggcttcctccccagttctgtcccagggccacccccactgagtcactgccttctgctccctccctccccttctgctgcccaccagcacccaccagccaagtcccccaggagccctaagagccgggggggacctgctggcgggcacacatacccctgtgaatgccagaggcaaagaagagcctcaagccacaggctatagctgacctggcaccctgggcacagcaggcagattcaggggaggtacagccatactgagatagaggcagggctgggccctggtttctccactccacagagaatgtgcattgtaggcttcatggaaacagagactgtatgttatccacttccgtactttcagcatccagcacagggcctggcacagaataaatgctttggggcgcctgacactgatcacactacccctgccctcctgaggctccacatctatgtatcccatggaaaccagagtcacaaatggagacagattcagagactcagcctgaaaggagacagaagaggccgagagctacaggttgcatggcccaggatggcaaaggtacagatagaaatgaggacacactgaggcctagtggggaatattggggagctgggcctggagccagccaggggtggctgaccacagcaggctttgtgggctgagcttgcaggactgagcagtgactcatggggcccatctctgtggctctcctggcagcagaatcaactcacagcagccttttccactgagatcataaaatgggaatgggcctccctcccctggcccttccccaactctccctcagcctcccatttcttgccaacatgactcaatcaaaaataaaatgggccgggcactgtggcttatgccacaaaatcccagcactttgggtggccaagtcaggcagatcacctgaggtcgggagttccagactagcttggccaacatggcaaaaccccatctctactaaaaatacaaaaactagccagatgtggtggcacatgcctgtaatcccagctacttgagaggctgaggcaagagaatcacatgaacctggaaagcaggggttccagtgaggcaagatcacaccactgcactccagcctgggtgacaaagcgagactctgtctcaaaaataaataaataaataaaaaggaggggagggctctgggcctcactgggtctagtgacaacagacccacagtcattcaccttgcacacccctcttcagtactaccccaaatactgagggcaacaaataccccagaacttccagacctctcttgcctttggcctaaataaactccaaactccttggtatgacagtcaaggccacttagaggcatcacagccttcccatctacctcccagactggcctggaaaacaaatctgattactagtctagtctcacactggctcctcttcctgaaggcccatgcccatctcccctaatcaaaatccttcctcatttgaggcctgggtgcagcatctccttcacgaagactaccccagccaagttctctcagctcaggccaccctgcccagtcacatggcaaggacccatggatgagcgcttgacgcacttgctctcctgcatccaagtcacctgcctgcctccctgtcaaacccaccatgttcatctgcccccaccactgcaacctccatctcctgggctcaagtgattctcctgcctcagcctccagagtagctgggattacaggcatgcaccaccatgcccagctagtttttgtattttcagtagagatggagtttcagcatgttggccaggctgatctcaaactcctgacctcaagggatccacccgccttggcctaccaaagtgctgggattacaaccatgagccaccgcacccggcccgacaaataatgacatttatgatcccttaccttgagccaggccctgggtagattcttcccattaaattttgtcatttaatcctgacagcagccttatgaagt

SEQ ID NO: 1243237 - DNA, 4001 bp, Homo sapiens
ggagcacaaattcgggcatcaactagcactgtcagtcccagtgcctgtacttcgggcctaaaggggtgagcttcagttcagtacctgactcccagtcctcacagctggctcaggctcagtctcccaaccccctccctcaaacctggggatgcttcgcaggtacagcaggaggcggatgagttcctggctgctgcactcagactgaagccaggctgggctgtgggcacacagaagcagcactgcccggccttggacatcccgagtccctgtggggaggaagcagtgaactcctgccgtattgggccactccacctccaccgcctctaggcccgcctggctacctggcaaggtggccataccactggccagcagctcccaacagaggtcttgggccaggaggcagtcagcaggcttagggaggccggatccactgggggcttgggaagggaaatgacttgggtctgccttggaccacctatccagagacccctacttggacccgggcttcagcctgagtagggtcagagacctccaaagtcttgacactcatctctccaggcatccccattcccttcccagacttccctagcccagccttccttacctgcctccagcagctttgatatttctgataaagggtctccaaggcccacagggtcgctgtccaatgccccagggctcaagccagatggcatcgccctgcttggacctgggtcccctaccaaccctacccctggggtgtcactctcaccctgtgccaagctgaggtgggaggacatggggcataggagactctccactccagaggggcctggcccttctgacaggactgaggagctttctactgtgcccctctgggcatcccccgactcatctgcagctgggggtaactggaatttcctggacaaggggctgccctgtagctcctcatcctgggtggccccggctggtggtcttggaggacctgggtccttaacgtgcatctgggaagcaggttcctcctcttcccaggcatccctgaaactgcacacagcaaatctccagtcggtggcatggccctgagagtctggggactcatccccattctccaggggcctttccatcacgccctcctaaaggtgggcctgctcggggccagcgggagagggctgggtctcagtgtgaaccgcgctgaagacagtcgagtgggactcagtgggcaatgcaggcgaagggcatgggccgcaggaggtgccagtcttagtgccagggcacaggaactgcaattcaggcctgggaagagggaataacgttaagggtgtccctctgtccaggtcccccgtcggacgcccgtgggcctctgctccgtgcgcgcccaccctcagcgtcctcacggccacgctctgcaggcccatgcccgtgggggcggccccgccatggcaccacgatgcctcgggttcgctctcctgccggcccccccaggccctggccttgttgcagggcctaccgcgcgcccccccgtcgcccgctggcgacactcacgcccccgggccgagccgcggggaaccgtgaagtcggacagccttcgaacagacggcggcctcgacggccactacagcgcggccgcgcggcgtcacgggacaccgcctcctggccgctgggaagggagggcagtgccgccggggcgccgcgcagcgccgcgccgccccctggaggccggaggacggagccacagcccgagcaggtctcgacggggcacagccctgccggcgcggaagacaaggtgcgggccctgcagcaacccccgcccgccgccgtcctctccgtgggcccggacagcccgccagccccgccccgccgcacccccgggccccgcagaccgcgcgcctcacccgcggcgtcgcagtgcgtgggttggggcagcgaccaacggtcggcagctccaccgtgcccactccccgggcctggcgaggacgccggaagcgctctcccgccaggaaggccgcgtgggtgagcgagggtgagtgcgcggggggcaccgcgggacggggcggggcggggtctcccaggggcttccgcggctgaatgagccgacgggaggggaaggccttctgtgtagggaagcggggtgctgcctcgccgcgggcacccagagacaggtcgcatgatcccacgtgggatggggctgccatccgggtgggagtgagaccaatgggtggagctgacccaggcctgccagagtccaccagatcctctacccctttgccatccctggcacccccttacccccttctccacaaagtccggtgcaggaggctggtgctgaggtggggttctggagccagagcccccagcccaggcctggcttctccacttacctgctgggggcgctccaggaactctgctctttgagcctcaccctcctcacctgtaaaaatggaaagtcatttttctcctggggttgccgtgaggactggggaagactccctgtgttatacgttcacccgctgccagcactcgggctgtgttggtgccctgccccctcatttcacccgcagtcagggaatcctgaactgatgaaagctacccaagtgggtagctgtgcgatttgaggtccctttagggcatgtgggcctggcccgacactccccagaatttgtgggaagattgtgggaaggtcagctctgcgaccaggagaagaccctgagccccacagtgtgcccaggcccatggtccctggggagagggggcaccgggtgcaacggcttccctggctctaaggcaggcacctctttcatgaacctggggattacaacaggcacagtgggaccaacagcaatctccccacccagcccagcccagcccccagagtccagactttcaggcagctaccgaggagccttcttcatgagcaggtctggctgccagaggggagccttggagttgtcctgctccatccctaactcccagccagacctctcttcccaccctcctggcttcaggaagcatcatccaaccttggcttcctccccagttctgtcccagggccacccccactgagtcactgccttctgctccctccctccccttctgctgcccaccagcacccaccagccaagtcccccaggagccctaagagccgggggggacctgctggcgggcacacatacccctgtgaatgccagaggcaaagaagagcctcaagccacaggctatagctgacctggcaccctgggcacagcaggcagattcaggggaggtacagccatactgagatagaggcagggctgggccctggtttctccactccacagagaatgtgcattgtaggcttcatggaaacagagactgtatgttatccacttccgtactttcagcatccagcacagggcctggcacagaataaatgctttggggcgcctgacactgatcacactacccctgccctcctgaggctccacatctatgtatcccatggaaaccagagtcacaaatggagacagattcagagactcagcctgaaaggagacagaagaggccgagagctacaggttgcatggcccaggatggcaaaggtacagatagaaatgaggacacactgaggcctagtggggaatattggggagctgggcctggagccagccaggggtggctgaccacagcaggctttgtgggctgagcttgcaggactgagcagtgactcatggggcccatctctgtggctctcctggcagcagaatcaactcacagcagccttttccactgagatcataaaatgggaatgggcctccctcccctggcccttccccaactctccctcagcctcccatttcttgccaacatgactcaatcaaaaataaaatgggccgggcactgtggcttatgccacaaaatcccagcactttgggtggccaagtcaggcagatcacctgaggtcgggagttccagactagcttggccaacatggcaaaaccccatctctactaaaaatacaaaaactagccagatgtggtggcacatgc

SEQ ID NO: 1243238 - DNA, 4001 bp, Homo sapiens
acggcccctggggctgcttcctgcaaggaacctgagctcagcactatccccaactctacagaaaagggcatggtggctcacgcctgtaattgcggcactctgggaggcgaggcgggaggatcacctgagttcaggagttcgagatcagcctgggcaacacatggtgaaaccccctctctactaaaaaatacaaaaatcagctgggcatggtggcaggtgcctgtaatctcagctaattgggaggctgaggcaggaggatcacttgaatcggggagatagagtttgcagtgagccaagattgcgccactgcactccagcctgggcgacaaaggcaagactccgtctcaaaaaaaaaaaaaaagaaaagaaaaggaatgaggggagctacaatcctgtactcacttgtagttggctgagcccagagaagagggaagaacttggagcacaaattcgggcatcaactagcactgtcagtcccagtgcctgtacttcgggcctaaaggggtgagcttcagttcagtacctgactcccagtcctcacagctggctcaggctcagtctcccaaccccctccctcaaacctggggatgcttcgcaggtacagcaggaggcggatgagttcctggctgctgcactcagactgaagccaggctgggctgtgggcacacagaagcagcactgcccggccttggacatcccgagtccctgtggggaggaagcagtgaactcctgccgtattgggccactccacctccaccgcctctaggcccgcctggctacctggcaaggtggccataccactggccagcagctcccaacagaggtcttgggccaggaggcagtcagcaggcttagggaggccggatccactgggggcttgggaagggaaatgacttgggtctgccttggaccacctatccagagacccctacttggacccgggcttcagcctgagtagggtcagagacctccaaagtcttgacactcatctctccaggcatccccattcccttcccagacttccctagcccagccttccttacctgcctccagcagctttgatatttctgataaagggtctccaaggcccacagggtcgctgtccaatgccccagggctcaagccagatggcatcgccctgcttggacctgggtcccctaccaaccctacccctggggtgtcactctcaccctgtgccaagctgaggtgggaggacatggggcataggagactctccactccagaggggcctggcccttctgacaggactgaggagctttctactgtgcccctctgggcatcccccgactcatctgcagctgggggtaactggaatttcctggacaaggggctgccctgtagctcctcatcctgggtggccccggctggtggtcttggaggacctgggtccttaacgtgcatctgggaagcaggttcctcctcttcccaggcatccctgaaactgcacacagcaaatctccagtcggtggcatggccctgagagtctggggactcatccccattctccaggggcctttccatcacgccctcctaaaggtgggcctgctcggggccagcgggagagggctgggtctcagtgtgaaccgcgctgaagacagtcgagtgggactcagtgggcaatgcaggcgaagggcatgggccgcaggaggtgccagtcttagtgccagggcacaggaactgcaattcaggcctgggaagagggaataacgttaagggtgtccctctgtccaggtcccccgtcggacgcccgtgggcctctgctccgtgcgcgcccaccctcagcgtcctcacggccacgctctgcaggcccatgcccgtgggggcggccccgccatggcaccacgatgcctcgggttcgctctcctgccggcccccccaggccctggccttgttgcagggcctaccgcgcgcccccccgtcgcccgctggcgacactcacgcccccgggccgagccgcggggaaccgtgaagtcggacagccttcgaacagacggcggcctcgacggccactacagcgcggccgcgcggcgtcacgggacaccgcctcctggccgctgggaagggagggcagtgccgccggggcgccgcgcagcgccgcgccgccccctggaggccggaggacggagccacagcccgagcaggtctcgacggggcacagccctgccggcgcggaagacaaggtgcgggccctgcagcaacccccgcccgccgccgtcctctccgtgggcccggacagcccgccagccccgccccgccgcacccccgggccccgcagaccgcgcgcctcacccgcggcgtcgcagtgcgtgggttggggcagcgaccaacggtcggcagctccaccgtgcccactccccgggcctggcgaggacgccggaagcgctctcccgccaggaaggccgcgtgggtgagcgagggtgagtgcgcggggggcaccgcgggacggggcggggcggggtctcccaggggcttccgcggctgaatgagccgacgggaggggaaggccttctgtgtagggaagcggggtgctgcctcgccgcgggcacccagagacaggtcgcatgatcccacgtgggatggggctgccatccgggtgggagtgagaccaatgggtggagctgacccaggcctgccagagtccaccagatcctctacccctttgccatccctggcacccccttacccccttctccacaaagtccggtgcaggaggctggtgctgaggtggggttctggagccagagcccccagcccaggcctggcttctccacttacctgctgggggcgctccaggaactctgctctttgagcctcaccctcctcacctgtaaaaatggaaagtcatttttctcctggggttgccgtgaggactggggaagactccctgtgttatacgttcacccgctgccagcactcgggctgtgttggtgccctgccccctcatttcacccgcagtcagggaatcctgaactgatgaaagctacccaagtgggtagctgtgcgatttgaggtccctttagggcatgtgggcctggcccgacactccccagaatttgtgggaagattgtgggaaggtcagctctgcgaccaggagaagaccctgagccccacagtgtgcccaggcccatggtccctggggagagggggcaccgggtgcaacggcttccctggctctaaggcaggcacctctttcatgaacctggggattacaacaggcacagtgggaccaacagcaatctccccacccagcccagcccagcccccagagtccagactttcaggcagctaccgaggagccttcttcatgagcaggtctggctgccagaggggagccttggagttgtcctgctccatccctaactcccagccagacctctcttcccaccctcctggcttcaggaagcatcatccaaccttggcttcctccccagttctgtcccagggccacccccactgagtcactgccttctgctccctccctccccttctgctgcccaccagcacccaccagccaagtcccccaggagccctaagagccgggggggacctgctggcgggcacacatacccctgtgaatgccagaggcaaagaagagcctcaagccacaggctatagctgacctggcaccctgggcacagcaggcagattcaggggaggtacagccatactgagatagaggcagggctgggccctggtttctccactccacagagaatgtgcattgtaggcttcatggaaacagagactgtatgttatccacttccgtactttcagcatccagcacagggcctggcacagaataaatgctttggggcgcctgacactgatcacactacccctgccctcctgaggctccacatctatgtatcccatggaaaccagagtcacaaatggagacagattcagagactcagcctgaaaggagacagaagaggccgagagctacaggttgcatggcccaggatggcaaaggtacagat

SEQ ID NO: 1243239 - DNA, 4001 bp, Homo sapiens
tacacggcccctggggctgcttcctgcaaggaacctgagctcagcactatccccaactctacagaaaagggcatggtggctcacgcctgtaattgcggcactctgggaggcgaggcgggaggatcacctgagttcaggagttcgagatcagcctgggcaacacatggtgaaaccccctctctactaaaaaatacaaaaatcagctgggcatggtggcaggtgcctgtaatctcagctaattgggaggctgaggcaggaggatcacttgaatcggggagatagagtttgcagtgagccaagattgcgccactgcactccagcctgggcgacaaaggcaagactccgtctcaaaaaaaaaaaaaaagaaaagaaaaggaatgaggggagctacaatcctgtactcacttgtagttggctgagcccagagaagagggaagaacttggagcacaaattcgggcatcaactagcactgtcagtcccagtgcctgtacttcgggcctaaaggggtgagcttcagttcagtacctgactcccagtcctcacagctggctcaggctcagtctcccaaccccctccctcaaacctggggatgcttcgcaggtacagcaggaggcggatgagttcctggctgctgcactcagactgaagccaggctgggctgtgggcacacagaagcagcactgcccggccttggacatcccgagtccctgtggggaggaagcagtgaactcctgccgtattgggccactccacctccaccgcctctaggcccgcctggctacctggcaaggtggccataccactggccagcagctcccaacagaggtcttgggccaggaggcagtcagcaggcttagggaggccggatccactgggggcttgggaagggaaatgacttgggtctgccttggaccacctatccagagacccctacttggacccgggcttcagcctgagtagggtcagagacctccaaagtcttgacactcatctctccaggcatccccattcccttcccagacttccctagcccagccttccttacctgcctccagcagctttgatatttctgataaagggtctccaaggcccacagggtcgctgtccaatgccccagggctcaagccagatggcatcgccctgcttggacctgggtcccctaccaaccctacccctggggtgtcactctcaccctgtgccaagctgaggtgggaggacatggggcataggagactctccactccagaggggcctggcccttctgacaggactgaggagctttctactgtgcccctctgggcatcccccgactcatctgcagctgggggtaactggaatttcctggacaaggggctgccctgtagctcctcatcctgggtggccccggctggtggtcttggaggacctgggtccttaacgtgcatctgggaagcaggttcctcctcttcccaggcatccctgaaactgcacacagcaaatctccagtcggtggcatggccctgagagtctggggactcatccccattctccaggggcctttccatcacgccctcctaaaggtgggcctgctcggggccagcgggagagggctgggtctcagtgtgaaccgcgctgaagacagtcgagtgggactcagtgggcaatgcaggcgaagggcatgggccgcaggaggtgccagtcttagtgccagggcacaggaactgcaattcaggcctgggaagagggaataacgttaagggtgtccctctgtccaggtcccccgtcggacgcccgtgggcctctgctccgtgcgcgcccaccctcagcgtcctcacggccacgctctgcaggcccatgcccgtgggggcggccccgccatggcaccacgatgcctcgggttcgctctcctgccggcccccccaggccctggccttgttgcagggcctaccgcgcgcccccccgtcgcccgctggcgacactcacgcccccgggccgagccgcggggaaccgtgaagtcggacagccttcgaacagacggcggcctcgacggccactacagcgcggccgcgcggcgtcacgggacaccgcctcctggccgctgggaagggagggcagtgccgccggggcgccgcgcagcgccgcgccgccccctggaggccggaggacggagccacagcccgagcaggtctcgacggggcacagccctgccggcgcggaagacaaggtgcgggccctgcagcaacccccgcccgccgccgtcctctccgtgggcccggacagcccgccagccccgccccgccgcacccccgggccccgcagaccgcgcgcctcacccgcggcgtcgcagtgcgtgggttggggcagcgaccaacggtcggcagctccaccgtgcccactccccgggcctggcgaggacgccggaagcgctctcccgccaggaaggccgcgtgggtgagcgagggtgagtgcgcggggggcaccgcgggacggggcggggcggggtctcccaggggcttccgcggctgaatgagccgacgggaggggaaggccttctgtgtagggaagcggggtgctgcctcgccgcgggcacccagagacaggtcgcatgatcccacgtgggatggggctgccatccgggtgggagtgagaccaatgggtggagctgacccaggcctgccagagtccaccagatcctctacccctttgccatccctggcacccccttacccccttctccacaaagtccggtgcaggaggctggtgctgaggtggggttctggagccagagcccccagcccaggcctggcttctccacttacctgctgggggcgctccaggaactctgctctttgagcctcaccctcctcacctgtaaaaatggaaagtcatttttctcctggggttgccgtgaggactggggaagactccctgtgttatacgttcacccgctgccagcactcgggctgtgttggtgccctgccccctcatttcacccgcagtcagggaatcctgaactgatgaaagctacccaagtgggtagctgtgcgatttgaggtccctttagggcatgtgggcctggcccgacactccccagaatttgtgggaagattgtgggaaggtcagctctgcgaccaggagaagaccctgagccccacagtgtgcccaggcccatggtccctggggagagggggcaccgggtgcaacggcttccctggctctaaggcaggcacctctttcatgaacctggggattacaacaggcacagtgggaccaacagcaatctccccacccagcccagcccagcccccagagtccagactttcaggcagctaccgaggagccttcttcatgagcaggtctggctgccagaggggagccttggagttgtcctgctccatccctaactcccagccagacctctcttcccaccctcctggcttcaggaagcatcatccaaccttggcttcctccccagttctgtcccagggccacccccactgagtcactgccttctgctccctccctccccttctgctgcccaccagcacccaccagccaagtcccccaggagccctaagagccgggggggacctgctggcgggcacacatacccctgtgaatgccagaggcaaagaagagcctcaagccacaggctatagctgacctggcaccctgggcacagcaggcagattcaggggaggtacagccatactgagatagaggcagggctgggccctggtttctccactccacagagaatgtgcattgtaggcttcatggaaacagagactgtatgttatccacttccgtactttcagcatccagcacagggcctggcacagaataaatgctttggggcgcctgacactgatcacactacccctgccctcctgaggctccacatctatgtatcccatggaaaccagagtcacaaatggagacagattcagagactcagcctgaaaggagacagaagaggccgagagctacaggttgcatggcccaggatggcaaaggtaca

SEQ ID NO: 1243240 - DNA, 4001 bp, Homo sapiens
tgggaagggagggcagtgccgccggggcgccgcgcagcgccgcgccgccccctggaggccggaggacggagccacagcccgagcaggtctcgacggggcacagccctgccggcgcggaagacaaggtgcgggccctgcagcaacccccgcccgccgccgtcctctccgtgggcccggacagcccgccagccccgccccgccgcacccccgggccccgcagaccgcgcgcctcacccgcggcgtcgcagtgcgtgggttggggcagcgaccaacggtcggcagctccaccgtgcccactccccgggcctggcgaggacgccggaagcgctctcccgccaggaaggccgcgtgggtgagcgagggtgagtgcgcggggggcaccgcgggacggggcggggcggggtctcccaggggcttccgcggctgaatgagccgacgggaggggaaggccttctgtgtagggaagcggggtgctgcctcgccgcgggcacccagagacaggtcgcatgatcccacgtgggatggggctgccatccgggtgggagtgagaccaatgggtggagctgacccaggcctgccagagtccaccagatcctctacccctttgccatccctggcacccccttacccccttctccacaaagtccggtgcaggaggctggtgctgaggtggggttctggagccagagcccccagcccaggcctggcttctccacttacctgctgggggcgctccaggaactctgctctttgagcctcaccctcctcacctgtaaaaatggaaagtcatttttctcctggggttgccgtgaggactggggaagactccctgtgttatacgttcacccgctgccagcactcgggctgtgttggtgccctgccccctcatttcacccgcagtcagggaatcctgaactgatgaaagctacccaagtgggtagctgtgcgatttgaggtccctttagggcatgtgggcctggcccgacactccccagaatttgtgggaagattgtgggaaggtcagctctgcgaccaggagaagaccctgagccccacagtgtgcccaggcccatggtccctggggagagggggcaccgggtgcaacggcttccctggctctaaggcaggcacctctttcatgaacctggggattacaacaggcacagtgggaccaacagcaatctccccacccagcccagcccagcccccagagtccagactttcaggcagctaccgaggagccttcttcatgagcaggtctggctgccagaggggagccttggagttgtcctgctccatccctaactcccagccagacctctcttcccaccctcctggcttcaggaagcatcatccaaccttggcttcctccccagttctgtcccagggccacccccactgagtcactgccttctgctccctccctccccttctgctgcccaccagcacccaccagccaagtcccccaggagccctaagagccgggggggacctgctggcgggcacacatacccctgtgaatgccagaggcaaagaagagcctcaagccacaggctatagctgacctggcaccctgggcacagcaggcagattcaggggaggtacagccatactgagatagaggcagggctgggccctggtttctccactccacagagaatgtgcattgtaggcttcatggaaacagagactgtatgttatccacttccgtactttcagcatccagcacagggcctggcacagaataaatgctttggggcgcctgacactgatcacactacccctgccctcctgaggctccacatctatgtatcccatggaaaccagagtcacaaatggagacagattcagagactcagcctgaaaggagacagaagaggccgagagctacaggttgcatggcccaggatggcaaaggtacagatagaaatgaggacacactgaggcctagtggggaatattggggagctgggcctggagccagccaggggtggctgaccacagcaggctttgtgggctgagcttgcaggactgagcagtgactcatggggcccatctctgtggctctcctggcagcagaatcaactcacagcagccttttccactgagatcataaaatgggaatgggcctccctcccctggcccttccccaactctccctcagcctcccatttcttgccaacatgactcaatcaaaaataaaatgggccgggcactgtggcttatgccacaaaatcccagcactttgggtggccaagtcaggcagatcacctgaggtcgggagttccagactagcttggccaacatggcaaaaccccatctctactaaaaatacaaaaactagccagatgtggtggcacatgcctgtaatcccagctacttgagaggctgaggcaagagaatcacatgaacctggaaagcaggggttccagtgaggcaagatcacaccactgcactccagcctgggtgacaaagcgagactctgtctcaaaaataaataaataaataaaaaggaggggagggctctgggcctcactgggtctagtgacaacagacccacagtcattcaccttgcacacccctcttcagtactaccccaaatactgagggcaacaaataccccagaacttccagacctctcttgcctttggcctaaataaactccaaactccttggtatgacagtcaaggccacttagaggcatcacagccttcccatctacctcccagactggcctggaaaacaaatctgattactagtctagtctcacactggctcctcttcctgaaggcccatgcccatctcccctaatcaaaatccttcctcatttgaggcctgggtgcagcatctccttcacgaagactaccccagccaagttctctcagctcaggccaccctgcccagtcacatggcaaggacccatggatgagcgcttgacgcacttgctctcctgcatccaagtcacctgcctgcctccctgtcaaacccaccatgttcatctgcccccaccactgcaacctccatctcctgggctcaagtgattctcctgcctcagcctccagagtagctgggattacaggcatgcaccaccatgcccagctagtttttgtattttcagtagagatggagtttcagcatgttggccaggctgatctcaaactcctgacctcaagggatccacccgccttggcctaccaaagtgctgggattacaaccatgagccaccgcacccggcccgacaaataatgacatttatgatcccttaccttgagccaggccctgggtagattcttcccattaaattttgtcatttaatcctgacagcagccttatgaagtgagtatgattatctcatttgagagatgaggacactgaggctcagagagagcatgtaacacacccagaatgacacttgtgagtgacagctggggctgttgactctaaactgttgactacggccgggcgcagtggctcatgcctgtaatcccagcactttgggaggccgaggcgggtggatcacctgaggtcagaagttcgagaccagcctggccaacatagcaaaaccctgtctctactaaaaatacaaaaaattagccgggcatggtggtgggcacctgtaattccaactacttgggaggctgaagcaggagaattgcttgaacctgggaggcagaggttatgagccaagatcataccattgcactccagcctgagtgacctgactgagactgtctcaaaaagagtaaaaaataaaaattaaaaaaataaactgttgacgactagttaactacgaggccttatcactgtggcctgtaaacaacctaagggcaaagcccaagtcactcttccttctcatcacaccttccctgcgcataatgcagaaaaagtaaaggtaagttggctaaaagtataaccttccaagtgtgtcaaaagtccttcagatccagacagccagaaagtaggttagttattacctagggctgaggagggccagggatgag

SEQ ID NO: 1243241 - DNA, 4001 bp, Homo sapiens
tgccagcctctgacatctgtcaatgcagaaggctagttaaggtttgaccatccagaaccagggccatctgatcccacaagcctctgctccttgtatgtagcaaggcttgcccaggaatcttcctcccatgctgacaccagggaggtgcctccagtgacacttctcacccctccttttagaaaggggctatgctttgaaacaggaactgacagggatagtaaaactccaatgccttcaaggatcaagcaagttaacctccaagacttggcaagtctgtgaagaatagggaggagtagagactgtggcaaagaagtctgaaggggacagctgttttccagcccagcaaagggctgccctaagaaaatgctgtcctcgtattactgaagctttcacctgtttaaaaggagttctgaatcaaactttttgttcaatcaaaccttccaatttaaaaaataaaaacaaattcaaattctttgtaaaaaaaaaatattgcattggggcacaaaaaaataatgcatctgtaggcaagatactgacttgtgggttgtctccttcctttctcccagcctcctccaaattccagcctcttgtagtgatgtcaagcacccctgcaggctcagcaactcacctattttcacctccagatcttcattcaggaaaaggttgcccagcttgaggtctcgatgaataactcggtttcggtgcaggtactggcagccaagcacaatttgccgtaggtagtatcgggcctcaggctcagtcagggctttcctcctcttgtgcagctccaggagagactgtgggtgggaaggagagggcaggagggatggggaggtggattgaggccggtggggaagggagagggttaccaggcaaaggaagcacaggactggactctggactcccaagggatgaaagaggggtcttggtgggtttctctccttccctatgcccccaccccattccttctccagcacagcggcatctggaccctgccttaacactgtccacaaccattcgcagcaccccttctcctactagcttccccccttacctgggggtcctctctcagccccactccggaagctccgagtccccagcaccagatccctttcctgactcgtatctcccccggaaggcccgaagtctggctccaactacccccccactgacccagctccaccccagaagctcccagggcgcggcatcactaacctgggactcctccctgggtactccagggccctagcgtccattaccagcacccctccccccagcacctcgcgtccagaagctgacttccctatcagcaacatgactcagactccacttcactggaaccccctcctctagcagctcccagagccaagaagcccttaccaaagacactttccatacgtaagcgggaggctcccagcacccttctctagcagctccaagtcccaggctctcccttgctgggtactctttccagcagctccaggtctgggcgctccaactgccccgcaggcagttccagttccccagcagcgacactcaccctccggcggcagagctccaacaccacgaacacgaagtcgttgtcctcgaaaaagccgtggaatcctacgacgtgctggtgggcgaggctgcggtgaatggatatttccatggacatcttctccctctggtgcggcttgagcagcagagacttaggcacaatcttgcccgcgaacacctccttggtgtccgcgtccgagatctcgaagcacttggcaaagccgcccttgcccaaaaagcggccccgcacatagcgccgccggctgcgtgggtccactaggacctccgggatctctttcgccggtggagccgccgccggagctccgggagctgcaactccggggaccccggctttcccagggtcggccggtgcccgtgccagcttccctgcagtcactgcagcactcatgctcccgaagctgcgctgcagacctcgatccgagcagagcctccgcaccgctccgctcctccccgaattcaaacgcggcgctgggaacgttacaaaagcctgcgcgccactgattggccgcggggatttaaaatccaaacccgcccgccgcgcggcaccatgggagcgccctgcgcagcagcagcctttaaacccggacccagccggggaaaacctgattgacacggacgcccgaacacgtgggatagcctgggaaaccaaacccggcgtggatgcggagacccagccccgagagaggaggaattccttcggggtttctccctttctcgggcgtccgggaaagctcctgcggttcacttgcgcctcctccaggaagcttttacttaaatcttcctctacctcggggccagggaacagtagcatcgccatcacctgagagcttgttagaaccgcaaaggcaaacgttcaggccctaccccagacctcccgagtcagtgtccgcctctcaacaagactgctcaggtgattcctacacatcctgaagttggagaagcacagtaccagagccccccatgatgcaacgaagctgtctggcctcctcgctactgaatttcccagggcctaaaatagtggacactcagtttcttggtcagagggagggaaggttggaagaatgcctagcaaactggcaggtcatagccaaatgtgtcttgcggggttttgtttggcctccccccacgccttttttttgtgtgtgtgacggaatcttgctctgtcgcccaggctggagtgcagtggcacgatctcagctcactgcaacctctgcttcccgggttcaagcaatcctcccgcctcggcctccctagcagctggaattacaagcatgcaccaccatgcccggctaatttttgtaattttagtagagaagaggtttcaccatgttggccaggctggtcttgaactcctgacctcaagtgatctgcccctcggcctcccaaatgctgggattacaggcgtgagccaccgcgccccgccattgtaaaacatttacagcatttaaaagaggagctcataaaagttgggatttgtggcctttcctgaaaaaaatcagctctagctacttactctgtgcctacatgctttcagtttgccacagtttacagctacacccgtttgttctgtaggtacttgagtggcaaccctggaacagtaaaatacccacgttaaaagctctttctctgtgcctccttagcaccctctgatccttcatagagcccagcaaaaatcaaccatactataagcatccttcacctgccttgcagctaagctgaaggacaatgaggacaatgatgccgtcctttctaccccatgtcccaagctcccagagcagtgcttggtaaaaaaaaaagggtacttactaaaatgttggctgaataaaaggaagactttgaaaaattaagttattttgtacccctatagtgtgaattctttttattgaaatttaatacacttacagaaaaaaatgtacatattataattgttcatagagctcagtgaattttcacaaactgaacaaatctgtaaaccacacccagattgagaaagggaacatgacaaacaccctgcaagtctcccttgtgccctgtgctggggggtgccaacaccaccacctcctagtctgatgatgtactaggagattcacagactcagcctgtagtcatactcatggctatgttttactacagcgaaaggctaggaagcaaaatcagcaaaggaaaaaagcgcatggacaaagtccagggaaaccaggtgtaagcctcccacagtcctctcccagcagagtcacataggacacaattcctccagcaatcagttgtgacaacccatgtgcaatgttgtatacaagggaagctcattacagactcagtgttcagggttctcattgggagctgctcacctcatcctctgcctaacacatatgaaaatctgactcccagaaggaaagcagatgttgggcataacccacattgtttgtacgaacagtttaggcaca

SEQ ID NO: 1243242 - DNA, 4001 bp, Homo sapiens
ttctgtccacaccagaaacaagtgcttcaactccagcaccaccaacctgttggctactccctgcaaattaattcaactttctcatcaccacatcttggctcacactgttccctgcccttggaacaccctttccctgcgtctgcctcagatttcagtgaagtctctgctcaaaaaccacctcctccaacaagccttcctggtcgtgaaattgctctccttctcctctgccctttcgcaccacttctcacacccacctggctctcccctgggcagccaggcagctgctcatggctgtgcccctcacaaccagcccagagcagagcattctagcggtggcggggtcagtggctctccccatctgcagaattaaatgattccaggaactagacctcttccctcagaagacagaatcttctccccttctcccccaccccccaaaagagaaacaaacaaaaaactctgggagaactgttaaaaatgaatttctggctgtacttcctgagattcaaattccgattgcacatttttttccgggggtggagtccaataatctaaattttaaacaaacccgccaggagattcagaggttggggagggggcccacagagatctgagaaatcctgaaatgagatagcactgacccaggtagaggtgggcccgcacctggagaggtcagggaagggagactggacctcagcccagggtctggcaccaaagcaaccaccctgccctctagcttgggcctcgcagcagcgctagcacccagcaataggagacaatgggaaatgtccactcgctggattgctaagaaatacaggtcctggcccaactccaattccacctgagtcctctgaaaatgtatcaggccctcacccacccagggcacccacccagcttccagaccctcacgaaagggtggcagaggaagaagctaacatccgggcctgtggctggtgtgggagtggaggatgttcccatgggtccgcctcagttggggtctgtacaggggtctgggagagagtaggagtcttgcccctggctacccacaaacccctccctccagcgatatctcggtcccgtggggctggctaaaccggctgaaacctggcgggtcacccagagaaagctagaagagcccggctcccgcgcgggcgcccacagggtagtgcctgagtgtgcgtgttggggagtcggatgtgccctctagattagatgaggaatgttcatgggtgcggccacccggagccgctgggagcgggacagaaggtggtcagagagtggactttgcctcagactgggttccctagagggctgggggcactgtccgggcagaaagaggggtgaaaaagagagaggagggaagggagggctgggaagggttggcgggttgtgcgcagtgactgtggctccggtgggggcttctgtggccgctggtaaccaccttggagggggcacgatggggcacgggcagtgggcactctgtacacggtgcagggtgctcacgctcgcagcgacggccacggggtagtgtcgtggtgagagggatgcagggcgatcttgggggcgtccgtgcgggaagcgccctaggggtacgcgcagcgcgtcggtgacagtgtgagcccgggtggggagcgcaaggttcgcgaaaaatgaacgcagcgccggagtccctcacccatcctggccggaccgggagcccccggccaaccccgtgggcccgcgcgtgctctcaccagctgcagcagcatgagcgccccgaggcgggagcgcacgaagcccaggtccgggcgcagcgccgacaccgaggcttcggcgccctgcgcaggactgctggtccgcgtgctaactttcgacgggaactcggccatggcggctccgcttgcctcccgaggtcgctacggccgccgtcgccgcccctccagcggtgggtgccggctcccgcgccgcttttcccccaggctccggatccctgtgtggctccaggcgctgcaggaggcgtcggggctgggagcctggggcgccaggtgcggccgagatcccggctccgcccccgccgccggggccgcccccttaaccctttgctcgccgccgccgccccagccgcgaccggttcgtgggcagccgcgtccactccccggaccagtaaacaaccccgggtccgtgaatcggctccgccagcaccagcctagaccgcttcgccggcctcccccggggcaagccgcccgctgggaatttcccggctctcgcccaggccgtggtagcttccgcgcctagggataaacttgtggtagctcgcgggggacaccgctctcccaggcgctttctacgcgctgtgcaccctcggcctaggccccggcgcagcgactcttgaagagtcccgggagaaggctggatgcggtggctcctgcctctgatcgcagcactttgggaggctaaggtgaaaggataatttcaggccaagagttcgagaccagcctgggtaacacagtgagacgccccccctccccccgtctgtattttatagaaaagaaagtaaagaagaatcctgggagacccagcgcggggaaggggagggtctgggtaagcggtgggtaagcggtagaagggggaggtccttttctgcctattaatgctgttttcacttctgaacatattttatataacttagatgatcgcggagcctcagtttcctcgtctgtcatatagatacgaaggaaacctgcctcacagagcgttgtagggaataaatgaaatattccccagaaagctcctgacagcgtgagggaggaggggtcactcagaagatgggaggtcatatacagtttcattgccacacatgcaccctaaaatacttacacacacacacacacctcttgagcctagaggtttgcacagataggtcatcatgcattcatcaaccaatgtttgctgaacacctactacatgccaggccctgtggatacagcaggaaacgaagtagacaaggccttcttggctcccacattttttttttcccaaatacccacttaaaaagagagccacttaaaaaattgtttttaactgacatgtaatattaggttggtgcaaaagttatacggtttttgcatataaaagtatagcaaaaaccgcaattactttttcggcaacctataattgtacctaaatatggggtaccatgtgatgttttggtacctgtgtacgttgtgtaaaaaaatcaaatcaaggtacttagcatatccatcacctcatacatttatggcttctttggggtgagaacattcaaaatccccacttctagctaccatattttgaaatatacaatattagggccaggcgctgtggctcacgcctataatcccagcactttgggaggccaaggcaggcagatcaccagaggtcatgagtttgagaccagcctggtcaacatggcaaaaccctgtctctacaaaaatacaaaaaaattagccaggcatgatggtgggtgcctgtagtcccagctacacaggaggctgagacaggagaatcactcgaacccagggaggcagaggttgcagtgagctgaaatcatgccactgcactccagcctgggtgacagagccagactccatctaaaaacaaaaacaaaaaaagaaaagaaatgtacaatattggtatttttttctttttacttttatttattttgaggcgaggtcccactctgtcacccaggctggagggcagtggcatgatcatagcctactgcagcctccaacccctaggctcaagtgatcttctcacctcagcctccctagtagctaggactacaggtgcacgccaccatgcccaactaatttttttttttttttgagatggagtcttgctggaattacaggctcgagccaccatgcccagctaattttttgtatctgtaatagagactgggtttcaccatgttggccaggctggtcttgtgatccgcccaccttggcctcccaaagggctgggattacaggcatcagcca

SEQ ID NO: 1243243 - DNA, 4001 bp, Homo sapiens
tgagacagggtctttgtcgccccggctggaatgcactggtgtgatcatggctcactgcagcttcaacctcccaggctcaagtgatccacttgcctcagcctcctgagtggctgggaccaaaagagcgtgccaccacacctggctaattttttttattttttgtagagacaggggtcttaccatgttgcccaggctggtcttaaactcttgggctcaagtgatcctcctgcctcggcctcccaaagtgctgggattacaggtttgagtcactgcgcctggccccataaacacagtttgaccaaaatattaaactaatcagacactccattttcatatcattccagataaagagagaatgttagcaacaatagttaatatcgattaagtgctttctacatgcactacctttgctaatcctcataccaagtctttggaataggtgatcatcattcatattttctagataaggcaaaggaaacttagagtaggtgatcacaattcatattttctagataaggcaaaggaaacttaaaagtaggaaacaaactcagtatcatactgctggtagatatggacccagacccacccagctcgagtctgggctcttaaacacgatgctctgctgcccacctctgtccatgatattttgtgatgcttattactggaattttgaatcataaaacatgaaaaaagtcccttgtaatgaatattcaactccatgcatgtagaggagttaggagccttacctcatctttcatttccttggcagctctcaattctcctttaacctttagtattttctgagctttgttataaacctgaaaaagtccaagtatttaagatggaaaaagtataaatgagcctctgccctttaaagattttcccagctggatctatgccctcagcaagaggtttggaaaattttcctgaactgttagcaatacccacttgcttacccatctgtttgtgtttttaaaagggtgttaaaacctccagatggcaggaccatggttttacatcttttccagaaaaccactacttggtgaaccaaacagtttctgaatttacccttcttggaaagcaaaaagtctgaatcgagtttactttttagatttctatgtactctatggctcagatatagctaatattatgtacttattatgaaccagacatgatgtgcatgacctaacttcattctcacatgaaccctgggaggcagggactactactatcctcatttaaagataaggaaactgaggcccagagaggctaagtgacttacccagggtcacagaggctctcttactactctatgaggagcttccattaattttgtaactattcatatgaaatatctgatgatatggtgtttttgaagcatcagcttgccataatgttgatgctcataaagttaggaaacatgtgaagtgctgagacttatctagctagaaagcctcccaggaaaccaaagatctttgcacatgtatgtgcatgtaagtacaggatgatgcatttgaggtcataatgcactgagcttattaaaatcatctcattcattctgtttttaaccctaagaatagaggaatttccaccaggaacttacctgcagaatagttcaaggaatgagaagctatcaaaatactcatcctttgtaacaaaccacatcccctatccctaatataagccaagaggaagaaagaatgttggtgatatgtggaatctggaatgttttatggagctgaattctgatttcctgcattgagtaccctctgaagtcttcatgcacagaggtgcatcatggaaatggaggtgtggctcaggctcacctggtggggacaggctaggtgatggtgtagtaacaaacaacccccaagtctcagtggcttacgaccgtgaaggtttattttttactcatgctacatgtcctttatgagtcagctggggctctgctccacattgtcctcaatatcctcgtagtcctcagctggtgaacttctattatctagtatgttgcctgttgccatggtagcagaaagggaacttggtgaatcacctactggttcttaaagcggaagtgaaacactttgcttctgctcacatttcattagccaaaacaagtcacatggccatgcctaacttcttcctttacctcctcaaagaaatataggcatatgtcagagagattgcgggtttggtttctgaccaccaaaataaagcgaatatcacaatgagacaagtcacacaaatttcttggtttctcagtgcatagaaaacctatgattacactatactgtggtctactaagcgtgcaatagtattatgtctaagaaaacaaggtgcataacttaattaaaaatactttgttgctaaaaaaatgctgatgtggacataagggagcacatgctgttggaaaaatggcgccaatagacttgcttgatgcaggattgctacaaaccttcaatttgttaaaaatgcaatatctgtgaagcacagtaaagtgaagagcagtaacacgaggtatgcctgtactggcgaactcacaaatgacttccacactagtcaagcaagattaaaaatagcgtggcataaaagaacactaaacaggattctaggccaccaagcttctaaacctggttcagcacctcactggaggagtggcctttgcaaaggccttcatatctctgaggcttcatttctgcttctgtaagctaggaagctataataaatggcctttagaagtctttcctagctttaaagttcactgattcagtgctctaccacgatggacacctttctttaggaggaactatgaactcacccaagtatcatacaaaaagttgtaatggaacaaatgtatccttgagaatcatacttctttgcaggcaagcccactggatagtcaggagatgattctgaaatcaaatgaaatcttgtccaaaagacagagaaatgattttctagattgtgatggtttcatccgctatggagttacacagctgtagttgcaagagccaagagcatttcgaaggaaaagtagaaggcataggttctaacatttgcatgaaaatatattgaaatttactaagtaaggtaagtaggaagaaaaaaagagagctggagtttgttccatgaaggagatgtcagaatcttcagtcattaacaatagcagcaggcagtttggaagggcttatgatgaaaaaactggaagtgttatatgataagtttttgatacatttgacagtaatgtttgccagatggatagggaagagtgttttgggggagccccacaggctttacgaaatgccatgtgaaccttcacagtgctgtctgactgaggagtatggctggacagatattttgtggaggaagggctcatcccagaggcagggactctctaccagatccccggctactgactctctgaagccaggactttgctcatgtctccctcttcttgaacccttgttcttacatattctgttctgcctcttgcgtctctgttgagaccttcatttcttcatgccttgtctactgccatctgcccaggcaactccttttttgtattcaaaactcctgccatctgcttttcaaagtaggacttctcttggtgacagctgtgcctaaagaaatgattgtagtgaaaacaaaaacttggtcagagcttctagtgatgttttgtgccttccctcagtctactatcagagcaccttgcagattcccaagaaacacctaacaccacacctcaaatgggtgactaaggtagcaagtatcaagtcaggtgtgcaaaaagagaaagtaactctttctattactcagtgtttttgtttagccccattttcaccaaatggcagaaaacacaatcttagttatttctgagaaagcaccacgactttcaggttaaaaatgaatcagttcatgattccctcacagttcatgattctctcaacctctttaaggcgtctccagagtgtgcttaagattttgaggtcccagtttggatc

SEQ ID NO: 1243244 - DNA, 4001 bp, Homo sapiens
aaggtgctccaaagatataaattaaatgaagaaagagccttctagaaaatccatacgagatccttgttccccacagaactggtatgaagttctgtatggctccagtaatgcagcaggaaaggagtggactgcctgtttcagaatctgctcacctcttggtaggaggtctgttaaaaagcatatggtacatgggacaatcctttactcatcaaaaaagtccccttaaatcctttctggaacaaggtagggcatacataaacatagtttgctgctgttgttgttgtttgagacagggtctttgtcgccccggctggaatgcactggtgtgatcatggctcactgcagcttcaacctcccaggctcaagtgatccacttgcctcagcctcctgagtggctgggaccaaaagagcgtgccaccacacctggctaattttttttattttttgtagagacaggggtcttaccatgttgcccaggctggtcttaaactcttgggctcaagtgatcctcctgcctcggcctcccaaagtgctgggattacaggtttgagtcactgcgcctggccccataaacacagtttgaccaaaatattaaactaatcagacactccattttcatatcattccagataaagagagaatgttagcaacaatagttaatatcgattaagtgctttctacatgcactacctttgctaatcctcataccaagtctttggaataggtgatcatcattcatattttctagataaggcaaaggaaacttagagtaggtgatcacaattcatattttctagataaggcaaaggaaacttaaaagtaggaaacaaactcagtatcatactgctggtagatatggacccagacccacccagctcgagtctgggctcttaaacacgatgctctgctgcccacctctgtccatgatattttgtgatgcttattactggaattttgaatcataaaacatgaaaaaagtcccttgtaatgaatattcaactccatgcatgtagaggagttaggagccttacctcatctttcatttccttggcagctctcaattctcctttaacctttagtattttctgagctttgttataaacctgaaaaagtccaagtatttaagatggaaaaagtataaatgagcctctgccctttaaagattttcccagctggatctatgccctcagcaagaggtttggaaaattttcctgaactgttagcaatacccacttgcttacccatctgtttgtgtttttaaaagggtgttaaaacctccagatggcaggaccatggttttacatcttttccagaaaaccactacttggtgaaccaaacagtttctgaatttacccttcttggaaagcaaaaagtctgaatcgagtttactttttagatttctatgtactctatggctcagatatagctaatattatgtacttattatgaaccagacatgatgtgcatgacctaacttcattctcacatgaaccctgggaggcagggactactactatcctcatttaaagataaggaaactgaggcccagagaggctaagtgacttacccagggtcacagaggctctcttactactctatgaggagcttccattaattttgtaactattcatatgaaatatctgatgatatggtgtttttgaagcatcagcttgccataatgttgatgctcataaagttaggaaacatgtgaagtgctgagacttatctagctagaaagcctcccaggaaaccaaagatctttgcacatgtatgtgcatgtaagtacaggatgatgcatttgaggtcataatgcactgagcttattaaaatcatctcattcattctgtttttaaccctaagaatagaggaatttccaccaggaacttacctgcagaatagttcaaggaatgagaagctatcaaaatactcatcctttgtaacaaaccacatcccctatccctaatataagccaagaggaagaaagaatgttggtgatatgtggaatctggaatgttttatggagctgaattctgatttcctgcattgagtaccctctgaagtcttcatgcacagaggtgcatcatggaaatggaggtgtggctcaggctcacctggtggggacaggctaggtgatggtgtagtaacaaacaacccccaagtctcagtggcttacgaccgtgaaggtttattttttactcatgctacatgtcctttatgagtcagctggggctctgctccacattgtcctcaatatcctcgtagtcctcagctggtgaacttctattatctagtatgttgcctgttgccatggtagcagaaagggaacttggtgaatcacctactggttcttaaagcggaagtgaaacactttgcttctgctcacatttcattagccaaaacaagtcacatggccatgcctaacttcttcctttacctcctcaaagaaatataggcatatgtcagagagattgcgggtttggtttctgaccaccaaaataaagcgaatatcacaatgagacaagtcacacaaatttcttggtttctcagtgcatagaaaacctatgattacactatactgtggtctactaagcgtgcaatagtattatgtctaagaaaacaaggtgcataacttaattaaaaatactttgttgctaaaaaaatgctgatgtggacataagggagcacatgctgttggaaaaatggcgccaatagacttgcttgatgcaggattgctacaaaccttcaatttgttaaaaatgcaatatctgtgaagcacagtaaagtgaagagcagtaacacgaggtatgcctgtactggcgaactcacaaatgacttccacactagtcaagcaagattaaaaatagcgtggcataaaagaacactaaacaggattctaggccaccaagcttctaaacctggttcagcacctcactggaggagtggcctttgcaaaggccttcatatctctgaggcttcatttctgcttctgtaagctaggaagctataataaatggcctttagaagtctttcctagctttaaagttcactgattcagtgctctaccacgatggacacctttctttaggaggaactatgaactcacccaagtatcatacaaaaagttgtaatggaacaaatgtatccttgagaatcatacttctttgcaggcaagcccactggatagtcaggagatgattctgaaatcaaatgaaatcttgtccaaaagacagagaaatgattttctagattgtgatggtttcatccgctatggagttacacagctgtagttgcaagagccaagagcatttcgaaggaaaagtagaaggcataggttctaacatttgcatgaaaatatattgaaatttactaagtaaggtaagtaggaagaaaaaaagagagctggagtttgttccatgaaggagatgtcagaatcttcagtcattaacaatagcagcaggcagtttggaagggcttatgatgaaaaaactggaagtgttatatgataagtttttgatacatttgacagtaatgtttgccagatggatagggaagagtgttttgggggagccccacaggctttacgaaatgccatgtgaaccttcacagtgctgtctgactgaggagtatggctggacagatattttgtggaggaagggctcatcccagaggcagggactctctaccagatccccggctactgactctctgaagccaggactttgctcatgtctccctcttcttgaacccttgttcttacatattctgttctgcctcttgcgtctctgttgagaccttcatttcttcatgccttgtctactgccatctgcccaggcaactccttttttgtattcaaaactcctgccatctgcttttcaaagtaggacttctcttggtgacagctgtgcctaaagaaatgattgtagtgaaaacaaaaacttggtcagagcttctagtgatgttttgtgccttccctcagtctactatcagagcaccttgcagat

SEQ ID NO: 1243245 - DNA, 4001 bp, Homo sapiens
agcactttgggaggccgaggcgggtggatcacgaggtccagagatagagaccatcctggccaacacagtgaaaccccatctctactaaaaatacaaaaattagccaggcgtggtggtgcctgcctgtagcaccagctacttggttgcctgaggcaggagaattgcttgaacctgggaggtggaggttgcagtgaactgagattgggccactacactccagtctggtgacagagtgagactctgtcttaaaaaaaaaaaaagagtcagaactgtgaaaatcagaaaatcagaagcactttcctgaatggcatacccagtgactagaacagcttccaccttagcacagataggaaatggcaaacttgacaggaaccaatatcctgaggcccagagacttgtaccaggttggctgtgtgaaactgaggaggttagttcttcactgagtgtgtttccttatgtttaaaacggtaataacaactatcctacctgggaagaaagatggaggaaggttgagagggttcagtgatatgaaaaagggtggcaatgtaaaccctagaccactatggcccacagaccacattgggcagctgtttgtttttgtaataaataaataaaattttattggtacacagccactcttatttatatagggtttatggctggttttgcactaaagttgagtggttactatagaccacatagtcagcaaagacagagaagtatttgctatatggccctttacaaaaaatgaattggggaccggagttttagaccactatgggcttttaacaaacccaagtgtgtgatcactgaatttcagaatcagaaaaagcctttgaagaacttgggagttgagcgtcatcactaggtaaatcaaacctgtggctgagaagggcaaaatgatacgtctaaggtcacacgcatttgacctggacttctggagcacaccattgttaccaccaagcgaaaactatgaggggtgagggtagaagctgaggatagtgagaccattggggtccagtctcaagttgaaatggccagtgttcagtggccaatttctgaaaaggggccaggagagcctcacctcaaggctgatcgtaactgaaacttatctgtgcctgtagcagcaaaatctgaaagtggaaagcaagtttccaagggcccaaagaggctctcagcgggcagcctgtaataacctagggctcctccatctccctagtccattgcaggggctggagatgggtgtggtggaggtggctactatttactgaggcctagtgtgttgtgtccaacatactttcaagaacttacacaatctcatttgatcctcacagacaccatatggaacaggtaacatccccatttaaagctgtagatgttgaggctcagagaggttaatgactcgctgaaggtcacacagatgtcaagaggtgaagatgagactccactaggtcggtttgacctggaaacctgtttttaatatcatgactcacggcacagcccattggttacaggattggggccgacacatagctgataagggggcctgatcttgggttgaaatcctggtctatcagtcccgagcactagcggtgagtccagattacattttccaacctagcacaagtttcctgctcttaagagttcttcagccccgtctcatctttccaagcaccagagctcttcaagagctggttagggcctccctctcattcctccagtgcacccagaatagggttcagcgccgtgaggacgtaggcggtccttagccaccccttggcgcctaccctgggtggtcgatagccccaactgggaacagcacgggctccgcgtcggctgccagcagcccgccggccgccacttacctgccgcggggcggtgagggtcccatccacgtcgaagaggcagagcgctgggccaggcgctgccatgtccccagtttctagccgcaccttacaagacacgttggcacgaggaactcggcccggaacttccgggttcggccgctgagtcgcagggcacgtcgggaagaggaggggactccgttcccataacgcctgggagtagcggcagccacgattcctggaccgcaactcccagggtgcaacgcagatcacgcccgccttgtacattcgagcatgcgctcttaggggttccgggggccggtgggatttacttccggcagcaggtggtggggccatggtaaggaggcgggtggcgagccttgagggggtgatgctctttggggtcggggtcagggctggggcgggcaggcccgacgctcgggtttcggactccgaggatccgtgggaggaagctctggcgtgtgttacagttcgcttttcccgggctttctcttgccctccttgggtcacatgcgcacagtagtagtagctaaaactcgccgagctctcacagtgcattaggtactaagttgaggactctgaaaccatcctctggttcactgtgttctgagtccccattttgaaaggcgaagaaaccgaatctcaggggtgtggagtaatttgctcacaaattactgttggagccagaattggaataagagcttttactgcttcactacccacctagtaatacccttgtgctacgtgttggggcctccctgcctcgctccttctccttctccgctgtttccccttccccagactaggctaagagaaagcagcagttccctccagcacccaagatagcatatgaatcaaacagagaattagaaagtttattggaataaatatctcacagatttgttgctcgagttccccactaagacactgattatttagtttcctgcttggggaaatgttcacacccccttgtggatacattgtccagcccagagtttgtcctccctggatatgttttgaattaatgacggccgcacctcctttcctgtatttatttggaattgcctggtggaaggaggactctgctgcactcactgactgtgtgatctttggtaaatatcttaccctctctgggcttagtttccctagtggtaaagtggaaatagtgataactatcttagatagctgttgtgatgcccacatgagatagcatctggctttacccttccctcgtctggcaataacggttaccttgcaggattggcagaagccttagagtatggtgctttgcagatgttcaccgtgtgattaatgtggttgagttccatgagagaaatggtctactgtctccctttcaggctgcccttctccgagctgtgcgtaggtttcggggaaaagctgtgtgggaaaggcctctccatgggctgtggtgctgcagtgggcaggaggatcctaagaggtgggtgggcagcagttcacccatctcgaaggagaaactaccaaacgcagagactgagaaattctggatgttttaccgttttgatgccatcagaaccttcgggttcctgtcacgactgaagttggcacagactgccctgacagtggtagctttgccaccaggctattacttgtactcccagggcctcctcactctcaacaccgtgtgcctcatgagtgggatatcgggctttgccctgaccatgctgtgctggatgagctatttcttacggagactggttggtatcctgtatctgaatgagtctggcaccatgctgcgggtggcccatctgaacttctggggctggcggcaggacacatactgtcccatggcagatgtgattcccctgacagaaaccaaggaccggcctcaggagatgtttgtgcgtatccagcggtacagtgggaaacagaccttctacgtcaccctgcgctatggacgcatcctggacagagagcgtttcacacaggtgtttggggtacatcagatgctcaagtgaacaactgggacctggacctctgggtaaccctgggtcgcctggattaacaggaaggctgagggtgtgggcaaggctgaagaaaggggactgggtacttggagactttgcctgggcccctgggaacatgtgttttgtggtg

SEQ ID NO: 1243246 - DNA, 4001 bp, Homo sapiens
ctacaatgttctcttgcctaatcatttggcctgcttatttccttaaaagtctgaatatttgatgccacagctatgacttatatttattttgcctaatccaaactctctgagctgactctcagaaatgcttgaagtatttcatacaagtataatcaatgcattaagcacctggagcagagtggctggaaccagaccagaaattgatcttccctcctctaagagccaagtgcaccacagctatgcttctcctgaactactgatcaaaatctaccttgctttagtgttgtctgtggattcatctctcccctacaacctcactgtggactccatgagggcaaaaaccctgttctctacagctttgcattcccagagcttaccaccatgcctgccactttcatgctccataaatgctgttgaaggaatagattaataaaaaagccatctaccagcactgagcactcactaaacacaaagcacttatatggattacctcacttaatccttaacattaccctgataaggatcattagtggccgaatgttacagatgaggaaactgcagcacacagaagtttaataacttgcccaagtttcacaaaagcagtaagtgatgcagccataagaacgaacgaaatcatgtcctctgcagcaacatggacgtggctggaagccactatcttcttttttattttcttttgtttgagaaggagtctcactctattgcccaggccagagtgcagtggcatgatctcggctcactgcaacctccaccttctgggttcaatcaattctgcctcagcctccccagtagctgggattacaggtgggagccaccacacctggctaatttttgcatttttagtagaggcgggctttccccatgttggccaggctggtctcaaactcctggcctcaggtgttcctcagtcttggcctcccaaagtgctggaattacaggcgcgagcgcggcctggaagccattatcctaagagaattaacacaggaacagaaaaccaaacaccgcatgggagctaaaactgggtacgcacggacataaagatgacaataaacacactggtgactactagagctggaagggaggcagtggggctaggggtgaaaaactacctattgcgtactatgctcactacctgggtgaaaggatcatttataccccaaatctcagcatcacgcactatacccaggcaacaaacctgcaccaatgtaccccttgactccaaaataaaagttgaaaacattttaaaaacttttgtaacaatagtagtgaaaacagtatttgaacccaagtctgcacactgctaaacccatgcttctcagcaatgcatacccaggacaagggtggacctaagtggcccgtgggcgccagggaggcggccactgagccaagggcacagggtatggtcaagtctccagcaatgcacttttctcagcactaccaccctcagcccgaaccaaggactggaaggagccccaaagagtgtgtgggtggagagcggggcaggaacccgtgggcgcgggaacgaggaaggggagtcgcttacctattatgggaacctcagcgatgaagaccctccgaatcgaattggccaccctgaaagatcaaaagccaaggggcgtgaaggcgctgcagcctcgacaggctgggcccgcgccgcaggctcccaaagctaaagccctggtgcaggggggcagctctggaaggacatcgcccccaccccaccccactacacccccgccccctgccccggggccccggcttgggcctcccggcgccccagagccgccagcctcttccctcggtagccttacgccaggtcggtgttctcgatgatgaacttgacattctcgtcagtgagctccgtgatccgcacggtaggctggttggcgtacggcatctcgcccaggggccaccagcctccgcgtctgctccgcggtgactgcgcggcgccaccgccaacaccggaagtcagtcagcgaggcctccgcggcttccgcaaagacgactcacagcgccgcctgctgctcggaggccagaactgccgagcgtcttctgcggcctcctgctttaaaatgtaccagattcagctatctcggagggtagtttggcaaaacacgcatacgtccttcacttaacagtaacacttctaagaattcatactgcagaaacacttgcagttgtaaacaaagatacgagtgcagggacgttcgtggtagtactgtttgtactgtccattgataagagacctggtggagtatacacacatggaatactatgaagcacttaaaaagaacttgtacatctatagaaaaacaaaagtatattttaatatgaatgtatattttagcaaagtatacctgaattataagtaaataccctttcccttgcagtctcaagtatggaccatgcacttctgaaaacttcaggaaaagatacaatgttctttaacctaatgcttcctctacagtctgtgtagctgtggtgggtgagtgggaactctttgtctctgcatccccagtgcctggcagtgggcaccatgtggggtgcatgctcaacaaagaactactgaagtcccctaaacagactggagagaggtttaaatgggcctcaaaaaaagtggctgctgctccaacagagaaaagctctaaaatagaacgtggcaggaaatacatttaagagttgggagaagagtaaccagataaagaggagtttgcctttgcaaagagtgacacctcttcctgaaacagagggtgggcactgatggaaccctgctccataacctgtgtcatcttggtaaattaagaattatggttgtctgctgagtgtaagatggatgctatgaaggaaaaaggagaatgcaatgaaaactggaacagctactgcgaaaacttcacaggatgtcaagagatacaaggaattgagaggtgcaaaaaagatccagtggaagacccacaagagatctgaaattcaattagttgctgactttcccccattaatattcagctgacaggcagaagagagcaaagcagaaaacagagctaaccagacgtgcaaagggaacccagccagtgtagaggctgagaaaattactggggctaaagaatgtaccactaaaatcgtcagacaagagcagccaagggagctgatggtctgtgggaaggcttctgttacccgtattttactgatgggaagacttgagcccagagacgcagaggtactataattaccactatgtattaggcagtggcagcgccagaacacaggtctcctggctgccataacttaacctgtctccctctggggtcctggatacctatcatgattgataaggaaactaactacacaatgggaaactacttcaaacatatttattatttttacagactcaaaatacactaataatcctgcaatgcatgctggtgtcatgtgacaccaggcctggaatcacacctctgtccagcaggcacttgtctcaggtgaggcagttttctgagggggctcccaggaacagcatctcaggacacctgagagggagggggctgcaaggaacacctctgtgtgcacacgcctgtgctgtgctggagatgagctgtcaccttgaggtggcgtcagaccttgactctggcttgggagccccaaggttaagggaaggttaagacatgatcaaggtgcccatgagattgtgacagggacatgctgggtttctgtggcttgactgcttggatgaacatctcatttttcaatcacacagttgcagtgcagaaaggcatcaggaggcttggtctggtattaggaactgaagaagcagcccaatccctgaccagaacggtagcatcaaatgccttgtggtttccaggtggctgtggtagtgactcaggagtcctttagtgtgttctcgtgaacaccaggttatgtggatggcaccttatacttttcaaagctctttcaatctgtccgctcattctcttctaggcattgtagct

SEQ ID NO: 1243247 - DNA, 4001 bp, Homo sapiens
actgccactgtcacataaaataaaacccaaactcctttccatgagccacctaaggccctacataatcttgtctctgtcttcccctcaccatccaggctggtagccacttgctgggcctccaacaaggcaagccccagtccaccccaggtcctttgcacatcatctattctcccacagggatttccaaggttgctcctttttattaaatatcatcaccgcctgcaggagaggataggttccctgaccaccctattttaaaagcctcccccagcctcctcccaggccctaccacatctctgttttctttccttggtgggtctcatcttaatctggaactacctggtctatttgctcaggtgttgtttgtcttctgcaatagaacgtaagctccatgaaggcttctcagtgcttcagtttcctcaactatgaaatgcagacaatcatactttacttcatcaaagctgttatggggagcattactttaaaaaaaaaatccagtgctggttctctcaatacctagaacagtgcctggcacgaagttgacactcaatatagtacaaagaatactttatatttaatcttctcattagccctatcaatagagatttatcatcttcaatttggaaatgacgagactgaggttcagatataagcaactcatccaaggtggaatgaggacagaaacttgggtctcgctatgtcaaagatccttattcttattcttaaccactatactgcacggttttctgataaacggcagtatggttaagtgggtaagagcttggacccgagaacaaaactgtgcaggttcaaatcccaccacagctgcttggcatctgtgacccacctgagttgtctgggtttggtattcctccctattttcatccctaaagtagggaaactaagtaccgacctccagacccctgcggggaaggagtaaggacaggacgctaataaacgtaacctctgggaaggtttgttattacttgacaacatgttttctgccaacgtaagcgggtaatgacgctaagccacaagtcaaacgctgcaagcaggagcgtcacccggtttctactgagccgtcaccacaaccctatgaggtaggaatttctattatctctatttcacagatgaggaaactgtggagatcgctaagatctcttctttccgcctccaagcccaaggaattctaaagctaacccaaaggaacgaccttgtttgtttactgacacctcctcggaccgaatggtcagggctgtatccggaacacagagttggctcggtaaacactgaatggttgcctgaataaatgaatgaggaatccctggcctcgccgggcagaggctaatccggttcagctgcgaagtgggggctccggcaggcgcaggtgccctccctgcccatcggggcgggccgccgatcccgagcctcgctgtccaatgggtttctgctccctcgcgggtggtcaggccccccttctcacgcccaccacgcagtccctgccgcgagccgccactacacccgacgcgcggacaggtgtttcttccgtaggaggcctcccaggcccggatagggcaggtcggctggaccctgagtcaccgccgccagcgtcggccgcggcctccccaactcccaggtgtcaggtcaaggaagtcagagtccggggtcggcctggagccggctgcccctcctccccgcccgagtcccgagaggcctccagctgctaggcacagcgcggcgcgggcctccttggcctactcgggaatctagcccaggcccacgtcgtgagtgcggtccggctcaagccccagctcgggcactgccaagacgggactcacctctccgcgggggccgagcgcggacggcggcaacggcccagttacccgcgggctgcagagacggcggcggcccggctctcctctcaggcggcggccatgttgctggtggagaaactccggcggacacgtgggggggagcgggccggccccagcgtttcctcttacccacaatgccccgccccggtgcacgcggctccgccccctccgccgcgccattcatgcaggccgtgagccccgccctgcagcagggggcgctgatggcacgcgcaaaactgagccaggagtgtatgcagcggggacaaaaagacagcaaccctggcagcggtgggattcgaacccacgcccccgaagagactggagccttaatccagcgccttagaccgctcggccacgctacccagctgcaatatgtttatgccagaaagctacttaatgcttttgcttttgcatttaatctggacattgcgaggcgttttcgctgaggttttttttttgcttaacgtgtgttcaaggtgatccctatagaattattttaaaaagccgtgttttggaaaataaacacttgctccagtctttagacccaggttggttccgaataggtattagagcaaaacgcatttttagaaactttactctgagttggatggttaacccggagacccctggttaacccacaggtaatccatacgacccggattgggtgtctccgggagaagaaattgatctgatcagaaacatgcaccaggggatctgacggccaaaccctggagctggtctgggcagttgtctctgaaaaattatgtttaaatttttacttacacaaataacacgcgaattattgcaaaatatttaaactttgcagataaggtacaaatgctctttgaccttgactcgcatcctaggcccctccgccgaggtaactaaccattattatctgtttaatatgaactatggtttgaatgtgtcccccaaatttcatgtgttggaaatttaatccccaatgtggcagtattgtgtggtgggccctttaagaggtgattagatcatgagggtggagcccttatgaatggattaatctcttcatggattcatggattaatgggttaatggattaatgggttatcttgggagggggactgatggctttataagaagagggagagagaccttagctagcaagggagcagctcagcaccccctccatatgatggcttgtactgcctgggaactctgcaggtgtcccccaccagcaagaaggccctcaccagatgcacactcttgaccttggacttctcagactccataactgtaagaaataacttccttttctttacaaattacccagtttcaggtattctgttataagcaacagaaaatggactaaaacactatatatctttctagatcttttgctgtgaatttatatgtttatatctatatggatatatatagatatagccatagaagatagctttgtttttattgtgtatggatttgaacacaaatattgtcacattattcatatagatctgcaattggctgttatttttcaccagactgtattttaaaatacctatccgtgtggatatgcaaagatattaaaaacaaaaatgcacaaaaattacaaagaaaaaaattatcatccatagtgccaccacctggcattaaattaatgacttagtattgtggcatttttttccttttcttttttcttttcttttttttttttttttttttttttttttttgatgtggagtctcgctcttgctgtctaggctggagtgcagtggtgcgatctccgctcactgcaatctctgcctcctgggttcaagcgtctctactaaaaatacaaaaattagcctggcgtggtggcacatgcctgtaatcccagctactcgggaggctgaggcgggagagttgcttgaacccgggaggcggaggttgcagcgagccgagatcccaccactgcactctagcctgggcgacagtgagaaactcggtctcaaataaataaataaataaataaataaataaataaataaataaataaaaaatagatcacactattacaaatagaaattattagaccattgcaaatagaaataagtccccctcccattctcccctgtctataactgtcatgaatttgatgtgtatctttcc

SEQ ID NO: 1243248 - DNA, 4001 bp, Homo sapiens
tccgatttgttacctaacaaaaacaacacttcagactccaagtaactgaatagcgcaaacctgggctgccaaaccttaaatttcaggattacataagagttcactcggctgggcgtggtggctgacacctgtaatcccagcactttgggaggccaagacgggcggatcacgaggtcaagagatcgagaccatcctggctaacacggtgaaaccctgtctctactaaaaatacaaaaaattagcccggcgtgttggcgggcgcctgtagtcccagctactcaggaggctgaggcaggagaatggtgtgaacctgggaggcggagcttgcagtgagccgagatcacaccactgcactccagcctgggctacggagcaagactccatctcaaaaaaaaaaaaaaacaaagagttcactcttcccgtagtttcaaactccaaactcccacaacacagtacaaactggagtagcatgcaaacattaagactgacgtagcaccaacatattctaactgctaaaaagtaaaggtattctggccaggcgtggtggctcacgcctataatcccagcactttgggaggccaaggcaagcggatcacctgaggttgggagttcgagaccagcctggccagcgcggtgaaaccccgtctttactaaaaatacaaaaattagccggggatggtggcaggcgcctgtaattccagctactcgggaagccgaggcagaagaattgcttgaacccgggaggcagaggttgcagtgagccgagattacgccattgcactccagcctgggaaacagagcgagactctgtctcaaaaaaaaaaaaaaaaaaaaaaaaaaaaaaaaaaaaaaaaaggtcgggcgcggtggctcacgcctgtaatcccagcactttgggaggccgaggcgggcagatcacgaggtcaggagaccgtcctggctaacacacggtgaaaccccatctctactaaaaatacaaaaaaatcagccaggggtggtggcggacgcctgtagtcccagctaattgggaggctgaggcaggagagtggcgtgaacccgggaggcagagcttgcagtgagccgagatcgcgccactgcactccagcctgggcgacagagcgggactccgtctcaaaaaaaaaaaaaaaaaaaaaaaaaaaaaacaataaaaaaaaataaagaaagcacacaatacattacataatatattagaaggtaataagccctatggaaacaattacaaagggaaggagaataaattggaaggaggggctgaaatttaaaatacggtaaagacaagaccaatgagtaaggtggcgatctaggggaagagtgaactgagcaacagcaagtgcaaaggccctgctagcaccatgagcacgatgagagatcgtccaggaggcggtgttgatgcggcaaagggcaacaggaagggcattaggacttgaaatcggagacgcacgcaggggagggagtcagtgtcggaacctggtaggccctgggagaactccggcttttcgtctgcgtgagctggagaagagccgaaggtttctgcgcacagcacggacctgcgtgcctcagctttaaggaaatcaccgtggccgccgctgtgaacgcagagaagggcgcgagcgtgggagcaggaacccaaggcggtgggaaacggtggggctttctgagtgtattggaaagtagagcccacagatctgctgcagaccagaaaggggcgcgagaaagagcggacagaggcagacgccggggctggcggcgatggagcagcagtcggaggacgcggaaggcctgcgagagtcgcccgcgcccagcgccggccttcgggtcccaccttgcgggtgatgttgtgcacgtaggggcacgtgttgcaggcgaagcggtggcagcgttgtccctcctccacgatcagcccgttcccgcagccggggcagaacagcagcatggtctcgaactccgcaggctccaactcccggcagctcccactgccgctcagcgccgatgcgccgcccgcctcgagctcacattggtcctggcagccttcccgccacaccaaccaaccaatagacagggcgattctgcgctcccggccctgctgcaggctgtctcgcacttgtcattggtcactgcagccgccccaccccccccggcgcgccagtggctgggcggcctcgctggggcgggccgcagttcctgcgcgtgcgcgcttggcctccctagtgcgggctggcagtgcgggcagagcccggctgagaggggcggccctggaggagacggaggccgcgggtgggcccgaggcgcaagaggaagatgaggacgaagaagaggcgctgccgcactccgaggccatggacgtgttccaggagggtctggctatggtggtgcaggacccgctgctctgcgatctgccgatccaggtgtgtgcgggcgggggctgggggcgcgggagtcgttccccggggtccgggcatccgggcgccggcagcctccgaaggtgctggtgggagactgcggcccaaggctgaggaaggcgcctctgggcgtaaacgagggttttaaccttgaccgggcgcactcgcctggggcgcgaagcttaaagaggaaccaaaaacctcattagtgagtgacatcaaatgacattttaatgtaattgtatttagggggctcgggggacagggtcttgctgcgttgcccgggctggagtgcagcggcgtcctcccacctcagcctcccgagtaattgggaccacaggtgcgcgctaccacacccggctaatttttaaatattttgtacagagggagtctcactatgttgcccaggctgatctgaaactcctgggctcaggcgatcctcctgcctcggcctcccaaaatgctgggatttaggtgtgagccacccgcctggcctgtaatacctttaaaagtcaaagttgaggcaaaaaaagagcctacggtaaaagaaaaatttagttttaaataagagcaagattagtagtactgattgttccatttgcctcaagcgtcaatcatgtgtcaaagcgtcagtatcatgctttgggacgatactgtctttttatttatttatttatttatttgagactgagtcttggtccgttgccaggctggagtgtagtggtgccatctcgactcactgcaacctccccctcccgggttcactacaggcacgcgccaccacgcccggctaattttttgtatttttagtagagacggggcttcaccatgttgggccaggatggtcttgatctcctgacctcatgatccgcccgcctcggcctcccaaagtgctgggattacaggcgtgagccaccgcgcccggccaattttaaatgttttatattttgctcatcatggatattttaattgccttgtatttcttaaatgttgtattaaaatatttattgttattaccgtgttttgctgccccggtaaattttgcacacctgccttactcagtcccgaagcctggcctgggtcctgatgatcagggatatactcagcgtgaactgacaggcctctacccacccctgggggcaggtcctcatgtgagtttattctcttgcctgtttcttagcacctctttcccccagagactctgtccactatggacattaaaatgtgagtggaacatgagattggggctctgatgaattgggaaaccataacgtacaggcaaccacccttccttgcccttcgtaaaatggagcaccactttttggccactatcggcttgttctttgttgttgctcaaggtggtaaagagagccagggttcccacttctgcccttggtcttttgtaggttactctggaagaagtcaactcccaaatagccctagaatacggccaggcaatgacggtccgagtgtgcaagatggatggagaagtaatgcgtaagtgctaccctcctcccttcaggttatgtggtccaggctttcacagcaggaagacctaacagtgctggtcagcctgctcag

SEQ ID NO: 1243249 - DNA, 4001 bp, Homo sapiens
tctttgccaccccagaccctcccagtccctgcagctataaaggatgggatgcctttcatcctcatgcttctgggaaagcccgcacccctcccagcttgtctgggttcattagaaccttttgttaggtccaagctggggccttcaggatggagagctgcacgaaggagggaggctgggaggaggcagagggcggggcgaggcctggccccaccactggtatgtgggtgtctgcatgtgtgaaggactggatgggtctagtctctggggtggagaggacagaacggttctccacggctggcacggagcatccaattgtgcaatgccccagggaacagtgcagggactggacgggcctctggttgggtctgagtgccagctggacgcagccatggaggaggggtgtgcaggccctgcccagtctctggggttgtgaaagataggggaggggtggggaaatctctaaaggcgggtaatgcctctgagcttgaaagagcccaaacggagatacgggtgggtgggatcacagggcaggggggtttctgaaagggctggaaggccccggaatggagtgtcgcactccagcgtgctagggccccgccgcctgcacctgtccgactggtcggcctaggccggactgcaggggttgagtgggagccctgggcccagaggcctctccttgcctagggaagaagtgaggagctgcttgagggcacagtgggggctcccagtgagagcagcttgggggcagaactcccagacaggagagccatgtaatgtgcgggcccctcacctgcctgaagcctcttgtccgagaagctggcaaaatggtccttgctagcccagagcccccactctattttccgaagtggggatataaggcaggggctggattcccaccccctccgtcaatctcagcatctccaccaggctcccctaaaccggttattaagtgaacacattaggcttatcaaaagggacgtgggctgcttctccctgcaaacacatcaagacatgccattcccctcccaggccgccctgggaacccgcggctcagagacgccgccagtttcggggctggggtgggggcagggagccacacccctgcgaaaccgagcttcgaagaggaggccccgaagccgcccaacctccgctcagaacccagagggtggggaggtaagggggtgcctccccctgtgcccctcgacccgaccccacaccccccagggcctccgggcgcggctctggcgcgcagggtggcaggtgccgggaagtgcagcggcgggtggcccgccccctccggacacccatccctcgcctccccgacgccaggaacacttgcgcggtctcagaggcgctggagagcgccccccgacgccagctcagtttccctgcctcagggcgccccctggacggagcttcctgggtcgcccgcagcgaccccgccttgagtgcccggtcctccaaaaactccgccccctcatccaggtgactattcccggtcctgtgcgaccctctgcgcaagagcgaccctgggacacgggggtgccctgtacccccagctcagctgcccgtgccctaggccctcaaggcaatgctccctgggctcccggagtcccctgtgttatgctccccctcggggaccccagccagtcccttcccacctggcggcgcttcccagcttcagggtggcctcggtcccgcgttcccgagagtcccgcactccgggttcagttcccggttcctggacccccgtaccccccattcctacactgcccgggaggtcttccaggtcctgtgcgcccacaggggcaagagcgtcccggagcggagctgtgggcgcctcctcacctccgggtctgcacagtggggctgtatttgcctttgtttctcttcctgaagagcgagttcatggtggcgctcggggtgcgggcggcggcggctggcgggccgggcgcgcaccgaggggcgggcgggagcgcaggtgagcgagcggcggcgcggggagcccggactgcggcgcggcagtggctccgggtccctactcgctgggggcggggcgcccgccggccactggctctgcgggccgctccccgagaaggtggtgcttaccttcccgaggaggggccaccgcgcgggcggggcttggacgcgggggtggggacactgggtcttggccggacgccgcccacccccagccgggggactccggaggccgggcaggcactggggcgcaaaggccgccggggcgagcgctcgcagccccaccctcctcgggcccggcgcgcctctggccgaggccttcacctggttctgcgctaccgcggaactcggcgctcctggtgctttggcggacacccagctgggccccgcaagacaggtgcggcagagacccgcacggattcatgtgccctagtagctagcgaattgcactcagatggtggcaattgagggaagggggctgaactgccgagggcgccggcctgagttcaagccctgccacccccaggttggctgacactcctgggcaaggtgttttactgctcccagccacagtttacttctttgtcaaacggtgataaccaccaccccatccgaaaggcctgtggggatgtccctgcaggtaatgcacgcaaagcgctgagcgcagtgccctggcctgaatctgctctccgcttgccatctcgggtggacaaaaactcctttgaaacttcaataactccaggccctggcactagaagagcgcttcatagctggtcataaaagctgctcgattgcggctcagaacaacgacgttgcacaattctgccagcatgtcctggcccagactgtgtgccagtggaggaggctgcccttagacagaaacctaatctgacctgaagcccggatggcacacaccaccacacctggctaatttttaaaaatttttgtagaggcagagtttcaccatgttgcccaggctggtcttgaactcctgtgctcaagtgatctgccggcctacagcctcccaaagtgctgggattacagatattagccaccgtgcccagccaaccttattcttaatggggcttctatgggtgggcttaacccatttatgcctgaggttgcaattttttgaattgataaatcataccttggcagtgaccttgagcagtaggagataactcccacaggcgtcacgttccaataatggaccactaggcgtaaatagaggtgtgattcctcctaaagttgtgcctgcctgcctgccttccttctttccttcctctctctttcctttcttgctttcttgctttctttcttctttcttctttgagactcagttgcccaggctggagtgcattggcacaatcatagctcactgcagccttgacttttggggctcaagcaatcctcccacctcagcttcccgagtagctggatccacaggtgtccaccaccacgcctggctaatttttaaaacctttatatttatatatgttttttgtagagatggggtctcgctgtgttgcccaagctggtcttgaattcctgggctcaagcagtcctcccaccttggcctcccaaagtgctgggatttcaggtgtgagccactgcacccagccctaaagttgctttcaaaatgtgtgtgtccaaatgtgcatttttctgggggaggatgtattgctcagtggagtcatttactcattcaacacatgtttcccatcactctcacagcctcagtgtgcctggctctgcttgttgtacacggatgagaaaagggaaaagaacaacacaaaaggggctttctctttgggagctttcaggtcccggggcaggggacacatattaaaaatgttaacttggatgggcgcggtggctcactcctgtaatcccagtactttgagaggtcgaggcagggggatcacctgaggtcaggagttcaagaccagcctgaccaacatggtgaaaccccgtctctcctaaaaataaaaaattagctgggcgtggtggcgcctgcctgt

SEQ ID NO: 1243250 - DNA, 4001 bp, Homo sapiens
aagttcctaaaaatgccaatcaggactgagggaaaggggacaactaaaaacaccatggggctggtctggtcagctggcaaaagagaaaagccacagacaggtggcgaaaaagaggccgaccctgctcatcatcccctcacaggccctgtctggctgcaggtagtctatgtgaggcagggccaggcaaagagcctgagggccacagattcaggacccagctctgccacgtcctcagtgggtgacctcagttaagtcaccagacctctacgagtcatggcttcctattcgataaaatgcagcaaatgattccaacctcataggattgctggggggaagagatggatagaagttttttgccagtaccgggccaggccaaatagtggccctgtaaaggccaatgtttactgttcaataaacgtagggtaattctgtgggctcttctgccacaattctccagcctggtagaagccacaatcacacagttccccagaggaggcaggtaattaaacccctgactgttccccacgcatctcagggcctccactgttacattcgtcctgcttggaatgcccttccctcactggccctgcctccatcagctagccaaattatcttcatccttcaaggcctacctccactcaaaagccctccctgatggctttagcccatctcattattgccctcttccaaaagaaatagaatacctggtgattatcaagcacgtatgctgtaccaaaacactgtgctaacctcatctccagcaccaactcactgaatcttcacaatcatcttattaagtactattaattctgctttacaaataaagacacttaagattactaacacagctagaaagcggcagagttcagattcaaacctagagccatctcacactgcaaaacctagagccttaaccactacatcatcctacttcccacagaactctgaactggcctccctatcgtgcttaattctaccctggcttacttgctacgatttctcaggctcccaccctgaacgtgaatgatccaactccacctttttgcattatggcctgaaaaaggacaggacactaagagctggcttcagaccccattccttacttgtgggtaactttgaacatgaaagttcccacctgtaaaatgagtacaataccaccaatctttaagggttgttgtaattagaagacttttataaatcacagggtctttaactttcctgtcttaaacttttggtttttggctgactcttttaccacctccttattcgaggcctctcccacagttcggcccccctccaacaagcttccgtcccccgacagatggacttgtttccttgagtttcctaagtactttatgtaacactcttactccactggaaacacatcgtctaataaactttaagtgtctttatccactctgtcttccccgagcaggctagcttttcctcgagggcagcggctccatcctgctcctctctgggaaagcttccagaacgaggcaagcccaaagttctcagttgggtttgccccaggccagaacccgtgggcggcggcttggcctcccttccccagggccaacgagctcacctggccttagcgcacagggccttgacttcgctctccttgatgagctcgcagcgacgcagctgctcgatctgccggtccaggtcgctgatctccgccatggcccacccccggcgcgggtcagagtcggggccgccgccccctccgcaccgcacaggggtctcctgggaaaggccaagacgagcccgcggatcagtgtccgtccggggctcggagcggacaactcgattctagagccggcccggctcccccacccccgcctcccctcacatcggccccaggaccccccggcgtccaacggcctggccgcacccccgctaactcccgtcgaaccccgcggtcccgcgctaaggacggtgacttagaggagtctcgcactattaccgccgctgcgactccggttccggctctccggctccctgcctccctctttcactccgctttcgaccgccgccgccgccgccgccgccgctcctacttccggccccgccgcggaagcaaaggaggccagttccgccgcgcgccggatgtggcgtcatacacgctcctctcctttcgcagcgacccctgcaccacttctccagcctgagatcgggaaggaggtggaggaacccggtggcggccagtggcagttttgtgggctctgccgctgggcgatgtggaggctattagaaaccctagaccagtcccctcccatatcatttcataaaaatgtttaaacaactgtcttttctttttttgagacggagttttgctgttgcccaggccggggtgcaatggcacgaactcggctcaccgcaacttccgcctcccgggttccagcaattctcctgcctcagcctcctgagtagctgggattacaggcatgcgctaccacgctgggctaattttgtatttttaatagagacggggtttctccatgttggtcaggctggtctctaactccctacctcaggtgatccgcgcccccacccaccaccacccttcggcctcccaaagtgctgggattacaggcgtgagccaccgcgcccggccacaactttcttttttctaaattagagacagggtctcgctctatcgctcaggctggagtcggtggggctatcataggtcactgtgacctcgaactcctgggcacaagctatcttcccgcctcgggcctcccaaagtgctgggattacaggcgtgagccaccgcgcccggccatcccccatttcagctagggaaacaagccgagctggggctaggctttgtaactttattacactttttttttttaacattacactttttttttaatgttacacatttttgttacttgttttgtcagccttccccaccacagtccttggaggatccaactttgtctttttaaatattgcagccccagtggttagaataaggcctggcacggtaggcatatatagatacttgttaatacttgttcaatggatgagggaagccaagttcagatctcttcctgtgccgtcagagaaatatttgccgtggacaacttcagaagttaacagattggagtccacttttcccacgccaagcctgtgcctcagtcagcatgacttctctgattccaaaatggcactcttgacatttcttagttgcttccgtttttctttttgagacagagtctcactctctcgctctgtcgcccaggctgcagtccagtggcgccatctcggctcactgcaagctccgcctcccgggttcacgccattctcttgcctctgcctcctgaatagctgggactacaggcgcccgccaccaggcccggctaatttttttgtattttttagtggagacggggtttcaccgtgttagccaggatggtctcgatctcctgacctcatgatccacctgcctcagcctcccaaagtgctgtaccacaggcgtgtaccaccgtgcccggcctctttttttttttttttttttttttttgagacggagtcttgctttttcaccccgactggagtgcagtggcacaatctcggctcactgcaacctccgcctcccaggttcaagcgattctcctgcctcagcctcccaagtagctgggattacaggcatgtgccacgacgcctggctaatttttgtattttcatttatttatttttttaagacagagccttccttgctcttgtcgcccaggcgggagtgcagtggagcgattttggcaaaccgcaacctccgcctcctgggttcaagcaattctcctgcctcagccacctgagtagctgggattacaagcacccgtcaccacgcccagctaatttttgcatttttaatagagacggggtttcaccattttggtcaggctggtctcgaactcctgacctcaggtgatccactctcctcggcctcggaaagtgctgggattaccagcttgagccaccgtgcctgg

SEQ ID NO: 1243251 - DNA, 4001 bp, Homo sapiens
catcaccatgcccagctatcttttttggcatttttaatagagatggggtttcaccatgttggctaggcttgtctcaaactccagacttcaagtgatatggttgcctcagcctcccaaagtgctgggattacaggtgtgagccaccatgcctggccaggaggtcacttctaaatcttactgggggctatgcacggtggctcatgcctgtaatcccagcactttgggaagctgaggtgggaggaacacttgagcccaggagtttcaggctgcagtgagttatgattgtgccactgcactccagcctgggtgacagagtgagaccttgtctgtaataatagtaacaatcatcatcgtcatcatcatcatcatcatcatcatcatcatcatcatcatcccagcattttgggaggccaaggcaggcggatcacttgaggccaggaattcgagaccagcctggccaacatggtgaaaccccatctctacaaaaaatacaaaaattagctgggcaaagtggtgcacatctgcagtcccagctactcgagaagctgaggtgggagaattgttgaacctgggaggtggaggctgcagtgagccgagattctaccactgtactccagcctggatgacagagcaagactctgtcttaaaaaaaataaaaataggccaggtgtggtggctcatggctgtaatcccagcactttggaaggccaaggtgggtagatcacctgaggtcaggagttcgagaccagcctgaccaacatggagaaatcccatatctactaaacaaaattacaaaaaattagctgagtgtggtggcgcatgcctgtaatcccagttatttgggaggctgaggcaggagaatcgcttgaacctgggaggcagaggttgccgtgagccaagatcacgccattgcactccagcctgggcaacaagagcgaaactccgtctttaaaaaaaaaaaaatcctccttcccttccctcttaccttgctgcctaggtgtccattcttcatcggaatcttctgtgtcatccacctggagtttgatggcctgccttcggtgacacatgaaagctggtcgagtggctctgagacctgaaaagaagcaaaaaattttgctctgaaacggaagagctgggatgaggaacaaagggcagtggcaatggaaagcaccacaaagccagtgctgctcagtctgatgagctgggagagtcttgaacaaggtcaagatgtgacctctgcatggtcagtatccacacacaaccctgcactgacgcaaaagaacaatatttccctccagatttgtctccgtgcaaaagggaattgtgggcagatgccgccacctgataattaaaataatatagggaccaaagacctgttttatatcgcccaggctggtctgtgcccagcacttcctgttacctacagtaatcagtgcattatagttcattttcacattcctatagcgagttttctcccagtctcccatttctgcccattcttccttggtgaagtatatggaaatgtctttgaaggcatctttgacctagaggaagtaacagattccatcagtgatttactaatacacatcgagctggtccttttcctctaccctgcgtgtagggcatagcctggggcctctgggagtctctgtgaaacataaagaccttccctccttctccagattgtgtcctgtttaactgagcagacactgagcattttcctagctctctgctgacacagagcagtcgctgatgctagtgttcttttctcccccatgtcctggccaggaccagctgcccccattccatgcacattcagacagagtcacccaagggtacaggccaggagtctgcagcactccagagatcagctcctgctgggagtctggcttcgcctccccgacttctcaccatgggcttccgctctgttctctctgtgtctccttctgggctctcctcttgggacctttcagggctcatggtgctgggactgtctagaaggccctgctccaattctgagtgtgggaagggcccctgagtctcccagctcctaggccaaaggctcctgtggaaggagaaggtgctgagatggggcaacagccctgagcactacccagaacaaggctctgtcttctccatctggctggggtgttcagagcaggaagactgggttcctggtgaggtctcgagcaccccagggaggtctgggggtactgatgggatgggaaggcctccactggccatgagctgccacctaatgtaagctggattttgttcttttagttcccctgcagcttggctcatttggagaagggtggcacaggtgcctggagggttgtagctaccggtgtttgaggggagtcctgaggtgtgagagccagaggagtctcaaggagaccttgaggccccctgactgctgggacttgggtcacactgaggagcagggttctgttttagcgaggcaaaatgaacattttgcatagacaggatttggggatctctacctggggattctagaaaaatccaggagtaaagcagtctgcatctctaaggggaagctatctctcaggttgagatttggggtccctcaggctgaggggatttgagatgtcttagactgaagaaattggggtttctcaggttgagggaatttggagtatcttgagctgaggagctttggtatccctcaggctgatagtatttgtggtttttcaggatgagattaggggtcttttaggctgaagagatctggggtgctctagttgacaggatttgagattcatcaggttaaggggatttggggttcctcgggatgaaaggatttgggatatttgaggctgaggaaattctgggtctcgggtaaaggagatttgggtctctcattaatgggttttagggtgtttgacactgaggttatttggtccttgaagctgacggggttgagttttcaggctatttaggttatctgtggttggggaaatctggtctctctgagatatttagggttcctcaggctgaggtatttggggtgccttagggtgagggaaattgtggctcctcaggctcagaatatttggggatctaagcattaggagattcgatgttcctctgggtgaagggatttggggtctctgaagctgaggtactttgggggtttcatgctgaggggattttaaatccctcaaggtggcaggatttggggtcttttgaggctgagaggatttggagcttctcagggtgaggggatctggggtctcctaggctaaaatttgaaggtcttgggatgagggtttacaagggtttcacgctgcacgacaaaggctccccatgctcttcacagtctcccgttttctcctgccgcggtgttcaccctggccgggcgtcttctcggagccgctcaggaggtgagacgcggtgggtgccagcctgtagtgctgccagccaatcagcgttgagaccaaggcgagcccgccaatcggcagtcaggaggtgctaaaggggcggggagtagggcggagccttgcctgtcagtcatgggcacaacccggttttgggctcaggaggtcggggaggggcctggcttttcccgcccctggggaaggtcccgcccctggggaaggtcctgccccaccccgctgggattgcgtgcaaccatctggaatcctcccgcgcacaggcgcagtttcgcggttttattacttggttttccccaacgccggtgtttccgactgagccgggagtcggggctgctcctcacttccctcctcaggcctgggtcttctgaggggacactgtgtctttttgaattgccagagttcttgcactgactctcatctgggagggttggtgttcctttaactgtggtgtaagttgggtattgtcagctggcttcgtttctggatgcttcagagggccagggttctgtacagggcccttacgggtgggtgaattgtgcttggtttcacagatgttgtattagctggccaattttggtgttgtag

SEQ ID NO: 1243252 - DNA, 4001 bp, Homo sapiens
gtttcaacccagaagatagggtgatttaaaccaggatctgagaaacactccctctggaaatacttctttcagagagagaggaggcccaggcgacaaacacagtcgcctttctaggggatgcaccatctgcagaggagcggcagccacctgcagagacctctgcaaggcagggagaggcagaacctccctgggtgagataaggaagggacatgggcagagaaaggggaactaaggaggacaggttctcccagaaacgtcccgggaaaacactttctcccccagcggaactgaccatgccaggattgcttcaggagaccgctttgactcttccagagccgggaaggcaggaagggtaggtgaacttccttggcatgtaagactcccaagcgccatcggccccagtcacacacacaccccttgaaaggaccctgttgtggtgaagaattcctagcctgggaggtcactccgaccaacgtgattctttcactctctgcctaactcagtaacttcttctataaagtatttttcaccctctcttcccacaaatagcatccccaaagccccagagcctaccttggcactggaatccctgcttcccgaagcccctgcaaaagcagaaggaggtgtatgtcaggcagcccggggggcccagcctccagctagttacccacagagtcacccgccttcctccctgcctctgtaccccaggtgcaaactcccagccacaggcgggtgcccaagagtcttccgcctttgtgggggtaggtgggagctcggctgtaacccccatctgccttcactcctgcagaagagaggaggctgcgaccaccaggtggcgggatagtggggagcgtttccgtcggggtaggggctgaaggcaggcgacagatgtacccatagatgccccgagcaccctcgggaaaagagaagagataaagacgcattcagagggagggcgagagtgaccccgcggcggtggtgtcctctgggagggggactgggaaggaggaaaggatgccccactactggagggactggggaagaaaggggcccgcagtgatgtgaccgaggagtggaaaggggaacccaggccctcggggaggggcaatgggagataacacagggcgctgcccggaggcacagaggagtgagaaaggatgtcccatgcccgcagggagatagagaaggacacccagggcgccgccccccccggaaacaaggggtggggggcgagggctcctcgcgcccggaagcaggcggagagatagggaaccccgggtcggagagcacccgaggcgctgccctccagggcaggcacagaccccgcgcgctcctagtcaggtggagcaaaggctcccgcgacgccgcccctgggcgctctagaggcgcctgagagcaggagagggcaggaggcgccccgcggcggcccgtctgggaccagggtggggacagggcaacggcaggactgtccatccgggagtcccgggcagcagggtccggagccgggagtccggagacgcggggtcccagggtgcggagggcgcggagggcgcagagggcgcggagagggggtccctggcgcggcgctgccctcgggggcccgggaaggtgccctgcgcgcgcgcgctcaccagatgaagtcggtgcagtggctgcagaaggtgggctgcttgaagaagcgggcggtgaatttgtggttcttgacctcatgcacgttcttctgccggagggcgcctttgcgggcgaagcgcacggtgctctcctcgccctcgctcggcggcggccccgcagccgggtcagccatcttgcgcgcggggagccggagcccgagaggtgccggccccggggccgcgggaccgcgggctgcgggccggggaggcgcgggaggcggcggccgctgctgcacccggggccgcgggcgcttcccctgcgccggctctggcggccgcggcgcgcggagccggggctgtcactcgcccagctgctgccgctcgtccagctgcgcttggcaccgctggccccagctgcgggggagggaggcggagccccgggccagccccgccctcctcatttgcatcgcgcccaggccccgcccagcgctgccagctgctttacatatcggcgcccgggctaccgcgggcctcgcggctaagcgtgcacagccgcagctctgcagcgccgggaccgcagcccggggtcgtcggacccgagcctcgccccccaccccaccccgtcctcggcccccggggctgcgttcaggagatgtgcccaggggaggagcgagagtggaaagacctacggggcgaaggggagcgggtggaaggggtggggcgcagcgaattccaccccggcctctgcggagactggtacccatccacccccatccatcccattggtcattctgcacgcgtctcctggagggatgggctcccgctgtcactcattcggaaaggcttgtggccgcacacacttacacacacatacacacacacgttctgcagaggtaggggaggagcgatctttattttatatgtctctaactccaccacagagaagattcttggctttgcttgcctcctgcacgtttggaagagaactccctaccttctgtccatcccctctgcaaaacgactccgtttccccaactgtaacatagggctaatagtgtggggaggaaggatttcagtagatcaatatttttccaaatttcattcatttctgactcgtcttcacaaattctggtcgtatttgtgcaccctctgggggaaaaaaagcctatctcttttggtctgagtttgaacagcaagaggtatctacattattaaaatatctccaggtgccgtcatctgtcctaagcatcttcgactgaagtcatcttttatttgttaagagaggaaattaataaatgctagaggggtgttaaagacattactatccaaccaggactctctccttgatgtgatctgaaggtaactgaaagggtaataattgtctacaatgtgtaattcaatgttatttagcgccctgttcatgcacaaggcctaaagatacccactgccaccatgtcccccactctgggaacgcagagcttcattaggctgtgagctccttcaccagacctaggctctgtgagagcaggggggctgttcaccaccatgtcgcccagcaccaagctcagtgcctgacacctcccaagaccccagtaaatattggttgattgagtgagggcatggatgaacaagtgaatgaatgaagacttaaaggtcggcacttcttacccccactcacacccagtaggtgtttaataataaatatcaagtgattgctgggcatcaggtacttgtgctgtcttatttagcccccgcaacaaccctatgtagatctggtaactttcattatggataaggatggggaggttcagagtgattaagatacacccacagtcataccgttgctgaatggtgattgggctggcctgactacaaagcatcctggtgacaaaggggtgaacctgagtagtggtggatgaaggggggcaggctggagttgcacgagctcaggtcccactatgacaattttgcctggaagctgctgagtggtaagtcattattaggtagcatgtcgagagcaagggctgcaataatagaatgtccctctcctacatagtaattcaaaggtaaggaggaaaaaatagcattcacttttaaggttgacatgtttgggaaactggatgtgcctgtctattattagtccttgaagaggccccaccacctcccagggaggcttgggaaaacatcccaggagacattgctgctgaagtagatttcctttgaactgatgagctggaagctcacagcccacatcctgccttttgaatgaagtgccctggatgactttggtctgtaacaacaaacagtacctcatggcgccggggcctggggatgcaagggctgtggatggaaaagagccacttggttcctgaaggcgttgcaccaagtgag

SEQ ID NO: 1243253 - DNA, 4001 bp, Homo sapiens
aggcacacagttggtgtcccataaacagaagtcatactgtgacatttctgaggtgcttggtgggccctgtcacttcagggaactgggtctcagagcctctggtctctgccaaaatgctctgggtttgctctaccatcaggaaatgactgtgacccagggcctgtgtcaaggaatcggagaggtgggctttcttaggctgtgggtgagccaaggagaccagtgcccagcaggacttcttatgtccttccccagatctcactggggtcttaaactcttgccttagaaattttagtataggtggtatatcaagcagcttgagtgtggacttagatccgaccagatggacaagttaacctttgtttcttcggtggacataacgttgtgaaaccgtgccccaaagagtaaagaaaccggtggttaacaaaaatgtttgagtttacaggatggcagataagagacttccttaatggtgcttgattaaatgtgaaaagttcagctccactgctacctggacaagttatctctgtacccaaatggggatgaaaacttctggcacagagtgaggaataagcagttttgaatttaattttcctgatggtgactggcttaatctatttaagttataacctaagagttcctttgttgaagagtggaaatttcagctttgggctgaaataaacccgggtgggcagctaggggacaggtcagatgggatgagctggttcaatcttgagctccagctggtaaatgtttaactggctttggggttcctgggatggagggaacccagatttgtagcatttgctgatttctgtaaatactccatggtccatttcaagctgccaagatgaggtcaccaagcagagtggggaaatgtacacagtgggtcctcaaactcgagagacctggatagagcaccccactgggtagggatctgttaagagggtttaggaggcaggttctggttgtgacttggggagactggttcttgttgtatcttagggaggcaggtttgggttgtgacttgttggtactactaagagtttggaacaatggccaggtgcagtggctcatgcctgtaatcccagcactttgggaggccgaggcaggtgaatcatgaggtcaggagatcgagaccatcctggctaacacagtgaaaccccgtctctactaaaaatacaaaaaattagccaggtgtggtggcgggcacctgtagtcccagctactcgggaggctgaggcaggagaatggagtgaacctgggaggcggagcttgcagtgagccaagatcgcgccactgcactccatcctgggcgacggagcgagactctgtctcaaaaaaaaaaaaaagtttggaacaaaacccagcgtgacaactgtctttcatgtcccccccaccgacatctttctcccgttgcatgcccaggccctctccccctctgctcatccccgagccctcctccccactgagcctcccctctcaagaacaaggagagaagagtgggatgacttttcaacatttattgacaggcggcattgttccttagcaggctcctgatttttattggatggtggcattttcaagatgtggcaagaggatcttgaagtctggtaacattctcaggcaggagtttggtggatgtgctattttgtgcaattagtgtcttctacatcgcggtctgtacctggggcggcagcaccctggtgagaccaagaaaagtggtgagaggaaggctgggccctgagagctcccagcctcagccccagcccaccctcagctgggcccacttactcatggctctcctccgtgtctggcagctccgcctccttcgtctgcgacttctttgtctctggcggtaatatctgctccggctctggctgcgacagcatctgtacctggccatggtgcaggatgggcttggcctgaatgctcagagcagggcaccaccttggctgagccagccaacctgtgagcaggtggaactctgtgggctgtgagtcaggggccagctctgcggcctgttatagatgccagggggccgttggtcattgtgagggcaaaggggctgggacctcacaaaccatggccaggtggcctgcatcatgtccatatatgggcatttgagaggcgggcaggcccccgagtgtaggggctgcctatgtcacagctggggcgatacaagatgactcctccgtgggagcaatcatctagttattcaattaacaaaatattactgttaatattttggcctgttccatgccggattttggcctaggccctggtatatagtgataaacaagacagacatgcccttgttaagaagtattattattattattttatttttttaattacttatgtattttgtttatttttttgagacagagtctcattctgtcacccaggctggagtgcagtagcacaatcttggctcactgcaacctctgcctcctgggttcaagcaaacctctggccgcagcctcccgagtagttgggactacagacatgcaccaccacactcaactaatttttgtatttttagtagagatggggtttcgccatgttggccaggcttggtctcgaactcctgacctcaagtgatctgcccgtctcagcctcccaaagtgctggaattacaggcatgagccaccgtgcctggccattattattatttgtagagacgggctttccctatgttgcccaggctggtctcaaactcctgaccttgagcaaatctcctgcctctgcctcccaaagcactgggattacagatatgagccaccacaccctgcccctaatagactttataatctaactacagaaagcatgaatgaaacagccctgaagaataattgtaatagtgacaaatgctgataatggaaacctcgggtttctgaggatatgtgctgggagaacttgacctcaggtgaggctctagggagagccccaaaggggtgctggcgaagtgaaccctaaatggatgctatagtaagaggagggaggagcacctgggaagaaagagctgctcctgcaactgttctgaggcggtgcaggatgtgcagttctgtttctatgcagggccaggcagcaggggatccgtggagacagaaagtgatcggggtgaccagggcgggtggagcagggagcagctgtgccatgggtggggggcttccttgtgggctgatgctttggaacttgatagaggcggtggttacacaacattgtaactgtactaaatgccactgaattacacactttatttatttatttaattttgaatgaacgaatgacagggtgtcgctctgtcgctcaggctggagtgcagcggcgcaatcttggctcactgcaaactccgcctcctgcttcaagcgattctcctgcctcagcctcccaagtagctgggattacagacgcccgccaccacacctggccaatttttgtatttttagtagagatggggtttcaccttgttggtcaggctggtctcgaactcctgacctcaagtgatctgcccgcctcagcctcccaaagtgctgggattacaggcatgagccaccacacctggccttgaattacacactttaaaatgatgtattttatgttacctgactttcagctcaattgcaaacacgaaaagctgtgaggccaaaaggtgctaacaggtgtgagggattggagcagagcatggtgcagggcactggtcatggtgtggtcttttccacagccccatggattttaagggtaaagaggggagcagttagaattggtttggctacttaaacagaaaaccgaaatgagtgagttgggtggaagttttatgtttttcttaaggagtcagaggtgatttcgggggtcattagattgtccctgtttgggggatacacatgctggaggatttaggggtgatgacatatgtttgccaactactctcaaggatttacccatagagaaagagggagaagaagggagagagaggagacagagatgggggcggggagctg

SEQ ID NO: 1243254 - DNA, 4001 bp, Homo sapiens
tcatctgaggtcagaagttcgagaccagcctggccaacatcgtgaaaccatgtctttactaaaaataccaaaaaaaaaaaaaaaaaaaaatttgtttagctccttcagctactcaggaggttagggaggagaatcagttgaacataggaggtgcaggttgcagtgagccaagatcgcaccactgcacaccgccccagtgacaagagcgaaactccgtctgtttttttttttgttgttgttgttttgttttcagaaactcgttgcttcctaaagattggtcatttctgagcaccagaaatccatttgccaacatatggattggatcttgccagtcttatccccccagtcctcagtggctatggttggctaaggttggcactctccgaagtgcccccttcctgatcctggaatctatgatgtaaggattgtgagatggggaggttatcttgggttgtccagaaagtccctcagtgcaatcacaagggtccttgatttcagacaggagggaggagtgatgcagccacaggccgaggagagcaggcaacaaggatcggattctgcctgggtctccagaggcttcagccagcacaggcctcacacagcgcagcccattactctgcattcatctactccttgccttttgccgtctctgtgctgaccaagttgttgctggagcatgccagacctgtttcccacctcgaagctgtggcctgcactgagcagtgcccccacctctgcccccaccgtttacacttccaaccacccaacactcaagatgggttgtgtttttaaactgtggcacacagtaggcatttaaatatggccacaaggtgccttggcatctttgtgacttaattaggactcgatctgttctaaccattttctcctttcatgaggtaggatcaggttcttcactggagggggatccagacagactaatgtggcctttgacaccatggaaggatgcacaatagacaggacagcatcatagggtggcctcccaggcacagtaaccctctcctaggtgtcctgagagcatcagaactcccgccctacctgcctctgaggaagggctgcagagaagcctctacccgccctgggcgtgagggaagccaggtttgtgtgattcgtgcaaagaaaacccgacaggccagcgagtgtcttgtcaagctttattgggcaggtgacttttgctcgtttcactcagatcttgtgggcttctcggcggcaactcagggcttgagcatttgatgtaggggagttgctatggcctcactcggtgtttcttgggcaggtgactttctcttaacttccagctgggggcttgagcatttgatgtaggggaattgctatggcctcacttggtgtttcgggcgactttttcttaatttccagctgggggtgaggggcccaggaagcttagtgccttctgcatgttctcttcctggttctgcagccttttgggaaagaaagttctggttgagggggtcacctagggactctgggtggggacgggggttagggggctggagcttttgtcaggtggggtgggtccccgcctccctcctgtgcctggggtggtcagggacatgcagggcaaggcgggggcgcaggcagacctctgcgatgcctcctccggtgcctgcaggagcgtcttttgcgccttctgcaggagcgatgctgccgcctgtggatccggtgcagcctccttcgagagcagtgtctgcgcctatagtgagactggccatgggtcctctcgtagacctcgacgtgctccgggctcagcccttgctcctcttggccgtggtgtccttgctcttgcccatgcaactgctgcctgtacacctcgtgcgagcgttcgctcaggctcctcacgcggtatcggaccatggtgttgggagatctggtggctcctgggctgaggctgcagtgggccctggagtaggggaggagggcggaggcctgcccacctgcccttggtgttactgttggtctggtctgcaaggctccccgggagcttgtatataaagggggcgcccactatgactctgcggccccgcccagtccccaccctgcccagcctcctctgtgagggcagcacagggccaggggtcacaactagcagggccctggcacccaagctgcagggctggaagggcgagagacccccttgccttgcctgtaaagcatgtcctctgtctcttgcagtaggtgaaccatacagatggcaggtgttttattgcctaatccaagccctcatctccccaagccggtgggtgcgcacattgtcatttggaagcttccttgccaactcactgctgtgccacagccaccatgtggaagggacttccgtgcttggatctctgtgcacacagcttactgttaagatggcaacagcagcaaacagttccctaatagctcctatgtgccaagcattgattcatttatttcccatacattcactcattctctctctctctctctctctctctctctctcctctttttgttttgaggcactgtctgtcgcccaggctggagtgcagttgtgcaatcatggatcatagcagcctctacccctccagctcagatgatcctgccacctcagcctcccgagtagctgggactataggcgtgtgctgccactcccagctaattttttgtattttttgtggagatagatagggtttcaccatgttgccctggctggtctcacactcctggcctcagtgagcctcccatgtcggcctcccagagtgctgggattacaggtgtgagccaccacccttgcattcctcactcttacaatcctcattttctgtggggcaaacaggcatgaagaagttgagttgctcaaggccactctgctgagaaggccaggccgggccagcattcagacggagacagcctggttttagtcatacccttggctctccacctcctccctagcccagggaatgctcccctctccgcctccaaaatattcatcttctcccctcccgctcggccttgccggggcttctcattgaactttgatgatcccattaaagtccgggatcagaatcacagaaactgcaaaaccagtttccctttcatggagggcagggagaatgtgggaatgtggcagatacacaaatttaaggacttgaagatgcagagatcatcccagatgatctgggttggcccagtgcagtcacgagggtccttagaagagagaatagggaggcaggagggtcacaggaagagaaactgggagacaccacactgctggctttgaagatggagggagaggctataagccaagggatgcaggcggcctctagaagctgggatggacaaggaaatgggttatcctcccctcgtgcatccaggaggaacacagccctgctgaccccttgattttagccccatgagacttctttcagaattctgacctgcagacctgtaagataatgcatttatgttgtttaaagctacaaaatttgtgatgatctgtcacagtggcaataagaaacaaattcaggaggcttaatcttcagatccttacaggaggtgatgggtgatattgccatgcccttggtgtttctatgctgcctctctttagggataagaaggtcctttatgatggccctcaagctcttcgagggcgcgtgttaaaaatatgaatgctgaggccttaccctacgtcccgctaagtcaaatctccatggccaaagcttgcagatgaaaataagaaggggcggggcagggctcggtggctcacacctgtaatcgtagcactttgggaggctgaggcgggtggatcacctgaggtcagaagttcaagaccagcctagtcaacatggtgaaaccctgtctctactaaatatacaaaaattagccgggagtggtggcgggcgcctgtaatcccagctactcaggaggctgaggcaggagaattgcttgaacccaggaggcagaggttgcagtgagctgagatggcaccattgcgctccagcctcg

SEQ ID NO: 1243255 - DNA, 4001 bp, Homo sapiens
tgccttgggtggcctcagcaggtccggttgtggggtatatgctagaccaagccgtgaagactctctgggtctctggaccccccttcccatggtctcctgctcctccactgccaacgccccactttcccatcctgaagcacatagcctggaatggagatcgtggcctgccatcaaccagcctctcctccacacacctttccagtcctcccagggagggctgacctctcccagcagcgggtgtgcggcacgtcacgtacctgcccccgcacccatgacagtgaactctctcccaggacagcggggactatgttttattaccagggctccttgtgactagcaccatgtggggcatacaacagggactcagctcatgtttcctgggcaaatgaatgggtgggtggacctttgggccttggacaaaaggacaaggctgaccaaccgagtcatttgtgggtctgggagtagtgggataacagggcctcccttgccctaggccattgccgggcagagccgtggcctccccacagggtagcccaaggctccttcctacgtcaaacatggcccccagagaaaccgaggcttccctgaaaattccccatcccccagccccactgccacggtaccaactaggatcccctcgggaacaggggatcagctgatccagagaattagctcaaggtggctggtgcttggaggactgtgagggaatgtggtggagatcgcatttgtggcttctttgggatggaaggagtgagggaggagccggcagtagggtgggcagcagacgcactccgaagctccttgcggaaggcgcaccgagcccagagcgagaggatggggcctaggttctgtgtctgtacccagtcgcctccctgggcctcttttgcctactgctctcatggggtactgtctccgcccccagggctagaccccttgaagaaggcgggagtgagcttccaggtaggggtgcaggtggttgccagcagcatagactggcagtggaagagtctgcagccaagaaggacctagaggaaccaccatgaccccagcaacaatccctgtcctagctcagcactgactggtgccaggcctggtcccacccatcacttgagctaatttttctgatcatctgacccatgagtagctattagcttcccctaaacgctgggaggggcagcctgaggctcaaagacacgcagtgacttgctcaagggcacgcagctaccagaaaagaagtttgaacccaggtctgctgaactcccaagccagtgttcttaaaagacggtccatagttggggcagcacagtggggactgcgatgaaggcagttaccctgtcccgctggatgctctcggctggggtgtgctgggactcgcagaggaatttcccgtcccagagatgggaagatttggcggagatgatttccccctctcaaagcccctcaacctctggctggggcttgggaacaaggtcaccgagccttgctgttcagccttccttggcagctggcctccctccgtgtgcacccacacacacacgccttcacacacgtgcacacgtggggccagaagggatagggtgaggggaaccagagacagggaggattcctcagagactttttattgactcttctctgaacactgtcgccggagcagcagtgggcgtcccttcctgggccttcgttgcgggtcaggagggtgtccgcttgggctcggggctctgctgggcctcggcgttgtccttgtggccctcctcctgccgctcaggctccagcagcagcagcttgccctgcaccggcagctcttctttctcctcctcttccccctcctcctcctcttcctcctcttcctcgcccgctgatgacaaggagaagttatcctgactcacacaggccatgagctttttcatggaggattcgtggccccggccatggcccgtgctgtggcctgggctgtggcctgggctctggcctgtgttgagcttggcacagcgggaacccatggtctacgttgcctgtctctctgggcaaggaggtgaggcggtgggtgaaggggctgcgagtgggggcaggatgctgacatcacaaagggagcccatccccacttgggaacctgggtctgagccaacagttaactcacacctcagccactggcagctcccagcccccacaggggaggtctgcaaggctgagcactggggccagttcggatgccacaccatagtcctcatttgccctggagaaagtttcccttgtagctgggatgggagttagggattgaatttctagaagcaggaggggcacacacagactcctccccacatcccagaaatcgccagccagagagagctgtctctgttgagtttcttgactgttaacccttggaaataaatcatcaagctgtgtgcttaaaatgtatgcactctgtaagctcataaaactcaggaacccttggaagtcttccttcgggggcctgaaagtgtgaaatcttcttgaaaggcaatggctcctaagcattgtttgtttgtccaaggcatgggaacaggccagaaaccaagctgggatgaacaaggggttgctttgtccctgactgatgcaagatggacaccaccaaccagaggccactctacccaggtcagggtggagtgacatcctcttaagtgttttggggccacagagaagacatcatggagctgccccttggcaaggttccacatctgtgcagcacaatttcagcatggggggagggggtttaggactttgtcttttatacattgaaatgagtcgtttgtacactgcaatggtattttttaaatataaattttttgaggccaggcgtggtggctcacacctgtaatcccagcactttgggaggcgaggcaggcagatcatctgaggtcagaagttcgagaccagcctggccaacatcgtgaaaccatgtctttactaaaaataccaaaaaaaaaaaaaaaaaaaaatttgtttagctccttcagctactcaggaggttagggaggagaatcagttgaacataggaggtgcaggttgcagtgagccaagatcgcaccactgcacaccgccccagtgacaagagcgaaactccgtctgtttttttttttgttgttgttgttttgttttcagaaactcgttgcttcctaaagattggtcatttctgagcaccagaaatccatttgccaacatatggattggatcttgccagtcttatccccccagtcctcagtggctatggttggctaaggttggcactctccgaagtgcccccttcctgatcctggaatctatgatgtaaggattgtgagatggggaggttatcttgggttgtccagaaagtccctcagtgcaatcacaagggtccttgatttcagacaggagggaggagtgatgcagccacaggccgaggagagcaggcaacaaggatcggattctgcctgggtctccagaggcttcagccagcacaggcctcacacagcgcagcccattactctgcattcatctactccttgccttttgccgtctctgtgctgaccaagttgttgctggagcatgccagacctgtttcccacctcgaagctgtggcctgcactgagcagtgcccccacctctgcccccaccgtttacacttccaaccacccaacactcaagatgggttgtgtttttaaactgtggcacacagtaggcatttaaatatggccacaaggtgccttggcatctttgtgacttaattaggactcgatctgttctaaccattttctcctttcatgaggtaggatcaggttcttcactggagggggatccagacagactaatgtggcctttgacaccatggaaggatgcacaatagacaggacagcatcatagggtggcctcccaggcacagtaaccctctcctaggtgtcctgagagcatcagaactcccgccctacctgcctctgaggaagggctgcagagaagcctctacccgccctgggcgtgagggaagccag

SEQ ID NO: 1243256 - DNA, 4001 bp, Homo sapiens
caggtgcctgtaatccctgctacttgggaggctgaggcaggagaattgcttgaacctgggaggcagaggttgcagtgagccaagatcgcgccactgcactccagcctgggcaacagagcaagactgtatctcaaacaaacaaacaaacctggaactatgtcttgtgttaacaattttatgaaggcatgaacctcttctggtgggcactacacaccttctctggctgaatgccctcatccattattatttgttctctcccagaagcagtctacactacagattcaggagatattctctgaacccctcctcattctccaagagttgtaaacttgcatggccatttacaaggaggaaatagaaaccaccatgccaagccctaattgtattagccgtcagactgcagagcagatggtccactacattcattcaaaatgtatttgctaggcggtggtggctcacacctgtgatcccagcactgtgaggggccgagacgcaaggatatcgagtctgggagttccagaccagcctgcgcaacatagtgagaccccgttctctacaaaaaatttttaaaaaaattagccgggcgcggtggcctgtgcctgtagtcccagttactcccagctactcgggaggctgaggtaggggaatcacttgagcccgggaggcagaggttgcagtgagcagagatggcgccactgaactccagcctgggtgacagagtgagaccctgtcttaaaaaaaaaaatatatatatatatatatatatataaatatacatatattaaaattaaaaattacccgagtgtagtggcgcgtgcctgtagtcccagctactcggtaggccgaggtgaggatcgcttgagcccaggaggtcaaggctgcagtgcgcctcgatcacaccactgcactcagcctaggcagcagagtgagactctgtctcgaaaaaataaaataacaaaatttattaaataccttctatgtgccaggcactatattagggactggagccaccaccacaagctagagaagacccttgccctccaagagcttagactctaatgagagagtaatacaaattacagactacatgaatgcaagaaatacacagagcgttgtagaaagagaaaaccaaggttacagaaggactctgaggaaactagcatttgagatctacaagacagaccgggataaaagttggggaagagtttttacaggtcaggaatccttaccccaactttcccaagaaaaggccctaaggtagaaagaactaggttgcataagcaaaatgtgccaaaagcctgagcgaccgaagcacttttgcagaagccccccgctcctcatctcctatcacatcttctgctcaatcaagctgggccttgtcgacttcggaaaggcgtttggattttgttctaaaagcactgggagccactcaagagttttaagcagaagcgtatctacactaggcttacgcttttacaggaccactctggttggcgtgtagtgaatacacgactctccaattactcagaacagtgagtggcaaagacaacaggtctggcaatcagagaactcgtggcccagttaggggtgcgatggttggagctactgcggtctctgtggctgaggggaggcgccaggcacgagtactgcgacagagccccgcgagtggcaggcacccggctgcactgcagagccggggccagcctagaaccccgctctcctgcaggcccgggtgtcccgagctgccccacgcggaggagtccaagtaggcccacgctaggctcctctgccgaaaccctggtgccaaggacaccatgctcgctgcacacagaaccccaaagcgaccccaccttcccagcatacccagcgcctcacccgccgcgggaaaccctccgctcgcctccgctgctaccacttttaccgcggccagcacgcggggcgggacctcgcagcgtcgaggagcgtgctggggggcgggtcctaaagcagaactggaaagctatcccatcacaccccgcgagctcccacagtgctcagcggcagccactatggaggccgccaggaccgctgtactccgggtgaagcggaagcgcagtgcggagccggcggaggctcttgtgctcgcttgtaaacgcctccggagcgacgcggtcgagtcagcggcacagaagacgtcggagggtttggagagagcggcggagaataatgtcttccacttggtggccactgtgtgctcccaggtattgggcgtggtgcagctggtgtggagggcatcttcgggtgcagccggtacgaaacccgatccctgacccgctcgcgaactcctgcttacgctggcctccgtcccctgttgccccctaggaggaaccagtccagcctctcctgcgggaagttctgcgcccgtcacgggacagccagcagcgtgtccgccgtaatctccgcgcctcggctcgggaggtccggcaggagggccgctaccgggtgctttccagccgccgatccttggggaccacctcgagcggccaggagtccgagtacacgccggggaacccagaagccgccgggaactcgggctttcagttgttagaccttgtccacgaggagggagaacctgaagccgcctctgcaggctcctgcaaagtgagtatgcccctgaaggtggtcgctgggcttctcaggatggtaatgcaagaagactgggcccagtcgcagcacagtttcatcttaaggggatggatgatccatccggcgtgacggcctcattttacagatttggttgttcatccaacatgtgtttactacgtgcctacgatatgccaggtatttttttagattctgtggatacagcagtgaggacctaacatgcaggtagacagaaacagtaaacaagtctattcagtgtcagatgatgataagggatgtaaggaggcggggagacaaagcaggaagagtggtgccacttcagtgagagtgtcactgaggaaatgacatttgagtgaagacttgcagaaggtgaatggcagggtattccacatatcgagaggacttctaggcagagaacctgaaagtaaagaggcccttaagccgtttctttgctccttgcaaggtgcctggagcccggtgagctagaggagagcagtaaggaatttgaggggaggatgcctgctaggtacttgcaaggacattgcctttcaccctgactgagatggggatcactggagcaaaatagagatagagcaggtaggaaaattgatcaaagagaggttaaaggaatagtcctggatagcatatcaagtttgaggtagatttaggtctagaatgcaagttttctcacatttaatccagtgcttttctttatattacatttgctaacttcatttgcaatcacttccaaaaaaagtctactacatgcagcaaaactacagaaatggaaaattctccttgaggctgggcacagtagctgacgcctaatcctagcacgtagggaggcccaggcgggaggatcacttgagcctggggaggtcaaggctacagtgagccatgattgtgcggcagtggcatttcagcctaggtgacagagtgagaccctgtctcaaaaaaaaataaaatactccctgtaatcccagcgctttgggaggctgaggcaggagggtcgcttgaggccagcctgggcaacaaagcaagaccttgtcactacaaaaaggaagaggaaattagctgggcattgtggcacgcgcttgtagtcctagctactggggaggctggggcaggaggatcacttaaactcaggaattagagattgcagtgagctgtgatcaagtcactgccctctggtttgagcaacagagcaagatactgtctctaaaaaaaaaaccagaaaattctcaacataaagtgtgccctctctttttttttttttttttgagtcagagtctcactctgttgcccaggctagagtgcattggcatgatgctggctcactgcaacctccaactcccggg

SEQ ID NO: 1243257 - DNA, 4001 bp, Homo sapiens
ggtgactcacgcctataatcccagcactttgggagaccaaagcaggtggatcacctgaggtcaggagttcgagaccagcctggccaacatggcgaaaccccgtctctactaaaaatacaaaaaattagccagcatggtggcaggtgcctgtaatccctgctacttgggaggctgaggcaggagaattgcttgaacctgggaggcagaggttgcagtgagccaagatcgcgccactgcactccagcctgggcaacagagcaagactgtatctcaaacaaacaaacaaacctggaactatgtcttgtgttaacaattttatgaaggcatgaacctcttctggtgggcactacacaccttctctggctgaatgccctcatccattattatttgttctctcccagaagcagtctacactacagattcaggagatattctctgaacccctcctcattctccaagagttgtaaacttgcatggccatttacaaggaggaaatagaaaccaccatgccaagccctaattgtattagccgtcagactgcagagcagatggtccactacattcattcaaaatgtatttgctaggcggtggtggctcacacctgtgatcccagcactgtgaggggccgagacgcaaggatatcgagtctgggagttccagaccagcctgcgcaacatagtgagaccccgttctctacaaaaaatttttaaaaaaattagccgggcgcggtggcctgtgcctgtagtcccagttactcccagctactcgggaggctgaggtaggggaatcacttgagcccgggaggcagaggttgcagtgagcagagatggcgccactgaactccagcctgggtgacagagtgagaccctgtcttaaaaaaaaaaatatatatatatatatatatatataaatatacatatattaaaattaaaaattacccgagtgtagtggcgcgtgcctgtagtcccagctactcggtaggccgaggtgaggatcgcttgagcccaggaggtcaaggctgcagtgcgcctcgatcacaccactgcactcagcctaggcagcagagtgagactctgtctcgaaaaaataaaataacaaaatttattaaataccttctatgtgccaggcactatattagggactggagccaccaccacaagctagagaagacccttgccctccaagagcttagactctaatgagagagtaatacaaattacagactacatgaatgcaagaaatacacagagcgttgtagaaagagaaaaccaaggttacagaaggactctgaggaaactagcatttgagatctacaagacagaccgggataaaagttggggaagagtttttacaggtcaggaatccttaccccaactttcccaagaaaaggccctaaggtagaaagaactaggttgcataagcaaaatgtgccaaaagcctgagcgaccgaagcacttttgcagaagccccccgctcctcatctcctatcacatcttctgctcaatcaagctgggccttgtcgacttcggaaaggcgtttggattttgttctaaaagcactgggagccactcaagagttttaagcagaagcgtatctacactaggcttacgcttttacaggaccactctggttggcgtgtagtgaatacacgactctccaattactcagaacagtgagtggcaaagacaacaggtctggcaatcagagaactcgtggcccagttaggggtgcgatggttggagctactgcggtctctgtggctgaggggaggcgccaggcacgagtactgcgacagagccccgcgagtggcaggcacccggctgcactgcagagccggggccagcctagaaccccgctctcctgcaggcccgggtgtcccgagctgccccacgcggaggagtccaagtaggcccacgctaggctcctctgccgaaaccctggtgccaaggacaccatgctcgctgcacacagaaccccaaagcgaccccaccttcccagcatacccagcgcctcacccgccgcgggaaaccctccgctcgcctccgctgctaccacttttaccgcggccagcacgcggggcgggacctcgcagcgtcgaggagcgtgctggggggcgggtcctaaagcagaactggaaagctatcccatcacaccccgcgagctcccacagtgctcagcggcagccactatggaggccgccaggaccgctgtactccgggtgaagcggaagcgcagtgcggagccggcggaggctcttgtgctcgcttgtaaacgcctccggagcgacgcggtcgagtcagcggcacagaagacgtcggagggtttggagagagcggcggagaataatgtcttccacttggtggccactgtgtgctcccaggtattgggcgtggtgcagctggtgtggagggcatcttcgggtgcagccggtacgaaacccgatccctgacccgctcgcgaactcctgcttacgctggcctccgtcccctgttgccccctaggaggaaccagtccagcctctcctgcgggaagttctgcgcccgtcacgggacagccagcagcgtgtccgccgtaatctccgcgcctcggctcgggaggtccggcaggagggccgctaccgggtgctttccagccgccgatccttggggaccacctcgagcggccaggagtccgagtacacgccggggaacccagaagccgccgggaactcgggctttcagttgttagaccttgtccacgaggagggagaacctgaagccgcctctgcaggctcctgcaaagtgagtatgcccctgaaggtggtcgctgggcttctcaggatggtaatgcaagaagactgggcccagtcgcagcacagtttcatcttaaggggatggatgatccatccggcgtgacggcctcattttacagatttggttgttcatccaacatgtgtttactacgtgcctacgatatgccaggtatttttttagattctgtggatacagcagtgaggacctaacatgcaggtagacagaaacagtaaacaagtctattcagtgtcagatgatgataagggatgtaaggaggcggggagacaaagcaggaagagtggtgccacttcagtgagagtgtcactgaggaaatgacatttgagtgaagacttgcagaaggtgaatggcagggtattccacatatcgagaggacttctaggcagagaacctgaaagtaaagaggcccttaagccgtttctttgctccttgcaaggtgcctggagcccggtgagctagaggagagcagtaaggaatttgaggggaggatgcctgctaggtacttgcaaggacattgcctttcaccctgactgagatggggatcactggagcaaaatagagatagagcaggtaggaaaattgatcaaagagaggttaaaggaatagtcctggatagcatatcaagtttgaggtagatttaggtctagaatgcaagttttctcacatttaatccagtgcttttctttatattacatttgctaacttcatttgcaatcacttccaaaaaaagtctactacatgcagcaaaactacagaaatggaaaattctccttgaggctgggcacagtagctgacgcctaatcctagcacgtagggaggcccaggcgggaggatcacttgagcctggggaggtcaaggctacagtgagccatgattgtgcggcagtggcatttcagcctaggtgacagagtgagaccctgtctcaaaaaaaaataaaatactccctgtaatcccagcgctttgggaggctgaggcaggagggtcgcttgaggccagcctgggcaacaaagcaagaccttgtcactacaaaaaggaagaggaaattagctgggcattgtggcacgcgcttgtagtcctagctactggggaggctggggcaggaggatcacttaaactcaggaattagagattgcagtgagctgtgatcaagtcactgccctctggtttgagcaacagagcaagatactgtct

SEQ ID NO: 1243258 - DNA, 4001 bp, Homo sapiens
gggaggcctagcgagggaacaggaagattaaaatggctcagctgggccctcggcttacccccatcctgccatgctcacctggcctgcgaggaccacccggcctgccggggtggcgaggcaggcggctgcctgtggacaggatcctgatggtagctgtggtgctgtggtatggaggtctgctttgagggcaccacggggacctggaagagaaagaggtgtcaagagcaaggtgatagaatgaggctggacgggacaaggtttccctgtgcctcacagtgccctgagccacaaacataacagagattggggctagaattcactcggatcccaagagaagagatgaattggactgaattaggggccagatattaagagtcctaaactgcaggtgtaggacctgggtaatctcatccacgctgtttagagaaatgaaaaagacagggtgagctagggtgggtcactgccttttttgggccagtttttcttatctgtgcagtggagtcaaagacctcagcctgcttcctaaggaggctgggctgggaagaaagcagaagagtttcggcccagcgccgtggctcacgcctgtaatcccaatactttgggaggcagagatgggaagatcgcttgatgccagtttgagaccagcttgtgcaacatagcaagaccctgtctctaaaaaaaaaaaaaagatagaaaaaaagaagcagaagagtttctcagagttacagggatgtggttccagcccaaaatcgttggtgggtggaatgggcactgcccaattctaggttggagtaagtgggagccaagcaggactctaccatgagggaggctgcctgagggctgagtacaacaatgatggatttggacttcagttatcctcagtagggatctggcccgagtttggtagtgaggaaagtcatgggggaatagagagtctcttggttcagggggctcaccatgtgaacagccatgacatcttctagcaccacggccaggacccgccgagaggccttttccaggggagaaggggcccccgggagctgcagcctcggccgtttcgggctcctggctccccataatgctcgagtcagaggctggcggcacagacgcggctggccaggcgggctggagggtgaaagaagcagaggacggtcgcccgaacctgtcgctggctctgtagtttcccggcacggtcgccaggatccccatctcccggggtcaagacaggcgggccgcccgggtacgctctcacctggagtccccgggcaagtccatgggagacgcggcggctccgggggggtccctggggaatcccaggctgcggcctggggtaaggggggagcgggggagcggggggtgagggccggccccttccctggggctccgcccttcatggtccgcccgcggctccccgtagcccagcggccgcagccctggggcgcgaaagggcgcccccggccggtcgcccggagcgggtgtcctcccgctgccaccgcctcgatcagcggatcactcgcgccctgcctggcacctgccgccagaacccagaatgcagcggccccagttctcccgcggcccgagcctcccgaggcctttgtccctgcagattatgccccgagatcccccgggatccacggggatcccggtcctgggaggctatttccgctggatccctctgcgatcctcctcctctcccagcgagtggccgaggactccaaagcaatactccatacatcgacgaccctccatcccaccagatcccctagactggatccctgaggaaagaatcctacagcgcggttccgccaatcagacgccgggcgaggcttttccttcccctgtaagcttcagcgccgcaaagctccgctcagacaggggcggcccgagctggagcatctccgaactcagcgtagatccccagggatccactgtcaagcagataccctcttcactccaatcccgggaggtcccgcccacagacgccccttccctcctcgcgtccccgcccagcggtctcccccggcccgggaccagatggttcagaagtttccttccccgcccccactcccgccctctctccagccactccttgccctcccccaagggctgctcaccgccgcctcccgtggatcccgggtcttccgcagctcccacctccggctcctttaaaaaccaagcttacccaacgctgcccaaccgccgatggccttcttctcggagcctctggacaccgcccaatcgccggtccccgtcttccggggtggtgagaaactaagtgaagccacctggcggccatcatccctaggggcaggaagccaaactgagtggcgccgccatgatggttgagggcagatgtcttagtcctcgttgaaccgtggtggaccgggtggcgtcatcttttgagggccatatacaatgccaggtttcttgatatgttgaggcaaccgattgaagctagagtgccgccacgctttttaagggcatcttccggttctttcgttcttaggccaataaacgtcgactgagtgctaacgatatgtgaaattcccaatttcctagagtggcctcgtttgaggaaggttccggcatcttcctgggttcctaaactgggttcccacggcccagggtccgagtttaggagggggtggtggaggccctgagtccgaacacccgggatcaaagacgggctggtgcggcctgtggctccgttgctggcgccttgtcctggagagatgggaccgagccgaagtggggaggagactgggggcgctaagcttgacttcccctgagtgttgcccacctacttcttcctggagaagtgggggtgcccacggtccgcgcagaggtctataggacaggggcatctttgcaggaggccaagaatataccttggcttgctagtggggcccggctctcaggaaccactgtctcaagtggggcccgcaggatgggggaggtgtaaatagtcctgaggagtaagggatcagggtgggacgctgctgcttggaggagctgcgtcatggaccctttactggaagctgggctgttggtggggaggaagtgggcatgtagtggcttcttgcagcgctatgaaggtgccctgaccgcttaaccaaagcccatgtctgcactagttctccttccccagattccctggtccaaaccagtacttcttttcttttttaattttttttttttaatttgaggcaggatctcgctatgttgcccaggctgatcttgaacacctgggctcaagtagtcctcccgcctcagcgtcccaaagtgctgggattacaggcgtgagcgcccagcacgagtccttattttgttttcttaacagaacgagagaccctgaagcctagaatcctgggtccgagataaggtgcagaggtgcttcctggtttaggtgtcataattctcaggggattgagtgatgaaagtgataaaacagggccgggtgtggtggctcacacctgttatcccagcactttgggaggcagaagatagcggatcacttgaggccaggagttcaagaccagcccggccaacatggcaagaccccatctctaaaaaaaaaaatacaaaaaaatgagccgagcatggtggcgcacgcctgtagtcccagctactcaggaggctgaggtgggaggctctcttgagcctgggaggtcgcagctgcagtgggctatgatcgcgccactgcactctagcctgggcgacagagaccctgtctcaaaacagacaaacaaacaagggatgatatggaaagcataatcgagaagggcttatgtgggaaatggaggctccccagctccgtccctaaggactcatgcagggagacgttcttgcaggactacagcatctctgtaacaggaggtccgctgggtcctctggaaacccattcagacttctggtgggagcaggccgccgtggttcttccacgtagaggtgtttctctccctctggatcagggctggcagtatgggtgcctgaggaggtac

SEQ ID NO: 1243259 - DNA, 4001 bp, Homo sapiens
cagcgctggctgaggcccggcggccagagggagcgggagggaaggtgcggggcctgggctgctgcctcctgggcacgtctagctttcgagggtcacaccgcggggagaggtgacattttgaaaaggtaatgggggccacgatccctccagaggctatagggaggacccttcctgcctctttgagctcctgggggctctgggagctccaggcgtccttaagaggcttgtggccgcgtggctccaaacttgtttttgttttgttttgttttgttttgttttttgagacggagtctcgctctgtcacccaagctggagtgtagcggcgcgatcacggctcactgcaagctccgcctcccgggttctcgccattctcctgcctcagcctcccgagtacctgggactagaggcgcccgccaccacacctggctaatttttttgtatattttttttagtagagacagggtttcaccgtgttggccaggatggtctcaacctcctgacctcgtgatccgcctgcctccgcctcccaaagtgctgagattgcaggcgtgagccaccgcccccggcccaaacattttttttttttttttttttttttttttgagatggagtctccctctgttgcccaggctggagtgcaatggcatgatctcggctcactgcaacctccacctcctgggttcaagtgattctcctgcctcagcctcccgagtaactgggactacaggcgcgcaggccaccacccctggctaatttttgtatttttagtagagacaggtttccaccatgttggccaggtggtctgcccactttggcctcccaaagtgctgggattacatatgtgagccaccatgcccggcctcaactttttttgagacagagtctcactctgttgcccaggctggagtgcagtgacattatctcagctcactgcagcttccacctcccaggctcaagcaatcctcccacctcagcctctccaatagctgggaccacaggtgcgcaccaccacacccagctaatttttgtatttttttgtagagacagggtctcactttgttgtccaggctggtctccaactcctgagctcaagggatcctcccgccttggcctccataagtgctgggattacaggtgtaagccgctacttcctgtcgtctactctctgtattttgcaaataaaacgtttgcaggtcatgtcaaacatcaagtgattgatctgtggggacgcaggcgccttcctcagagcccctccctcccctgcttctgccccagccagccttgtgcatctgcagataccgaggctgctcaggggcgctctgctgtccactgagtgcgaggagtctcaggcgctgcagggacccgggtgctgccacacgggtggacagcccatggtggccggttggaggcctctagcacagaccctgcacacctggaggcttctgctggcaaagccctgggacctaagaccagatgcccagggctatggcccacttgggatgacacacagggtccccagatgtgtgcatctaccccagtgaccccctttttgggatgcttgtgtctgttctggggctgctctgggccccaggggttgggggtgggcggtgtccccttgtgagaaggggcccgcatggcaggagttccctgtgggcgcaggccaggccctggaacggtctgtacctcgcacactgcatttgcgagcggctgcgctgttcctgagctggttgggagctcagaaatgcaggcgggtgtcttcctgccccatggggtggtagagatagccaggaagtgagtgccggccgcccagggccccaggcttatttcccgagacggagcttggccacctgtggtctggtctccacgtagcaggatgcacgttcgaggcctgtgacccatggggtggtaagtggggtgtgcagctgccccacccgtgttggggtgacctggctgtccccagcagccacctctgcacgggggcttctggtcagttcgggccatcctagcatctggctaggctctgccaaacccatttgccaatcagatttggaagactggacattctgtggtttccctagccccggaagcagcagcagggccatcccctgcactgggggtcccaggatccctgatgggctgtggcgtgacccatccagggtcttagaggccaacctggattcacagcatgtcctgtggttagaggtacaggcgggtccttgggccctgatgcacttacagtggtggccacccagcccgggatgtttgaatgaagccgtggggacagccagaggccagaacacaccgtcttaacttctaggtgtccttaggcaaaatcacgggacctttgtcatccctttttttttttgagacaaggtctccctgttgtgagctgtggcatgatcacagttcactgcagcctccaccttccaggctcaagggatcctctagcctcagcttcccaaagtgctggaatgacaggtgtgagccactgcacccagcctagtcatcccaaagcaagtgtccgtctgtgtgggcagggactctcccaaagccagaagccctgtcaggctgctgcacggctctggccaccaccctgcggatcacgggctcctaggaaagccgccccagggaccacgacacaccggagggtggcctggggcagaaggcgcgactcactctcccttcccttcccccacagaccttggaaaggtctcgcctcaaggcctcccaccaccctcggctgagcaaatgtgtctctcttttggaaaatctgcgacttctgagctggtactcttggaagagcgtaatttggtggagccggcagtgggggcctctgaacccagcaggctgttattttgcccgtcggttccccttaaacacactcaagttccgaatgggggcagcaccccatccccgggagcccagctggcattgctcctggtgacacactgacctccagtcctcaggccaggagctagggcgtccgagcctgtggggatccaccgcccagcctgcttctgtccttccaggacctcctgcctcaggccatgcttctggttagcaaagacatacctagcttttcaggagacgggcgtctcttaagtaggaaacctccggcgactgtaaccacgcactgacctgcagctgttcagagtaaaccgagctaaggcaggcacgctaccccgaggctgcagcgcgagcgtggctacggccaagcccccagcaggcccctgactacacaatggaggtcaggtgtggatgacagccacgcacccgggactcccttgaagttgttttttttttttattatactttaagttttagggtacatgtgcacaacgtgcagctttgttacatatgtatacatgtgccatgttggtgtgctgcacccatttactcgtcttttaacatcaggtatatcccctaatgctatccctcccccctccccccaccccatcccttgaagttttccgttgtgttttctgtgcttgggtttaagagcttcaattgtttttgaaaatcactttgaaactttcacagatgacagaaaagtcgttgccgtgagctccagttaactaggcggagtgagtttctttggtgaggagctgccttcgttatttccccaggccccacgcttgcagttttgtttgcagggactgagggaagtcagcgtgtcctccacacacattcacccaccacccccgggctgcttgggtcctgcaggccacagggtccccctaggacagccagagccctctgcagagcctagggcacaggcgggtggaggatgggactggtccttggtccccagctcagcactttatccctctgttccccggagagttgactggtgtcgggggctgtctcccccacccattcggagttgaggccgcagcgagaggccagtcccgggagaccctgctgcagcttcccgctaggaagggatcagagccccctatgccagtgtggtaccaagccctaaagtcagcgtgaagggcctc

SEQ ID NO: 1243260 - DNA, 4001 bp, Homo sapiens
tgcgtgtgtgtctaaaggcggcacagagcctgctctagcagggcgtcaggtgggcactgggggtctcttagggggtcagtctcatgtggggccaggccaggctgtggggagtggacgtcccagcatggccccacggctcagccacctgctcagcccagctccatctgggtggcttcgggcaggtcagcggccgagcctgcagcggccacactcagccaagacccgctcctccccacgccccacacggcgctggtatgcgcgccacactccatctgggccgccacctgggctgtccaccgccccagcacgcgcctgtgtggggtgcacagcacgcctgcgcacacgggctttgggtgtgtgtacacagcccacaggctcacacagagccctcacccagtgcccggagaagccacctctgtgccacctaagctcagaacggagtctgccaccaagtgcggggccctggctgcacacacctcacactccatcacggtgaacacggctgcttgtccgtgataacacactcaccacccatccaggtgtgggggggctttccaaaccactccaacacggcactcacatgctcacacaggccctacacaccgactccccaggacacacgcagacctggctgggggtcgcacccgtggtcatgcatggccagtgggttgagcagggtagggctggggcactgctgtctgctgcccccaaaacactgtgttggtgccgttggggggacgaccaacagggctggagaagtccactcgtccaaaggcttggggccctgcagggcagtcacgggctgcaggggcaggcagaggctgaccagctggtctgtggctgagacagggtggcggtcgggaggcaggggctgggccaggagaggtcctggggctccccgaggggctgcagacccggcctggactgggtggtgggtgcagaggcggccccttctccctgcccgccgccccccccacccatgtggatgacaaatgggtgtgggcgctccggcgacagaggcggctgtgccgggccatcgatcacccagccctgggagccacacagctgtgccagccgatgccacaacccatcccgcctcccagcagggaccgggggctcccgggtcaggggcttgtccaaggggctgtctcagcagctgctgaccccttggggacccggaggatagctggcacccacctggtgtgtgtacacagagcaaaagacacccctggacagcagccacacgcacacacaaacgcatacgcactcacacgcgcgtcccagccggacccggcaatcgctcccggggcagccagcagccctgtgccaggccccgacacccggccccactcacctgtccctgtttgggggagagctgggggagaaccggtggcacggggggcacaggcacccccacagggcaggagggggcacccagcagccggggaccctgatcggccacccgcagatcctgctgcccccccccccgggaacgcagggcgccccacacaggcgggtgcggcgagcgcgaggtcaggcgtctgccccagaccccagacccggcccctgccctccccgcctggcccctgagggcggccctccctccccccgcgctgctcctggacttcgagaagagggtgggggggacccggccgccccccgcgccccccacacgcctggccacccgctgcccccgcgccccgcgtccagccggccccgcgacgcccaactggccgcccccgcggctcccgccgctcctacctgcgcccggccgggagcggagccgccaagtctgcgaggccgcgtgtagggcgcaaacttcccgcccctccccgccccgcgccggccgcgactcggaccccgcggacgcgctggggctctgggggtgggatgcggctcccgtgggggaaactgaggcccggcgccgggagccggacctcccgggtccgcggtccctcgagcggcagcgactcccgcagcctccgccgccgcccgcgtccccccgacgccgctcgcacctcccgaagttggcggcagaggcgggcgcgcgtgcgcctgggctccgggctccggggggcgctgcgacctccgaccgcgctcgcggcgggagggaaggagcagcccccggcccgaaccccgcgcccccgccgcccgcgcgccccccgccgccccctggcgcgcactcaccggcctcgtgcgccgggaccggctcagctctcggggcgcgcggtggagcggccgggaacccgggaggcagcggacggagagcggactgcggcgcaggtgtgcggccgagtcaggggcgcccggcgcctcccgcccccgttgcccgcaggctgccgcgggggtgcacagaggccgccaggtctcccgggtccccgccgcggcgtgatgggtgtcagcggcgcggggcgcgggagaggggccgtcagcgcttatccatcagggctctggcccctgacagccgccggcccacccgagccagggcccctgggggctgtcctgggggacaggggtgccgcggactgagccagcggagccgggctcccttccttgccctccctgggcgagccctgccctccgttctcttttcctctaaaccggaggctgcccggaccggcccctcgcaccccgccctgccggctgaccgcctccacctggggctggtctccagcaccctcccccttcctggatgcggacccctccagccctcactcccggctcctgtgggaggtgcctcagcgctgccccacgaggccacgcacttccctgctgtttgaaagaccccctccccacgggagtcccctcctgagaggacctggggcggtggaggagagaagcagggccagggctgctcccagccccacctcccgggctgcaccaagttccaagcagctccctgagctgccagaacgtaaaggcctggagccccactgctcagctggggcctaggggaggttcgcctgaccggcctgctccctcccggacacaggcatggctggggcagagcccctgacttcgctcaggggagacgtcctaaacccgacacttgcggtaggcgggcgtctcggggtctccagccagaggggagtgtgctactccctgctgactctgaaacagcacagggagcccggcccacatagctccccaggacctggggctctctgcaggctcagccgcaggctcccgggctgtccccagctcaggtcggggtcaggggtgccttggggaagaagggaggaccccacggggcttctgggtgtcacccctcgaatggggcagagaagagagctcagcagcatctccgtggccccggtccggctgctggcagagccccctggtagagcacacccagggtccatgaggaacagcccctggttctggggtgggcgtggggctctgtctccctcctgcctccatgccaccttccctgacacagccgcacacgcccgtctgagggaagtccctggggcggggcaggggactgggaggggtgctgtggatggcagagcatgccagccttctctctgcccacctggcctggcccagctgaccagctgaccgtgcaggcagctccgggccgggagacagcttgggctgccgtcacgccagcagccccgtggagagcgggggccaggaggccggctgcttctgtacatagactctactctggacgtgttcagctgagcactgccccgggagactagggtccaaggtcaccctgacaccagtagtccctcagtggccagcccgagactgacccctttgaaggtctggaagaggccacagctgacagcacaggagaccaactggctggaggctctggccattgtccaggggaggaaagtagggagcagggaggcctggtcttggagcacctagatgtcagcatacaggaaataaagcccagtgaagctcaggggaccaaggagccccagagggggaacaaggccgtgtctagcgctgagcaggctgaaggagcacctccacccctcaccacc

SEQ ID NO: 1243261 - DNA, 4001 bp, Homo sapiens
agggagaggcaaacaaaggccctggaattggggaggtgggatccatgcagagaggagaggggaaggaaggcatgattactccagaggctctattgcagcgctggcgggaagctgggagccacagcaggcctgggctagggtcccatggggctcaccatgacagcataagcgaaggccacgatgttgacaggccacatggggcagaagcaggacaggatggcaaggatgatgtagtcccgaggtttctgggtgccttcacccccctccaccccaggacctgccaactgggagctggggtggcggctcaggctacctcggggagatcctggatgcccactgtgtgcccttctcattcgatcctcctcaaccagctgctgcagcactcgggggggggccccattggctgggggggatttttttgagggtggtgagtgaggctcaggggctgggccctcttccccatcaccagcctgcaggggcaccactgccccattctcttgcttttcccctacactctcagacagaatctcaggggtggggtcctcctgggtagggagctctggttgaagggctggcttgggggtaggctgggaatctggccgggggtctggttggggagcaggctctggggctggttcaggtggggctgcagactccagcctggacccctggtctgcagtggcctctttgctcacttctggtttggacactgtttcttggcatgggtcttcggggctgcagttggcctttgattcccctcctgggcttaagctgaggtctgtggcctgggctgtttctgaggccccagccggggtctctgtggtttctggagccagcccagccttgggccctgagtccacaggggccgcagtggtgtttggacctggctgcggggcctctggctggtctggtacccctgctaggacctggggagggccagtttcagcttcagaatggccaggcccttcgcctggaaccttgggactctcctcaacccccttcatctcagagatctcagagctgctggctgccatcttgagatgggagaggggagagagcccctatggggaggatggaatagcagagacagcggcaaaccctggaagaggaggagataggcttggggtgaggagggaagagggcgctcagcactgcaggcccaattgggccacattcctgtctcagggccagccttgcactgcctctagggagaggaagaaaagttggggtttcctttgccttagggtgggacatccctgcgggaggagtgctctactcaaagtcttctgcttggagagccctggggaagattaacccttttgtaaacaggaccttctccagggtctctccctgggtccatccaacaagatccagactctcagatcccagcaccccaaaatcaacgagctgtgcaaatagcactccgacaggccgactgggcagaggacccgacattcgcattccactccctctgcatcctcccctcctccctgggctcccaggcggtgcgggttttcttgctgcgcgtttagggcgaggacgctcccgcccctttctgggggacctggttatctccttcgatcccctgtcagcccctctcccggggcttccctcgccttcggtgggctggcgcctcctcccgatggttcagcccgcccagcaccaccaccagccctccagacacccgcattcccgtgcagtccgcccggcgtcagccgtcggtcggtccactcctacccgcagcctcagtctgcccgggtctcacctcgacgccggcctccggacagctcccgctgccgctgctggcttttgcagcagccgcagcccgggagggagcaagtcagctagggagggagggaggcggcgggtctccctcttctcctctcccgtgtgctcatcccctcctctccggtcccctcccctacgctccgccgccgtcgccgcccccgcccctcgcgagcctccggcccctcccgccagcccaagggagccacgcgttacccaggcaaccggcccggggaccactcgcgccccctccctgccccttctcacgcgcgcctccaggagagacgcctccttcttaagtccccggcccctcccgccaacggtcaccgggattcctggaagagacggggatttgggggaaacggagagggttctgcgaggagacgggaccagtgagacaggcaggaccgggtggaggcgtctctacgagcaggagggcaaggaagatggggcaagacgcggggaggctgcagaggaggagcagggtggggtttggagagaatggagcctgcagaaaggagcggcagaaactggcgctggaaggctcaaaaaaggggccctggaaaggacggagcggggacaggaaagggaattccaaggggcaggaggagctgggcagaggagcccgtgtaaacacagagtggcccatgcccaggatgagggacaggtgcagctttcattctctacctcgctgctcccagtcctagggctcggactccccagcctttccgcagccgcatccacccaccatggcctcagggccgtgacgcgcgtggggagggatgcggctgggggctgagcagcggccatgagtgtggacgggggagggcggcattcccgtctggcagctctgtttgggtttctgacggggcctcttcaaacctccaggggctattctgggcctgtccgagttgggaattccccagagacctggaacttgctctccacagccacagccttggccccgccctgtatctgtgctgccgccagtaaggctgcccctggggagggcggagccagaacctcacagcctcacagggcagagcaaggctggattgacggacaccaggccgagaagaaacccttggggttggcggcagttcttagtgagggcaattcattcaatccagagccagaaacaggattttatttaaaatttattgtaatggggtccgcgcaaaaggaaggggtggagggtggggtacatgcaggggacacaggaacacgatgacatggccagggccacaacttcttctgtcgtggggaagagggatgaaaagacaagaccagggctggagctggggtggaagaggggagggggacactggctgcattcccccgcccccaggaagcacctctaggccctggacccctcgctcaccctggcccctaagactccatctcttctctgcctctggccctcctggctcttcctcctgctccccttgactttttcccctgacagattctcaagtaggacgatgttcagggcctgaccccaaccccccataccaccttatgaaggtacaacctttgccggccctgcttctgcccctcctcaaacctcaccgctttccctctttgggacagctctgatccccctccttcctctcctccctccccctggaaaaaaaaaaaaaaggaaaagaaagcaccaactccccggggaggggctgcagacagcagggggagaggactggaaggagagaagaggaccgtcgagggaagaggctcacaagtccctgggaagacagggcatgggcttacagagaggagagggggtacgggcagtggctgctcgtgtcctctgccacccctgcccactgtccaggggacttcaacacaaccgaggggacaggtttgtgtggggtcaggtctgacagaagaggagcaggagaaacaaatcgttaaaacctagcgaattcccctaagaaaacatttcttcctcctttccttctggaggctccttggttggtagggaaataggagttggtgggaaaagaggggggagaggagcttgtaccaagggactctactccattctcccctctcccccgcaaccaacttggagctcaccagggttgggagggaagtggctgagagctcacaggcaccccctccgcccccgagagggagcccacagctgtgggaggggctgctactgctgccgctgctgccgctgccgccgctgccgctgccgccgccattggacaaac

SEQ ID NO: 1243262 - DNA, 4001 bp, Homo sapiens
tctccttctggcccccacagcccctggaagggagagaactgggtgtttggtccctgccctggcaggtgaggagagactgcaagcaagaggggcatagcctgcacccccagaccaagcagggggctattgtgcctatgcaggggaacaggtgaacaaagacagttcctccctgacccgcctgtccccagcctcaccctcatcctctttgatgtacccccagccagtcacccagcagtctgtccggttctcaaactcaaatgtggaggcctggagacagatgggctggatgtgtttagtgtaggtgacaggtgcagacagcttcaccaaggcaatgtcatagggtgaattccccaggtagcgagggctcagatagatattcgatacgaagtaacgggtgtagtaggcctgcaggctccagaaggatggcatggaagtcagctggccaaactggaccatccacccggagggatcactaaggtcactatagctggcagaagagaagagagcagtcaggggccctggatggagggctggctacctgagcacaactggggtccagtgcaggaggggaaactgtggtgttgctgctacttgctaacacccagggtcccctgcagaaatgaaggagcccagacagaccacaaccaaagtcctaggacctgctcctgcagcagaagggtggggtcttgtcacctcccagagctgtcccaaggagccttgcattgagccaaggcctccaggggcacccccatgcagcccaaggaggaatggggagatgcaccacgccaatgtgggattggcaggatggagtccacacagcggcccgggggtgctggccttggctcagtgccccacactgtaccgcaccgtccaccaggaggggggatgagggtgggatggtcagtggtgaactttgggttgaaagaaaaagggagagaatacccaaaagtgtgtggaaatgttctggaagaacattctggaataacctgaacagggttccctccaggagacccaaagggaactggagtgggtgtaaccggctgcagcacagcctggggctcaggagaacaccaggccgcatccacgcacaactttcacgcccaagtctggcatcagaccagaggtaaagttcggtggcactccctccagccctgttcctgcccgtccccgcacccctccgttcgcacccccactcacgtttcaaagcagtgcgccgccgtgagtgcccagcggtggctgagcaggctcactccgcatacgtgggaatcccacaggcgcaggctcccctgccacggccaacgcccgagttcggcgtcctctccacccacgatgcgcgacgtgatgacccgtcggccgcatggtcctcggatggtcagaggaactgctgagccgcgggaggcagccccccaagcccgacctctccctttctccccttcaaccccgtccgggaaagcacgtttttgcccacccagggtcccctcgcgtgtgtgcagcaggaagtaggtgacactggagatcctcccacgtgctctgcagggcccgcccatccccctccagcgtccgttagttactttccacgccaacagagttctcgatcccgggggcgggggcgagagagcagtaaaggcccccctctaccccctcaccgccccccgtccacctcggcccaacggccctggcaggaatcgcgcgtcctgggcgccctacctgataacggcgccgcctcctgcgactctgcgggagacaagaagtgactccccgcggcctccacctcccgtcctccccaccgctcccccgcctccccatcccgccagcagcgccccgagctcacccggcttcctgagtccagcccgagccagcagcagcgccagcagcagcgccccgcgcgcgcccatggcctcctctcccgcggcctgacgccccctctgcctcctctcgcgccgggcccggggcgccccctgggggcggggcggggtgggagctctgccctctactcccagcttcaccctcctgggcccaagggctgtttggggcctctcatgcctggcagcgccctggctttcagcccctaggggcgggtcttcaaccacacttcttgatgtggcccagacccggtggaccccacagtccctttcttgtctgcagcccaggggtcccggctgccctcttggtgaccccgtcctccacctacaacctcctccagcaccaagggcctggccctgagccaggagtccccttaaagcctggggaccccctgaaggccgggtggggcctagaggcatggctgctccttcatgggaccttcttgggaaaacagtggtcctcggcccgttccacccagaatggggatctccccaagtctctgcccaggctgtccccactgcgggctcccgctgggctctcttcacttctctggaacaattttttttttttttgagatggagtttcgctcttgtcgcccaggctggagtgcattggcgtgatcccagctcactgcaacctccacctcctgggttcaagcgattctcctgcctcagcctcccaagtagctggggttacaggcgcgcgccagcacacctggctcatttttgtatttttagtacagacggggtttcgccatgttaaccaggctggtctccaactcctgacctcaggtaatccgcccacctcggcctctcaaagtgctgggattacaggcatgagccaccgcgcccagctgcaattccacttctgagcatacacccaaaagaactgaaaggaaggtcttcaagagatatttgtttttggttttttggggggatttagttttgtttgtttttgagatggagtcttgctccatcgctcaggctggagtgcagtggtgcgatcttggctcactgcaacatctgcctcctgggttcaagtgattctcctgtctcagcctccagagtagctgggattagaggcacctgccaccatgcttagctaatttttgtatttttagtagagatggggtttcgccatgttggccaggctggtcttgaacttctgacctcaggtgatctgccctctgcggcctcccaaagtgccagggtgaaggtgtgagccaccccacccagccttcaagagatatttgtatacccatgttcatagcaggattattcacagtagctgacatgaaagcaacccaagaatccattgaccactgaacagatcagtgaaaatgggaatgtacaaccagaacctgggaatcccgcctccctcaacttgaaacttgggaatagcgtattctactttcaacacttgcactagtggaaggttaattacatgaaagattaggcaaaatgtgtggttaggcgttctggttttccaataaaagtattaagtttctttggggaaagtacagataaaatgcttagcacagagcatggtaccaacgggaactcaatgagggcgcagcgggtgtgtgggagcttcgggtttcaggagcacaaggctgcggtgccttccctcagggcctccttccccagcagcagctgctcaaggacaagtcacatgcacagcctggccttggcctgctgggttggggcaaaggtccctgggcttctgatcctgcccctctcccagccagcaggacgttccctctggttcctgagtcccagggatccgctgaggcccctaggaggtgtcagctcctggttttgcccagggtctcagtcaggccagtcctacccggagatctgagccagggactcaggttcttgcctccagtgaggctgggggcttcccgcagaggccaagcctggcccgggggctgcagggaggccctggctgctgcatgggctgcagatggagactctcttgtctgctgtgcctcaggctgcagagtcacagaggggtcttcccaagccccacacctggagggcagggaggacagggacttgtggtcctaacccgactcctgacacataagggccagccggcccggagccacctctgcgggcaggagaaggcctcattgt

SEQ ID NO: 1243263 - DNA, 4001 bp, Homo sapiens
gatccagggccactcgctgtcagtgctgtcctcgccgcccacaacccggttcagctgctggggcttcccacaggctgggggaactggagggtacggtcaagttttgttatctccaacttcctacaacccacccccggaatcccaatccctaggcctgcaccccaagctttgcccacagcccaagctccgttcatgtccccaagctctacccacatcccaagtttcacttgcactccaagctccacccacaccccaagctccacccacatcctaagctccacccataccccaagctccgcccacctccccgtcccatccctccctccatcctcactctctgctggtcctcacctggccctggcctttccactcactccttgtcagctgcacctggtctctccctccccctctttccttaccctgctttccactctgttcaccttcctggctctctctctcctctggccctggcatctctcaagcctttctccttgcatccgtgtctccttcctgcctcccttcccctctagctctttccccctctcaccccagcccctttctgacctgtgcccaggggacggacacatagacactgcctgcgcgtgggcctcctcccttctccctcccgtcagagctgccagctccactcaccaggtatcctggccgcattgaggatggctgagggcaagagaaggaaacggttaggccggtgaggggccccaggacacagtggtgaggggccctcaacgcccagtgaggaaggcccccaacacccagtaagaagggatcccagtgcccagtgaggtggaggtcccagcacccagtgaggagggtccctcagcgcccagtgaggaggggtcccagcaccccctgaggagggtccctcagcgcccagtgaggaggggtcccagtacccagtgaggagggtccctcagcgcccagcgagaagcccccagcacccagtgagaaggggtccagtgcccagtgggaaggggtcccagcacccagtgaggaggggtccccagcgcccagtgaggagggctccccagcgcctagtgaggagggttccccagcgcccagtgaggaggggtccccagcgcccagtgaggagggctccccagcgcccagtgaggaggggtccccagcgcccagtgacgagggggtcccagcgctcagtgaggagggggtcccagcgcccagtgaggaggggtcccagcgcccagtgagcaggcgtcccagcgcccagtgaggagggggtccccttgagtacctggtggtgaggaacctctagccctccagtgcccagggagactctcaagtctctcaaccccagggcccctaccggcggggcatttcctggggcctggccaggccctggctgcacagctgtgaccctgccctcccgcagcttcccgtccagcctgccttccggggaccaggaccggctcctcgagggaggcacagacctgagcccctcggctctggacgctgctgccgctggtgtgccctcccctgacctcctgcggcaggaacaacacaaaacggtgcttccccagaggcaagcagcggaggacgaggagatgggagaacacggaggcgagagggagcaggcgatggcgacgccgacggtaactggagaccgaggcgcgctgcgtacttgctgcgttttctgtttcatcctcacagccgtagaagaaaccgaggcacagagcagttaaggagcaagagataaacagagcagaagcggaaaggagatgagagaggcaaggccaggagggagagagggagggagggaaggagggaaggagggtggaggtgagagggaggagggaggagcagcctccggacgtacctgtcgacgccagcagcagcagggaggtgaaggtgccgagacagcccccacccagggctgggggcgctccagaaaccaccatggctggtggggcgggggagcaggcagcaggctcgagagacccagggcgatgcgggtcagggtgtgtaggttccctgcaggtcgccccaggttttatcctgggaggcggaatgccgtcagaccagtccccaggtggctcccgcggccaccccggctgtgggtcctgggcagagggcggggctgcggggaggaagccagccgctacagggctctgggggggctctagctgagaccccaggatgtggcctctggaagggcaggggagggggcttgggcccagaggtccctgacattaattgtccaggggcagagaaaggtgccagggcactgaaaggaaggggttccgggctggggagggcctgggtttggagaggctgaagtctggggtactgggtgttgggggtggtcctagggccttagggatcaagggggtgcccaaagctcagtaacggctcccacctgcagggccccaggcccctgtgactcagcccagagacctggcgcaacccgggcttgggaatcccgttaacccacttcccgaaagctgtgaatcaggtgagtggcgaccttggtggcctcctggtggccgccctcctgtcgttcctggaggcggggctctgccctgcggttcagacacctgacaactcacctcacctggactcctgggaaggggaggagcccatgggcaccagggctcggccaagcaggggggttgagagaagaggggccccgggaagggctgggactcccaggattcaaagagctgctgggctgggctgtggggggccgggtcctgggctgggagtggattctcggtgcttccccccagcggctgccacagtggcaacccggggctgaatcctgtgagaccttccctgactcagtgccctgcagcgccccacacttgggacactcccacccaagcagggcaggcttcctcctctacaaagaggcaggagcctgcgccccttcactcattcgatcaacaagcctccagcagggcccttgctaccgccgggggtgaattaaaaacaaccatagtgtctgggtggggtggcttattcctgtaatcccagcactttgggaggccaagacggacagatcatgaggtcaggagttcaataccagtctggccaacatagtaaaaccccgtctctactaaaaatacaaaaaaaaaaaaattagccaggcatggtggcaggcgcccttagtcccatctacttgggaggctgaggcaggagaatcgcttgaacctgggaggcggaggttgcagtgagctgagatcacgccactgcactccagcctgggcgacagagcgagactctgtttcaaaaaaaaaaaaaaaaaaccatagtagtgaatatgtatgtaataaatatatttatacaaatataaatatagtatttatataatagagcaaacatttaggagtgccatgcattgcctcctaatcctcaaatgtctttattattcccactctgcagataaggaaactgaggcagcttagggcggttaagtgacttgcccgagattgctgggtgagtggtggagccggacctgcaccccaacactgggggtggctgctgggactgccctcatggaggcttcgggagcctggaggaggtgcctcaccctgcctggggtgagccctaacttgctccctgcagagtcagggtggcgtgggtcaggggcttagcagaccaccatggctgcttcagggactccatggctctgagcaggacgggttttgccctgggggtggactctgtgctgcccacctcctcagtctgttaagggttagggtggcagcaggacgactggcactttctcgtggcagagaggccatgccctgctccaccgagagacaagtcaaacagcagggccctggggagccccagaggatgcattattctctgtcccaggactcagagggggtttgggggaactgcaggaaaaggccacgcagagtggccaaggaggggcagtgtctctgagcagcagcagcactgcagcagaaatttctgctgggctcccccaaccctactcactgtcccccgctcagctctgc

SEQ ID NO: 1243264 - DNA, 4001 bp, Homo sapiens
cgtgatccgcccacctcggcctcccaaagtgctggcattacaggcgtgagccaccgctcccagccaagtcctaatcgtgatctagagatcaaggcccaactgaatgctgcctcctccaggaagccttccttgcttgcttgcattgtctaccttggaagccctatactctctcttgagctctctgtcctgatgggagctctgtctacatcaccctggagccagaatcaagtcttatcttagcccaggagctccgagaaggcaagggctgcatctggggggcctgatctcagggaatgtgtggatggacacaagtgtggctgtgggggctgatgggaaatgggggatgtggacagctgagcccttcagggtgggcgccctgtgggggctggaagcaacagccaggggtgccgggggtgtcaggagcattgtttggggcctgggcctgtgattcgctggtagctggtggggatggtgaagcttagtgggtaccaccagccagagacctggtgggagtgccaccctcgggctgggagtgaggacgtgtccaggagtccagcctctggtcacagctgttagtgaaccgactgcaaaactcattgccaaagagttttggcaatgaccttggttcctcaccccgctcaggggcagtcacagccttccacctcctgtgcacatggcttgctcagagggcaccatccttgtgctgggagactgggggcatggggtgggggaggccgggccactgaggggccactggtgccctcccacccaggagaacaaggaagcctggagtactggctaagctgcagcctgggatgacctgacccagccctgggaggtgacttgaggacagggaagtgtggtggctgccagactggctaggctagcccaggaatgtgagaggttttccctgacagagagtgtcccggcccgcagggaggggcctggcaggtggggccccctggctggcacctgctgtccctgacccaggactgggagagggcacggtggcgcatcaccggttcctctgtcagcaggagacagggccctctgccacctacaccccctgcccccagctctctactgagcctgcagccagcctgctggggcttccgggcacaggcagcagccctcggctcggccaccctcccaccccgagtatgatggtccaggcacttggagcctgagttcacatcctgcacgtaggaggcccctgtcctcacctagagaatggggggagaggccgaggtggcaggaagcagggagcctggccagagctggcacaccagtgcccgcggagaggcatgggaggaggtgctgcccagttatgccggtggggtcctctggggcctgtgcgcacacctcccaccctgcctccccactttggactccccacttggcacatctggagccttcccacctgctcaggggcaggagggatgatggcctgtcccacagccccagcctgtcccagggagtagggggctgagccggagccccaggcagtgcagcggagcctggtgggggactgcaccaccaggaccctgcaccttcacgactcaccaaaacacagcagcagcaggagcggcaccgccgccggccgcctcatgtcctcaggcctggctggggcgcagggccgtggtcggcggtggcagaagcgttggagcacgagcgaggtgcaggctccatgaagtggagttttatgctggagatgagcacaggcccggctatgcggcccaacccgtcggcccggcctgcccagctcctctcctcaggaaggaagcgcccagagccgactcctccgtgacctagccctgaaccccgagaccccagggcagacccctcaccccagcgcagcacggggtgccgttggcctcggttcctggaccctgagctgacccagaccccccagcagaccccgagctgaccgcggtgcacgcgaagtccgtccagcttcattcattattattattattattttttttaattttttgagacagagtctcgctctgtcgcccaggctggagcgcaatctcggctcactgcaagctccgtctcccaggttcaagccattctcctgcctcagcctcctgagtagctgggattacaggcaggtgccaccacgcccggctaattttttgtatttttagtagagacggggtttaaccgtgttggccaggctagtctcgatctcctgacctcgtgatccgccctcctcggcctcccaaagcgctgggattacaggggtgagccaccgcgcccggcctcattcagtattttattgagcgccgatggaacacagtggggctgggccgcgctggtgggaaagtcaaggccaggggtgtttgcggggccgagggcaggggaggcgatgggacatggggcggggtccggagttggccgcagcgaccctcctcccgggacagcaggccccagaagttcctcaggcgcgcgccagcgcggcccaggcggccgacccgggccccggctgccatcccttggaaggggcgggggcttcctggcaccaggcggggcggaagcggctccgggaaggccgggccggggttaccgtttcggtgtccccgcctggctctgggcgcggcgccgcggcggaagaggctcggggaggaagttatttggggcacggcgctgacgtcagagacagagtggggccgggccgtggggtcgggggcgccggacctgtttccccgccggcgccgggggtcggtactcgcgggcggggcggggccgggcggctccgggcggggctgggggtgcggccgttcccgcctcagccttgtccgcgcgcgtcgtggtgctgccctctggtgggcgcggggcgcggcgcgggcggccaggggtgcagaaggggcgctcccagcctcatggtccgggctccggctccccgcatcgccctccctagccccgccctcccgcgtctccgcctccgcctccaccgcctcctcccacccttccctccccgtccagtccctggagttcccgggtcgggggtgggaggcgggctgggcagcccctgggggtctggagggaaggagggagggcgaggagtgggaagaggggactccaaacgtattcattcatgtattgatttattcattcagtcagtcagtcatttctgagcagatttgagcccaatactgtccccggtttggggaatacaaaggtgacccaaacagacctcacctcagtgtgagagagagaacatcatttagcagagaaatctctaattataaaccgcgacgggctgggtgcagtggctcacaccgggaatcccagcactttgggaggccaaggcaggcagatcacctgaggtcaggagttcgagaccagcatggccaacatggtgaaaccccgtctctactaaaatacaaaattagccgggcttggtggcgggcacctgtgatcctagctactcaggaggctgaggcaggagaatcacttgaactcgggaggcggagatggcaatgacacgagattgcaacactgcactccagcctgggagacagtgagaccctgtctcaaaaaaaaaaaaaaaaaaaggagaataataattatcaaccacggaaagtgtttcaaagtgtctgggtgaccacatttctccagcaccctatggtcaggtcactgatgggatctcagaggcagtcttagagcctcgcaggtaactatttcctcttggcacctttctgtgtgttccttggtgtctgctccccaaccctccttttaagcccattcctctaagggtgtctctgccttaaaatcaagaaagtgacaaaagtcaagatgcagatcagggccaggtgcagtggctcacgcctgtaatcccagcactttgggaggccgaggcaggcggatcacgaggtcaggagatcaagaccgtcctggctaacacggtaaaatcctgtctctactaaaaatacaaaaaattagctgggcgcggtggtgggcgcctgtagacccagctactctggaggctgaggcag

SEQ ID NO: 1243265 - DNA, 4001 bp, Homo sapiens
cggttgggcagggcacaacccttgccccagctcaccacgcccaccaggacccagctcccagactgcaggcaggtcagaggtcccccagaatcaccctgcaggagaaagaggagcctaagtcccagccctcccaggacttcagttctcagggttccagacccctggcgtggtgcctctaggttggaggccaggatcctgagcctgagttgggatgtcctgggtcctggagttcagggagggagggtgctgggcacagggaggggactccggaggctggggaggctgggtgcacacctggcaggcgtccttgtggccctgggggtagccggcacacagactcccaggcagcacaatgcgctcagcctggggcacgtccgcgcccacgtggtagaggccgtcgcaggtgcgcgagtccagcagcggcacccttactccttgtagcggtcgccactctgggaggggcactgggggaagaggagggacctctgagaggaaggcgtggagcgggggccagtgggagaagctgagctctgagtgagaggaggttttgttccctagaagccgcgctgggtcctggattggggcagtgaggggctgggatttccagtcagatggaggaggacgtgggggctcccggatgcctcggagccccgccctcctgccttacctcctgggcggaggctgccccagccggtgacccggcatggtgtgccgggcggcgggcgggcgccgggcacgggcaggcagacgggttggacgcgagcgctcaggggcaccgggcgacgcagctgcagcagtgccaggtcgccgcgggccccgtcctcggagtagtccgggggcagcagcacccgtcgcacgggcaccgagagcgtgcggggcgaggtggagcccagacgcagcgcccccaggcgcacgcggtactcagctggcagtgccctcctgcaggacaggagcgggggactacttccagcaccgggtcctcgaccccctccagcccgcctcgaccccaacgcctctgccaggccacgcccggtcctctgcgggccttgccttccttgcacaccccgcctgggccctcggtgagcgctgacctggggaagcagtgcgccgctgtcagcacccactggggggcgatgagcgaccccccgcacacgtgtgccccacgatgctggatgctcgcctgccacggccactctccgtcccggccatcccggcccccaacgatccgactggacatgcggggctgcccgcaggctagaaaaggaccaggggcggtgagggttggctgaggacctggggcctgggaggcaggtgttggtggggagacacggggccgaggtccaggaggggctgactcgggtggactccgaggcttcctcacctgcagacttccttccctgagtcccagcagctcctggaggaggaagcagggaagggaccagattatagatttggtgtcaaataacggagttggaggggaggccagagatgaggaaggagggtgaaacaatgttgccctgacattgcgccaggctttcgtgccgtctgttatcttatttaaccctccccagagcactgtgaaggtgcagggggcaagggcgtatgagcatgacaccgacaagcacatcgaggtgtggtgaggtcaaggtcagtggcagagaggattgagcccttggaatcaagattagaaagcccaagagtgctccagggagcccggcccagggagcagtgagatgggagaactgggagccaaggtgtctgcggccctcacccccagtccctgtccccactcacccagcaccagaaggagcaggacctggagacaggaaacccctctcattctgtcttcaaggctgggctgggtaagggtggcactgcctagggcttggactctggtctggagccagcagggagaagagaggagagtcctggcccaggggcaccaatcctcacaccagcccgtcaccccctccgtggtccttctgtctgtcctcagctcctggtgggttctggacttatcctggtggcccaggctgtatacccttcgttctgcccagggcccaggtatgcagcacccaccacccagatatttgggcatccttggtctcgacagaagccctggagcctaacccccctcggtcatcctcactccctccctcatccccctcccccatcctcaccccctccctcatcctcaccccctccctcatcctcactccctcctccatcctcacccccctcctcctcactcccctcccttatcctcaccccttccctcatcctcatccctctctcatcctcaccccctccctcatcctcacctcctcctctatcctcaccccgtcctccatcgtcacccctgctcctcctcactcccctccctcatcctcaccccctccctcatcctcacctctcatcctcacccctctctcatcctcacccctccctcatcctcacccctcctctatcctcaccccctcctccatcctcagccccctcctcctcactcccctccctcatcctcaccccctccctcatcctcacccctgtctcatcctcaccccctccctcatccttcaccccctccctcatcctcactcctctctcatcacccctcctccatccttcacccccccatcgtcaccccctccctcatcctcaccccctcctctatcctcacccccttcctcctcactcccctccctcatcttcaccacttccctcatcctcaccccctcccccatccttcacccctcctcgtcctcaccctcatcctcacccactggctgcccctgcagcccccacagcccctggcttgctctcaccctcacagcctggcgccttctgctgactggggttgagggagggcctgggggcttaaagtgccaggagagcgcgaggctcagccaaggagtaatgaacagggccggggcggggctgtggctttaccggaccagcctcaaacaaagatgctttgagcagagcttcagaggtggcaggaaagggtcaatgggtttctcaaaggaagcctgccttgcgccaaggtactagaagtgggggctggcggagagcagtggtgcgggtaggtgctgggaggggtggcagtcaggtggggaagctctgcaggatccggggcaactcctctccaaacctgacctgggctccctgcagagcacacgttgctggagcttctgcgctccattgttctgtccagaaatcccatctcagacggaagtcctggccagacagctccacccagagaccccagcatggccagcccccttccagatccggggtctggagcagctggaggtggaaagggactggttcaaagttggtggcactccttacttgaccagaggcagggggagacttgaccttggggaccagtgcagtctttggtttggggtggccgagacagagcaagatgctggggtcaggggacaggaactccccttctctcgaggcccgtggaggaccggggcccggatggtccagggccctgtagttccctcttgggctcatacacagtgttcgctgcctagaagtctctcaagtccctctctgcatagtgaactcctcttatccctcagccttctgctctgccacctcctcctgcctcctttgcagccctgccatagttgtacttttttccttttttttttttttgtttttctttctttttttttttaaagagacagggtcttggccaagcatggtggctcatgcctgtaatccctgcattttgggaagccgagatgggtggctcatttgaggtcaggggtttgagacgagcctggccaacatggtgaaacctcgtctctactaaaaatacaaaaattagccaggcctgatggtgggcgcctgcaatctcagctactcgggaggctgaggcacaggaattgcttgaacccgggaggtggaagttgcagtgagccgagattatgccactgcactccagcctgggcgacgcagtgagattctgtctcaaaaaaaaataa

SEQ ID NO: 1243266 - DNA, 4001 bp, Homo sapiens
gagctgggatgggaaccctagtcggagcctaaacccaggaaagaaaaaactggaaggacaggtaaggagggaatggggtgcgtgtgggtgattccgtggtcttagtttgagaatccttgcagggagaaggctacatggagatcggtgtgggattcatccaccgacccgcagaaacctaccctccaacgctccccgcaggctccgctccgtggccccacctcctgaggccccgccctaggaacctcacctctcgaagccccacctccccgaggccctcccctcttgtcccgtcccactcacctgcctcctggacgtctccccagccggtggcccagcaggcggtgccgtgcacgaagcggtgtgaggcgcggggcaggcagacaggccacacggcggggcccaggctggcgggtgaggccaggcgcagcagggccaggtcggcgcccagctccacttggctgtagttggccggcaccacgatggcggccactgcgcgggtgtgcgcgccgtccaggggcccgtcctgggagtgcacgcccagcagtaccgaccactcggccgcgggctccagcgtcccattcctgcgctcgaccggggcagtaggaggttaggttgaccctatggagggggcagaccctcgttgggggcaggggctcagagccagaggggcaggtgctatccgatccagatttggtgctgatactcctcaaaggggaagagcaaatccgatttggagctggtggtgggggggtcattggaaagatgggattcagacccggatattgagtggagtggtgggaccagtccggcagccttgccccactcggaaccatgatgcctcgaatagcacctcgctttggggacagcttggctccaaattatccttgaggacggaagtggggcgggaggaggggaccaactgcgggggcgggggccagcttttggcggagaggggccaggaccagggcgaatactcacgtcatgaaacagtgagcagcggagaggacccaggagggggcgatgagggagcccccgcagatgtggccacctccatggtgcaggctcacttgccaaggccaggtgcccggctgcgcgtttgagccccccacgatgcgggccgagggctcagggcgcccgcagtctgcaacggggagccgtggaagccaaagctcccctcgggttccccactccagaagcccaggtaactcaggacgaaggcccgtcctccacccacttcagtttgcccctctgaacaaagaacatagaggacccaggcttgtctacatttctggtcttttccacctccctcatggcctgaccagccttagcctcctttaaggtctgagggtgccaaggcctcttccttacccagatcttcaggttcttcctgggtaggactgagagctgggagccagaggggaaagagaggaggacacttgtgacttccaggcctgcaccgcccagccccacttcctgctctccaacccccgaccctatcttcccacttccctgtccgttcagcaacccctgccagcacccatgccagtcctctggtcttttctgcctctgcacgtgactttcccccagtccggctaccttacctgagtcctggaaggctcctgggatgggactgatgactggaaagacagaggtaggcaggaagaggctggcgactcgcactcagtatgtgccctccctgactccctcccccagcctcctagcctccgtctccccagggcacccaggcctccctctccctcctctgatacatcctcgccttctgctgcctcacttccttctctctgacttcctgctccccacacagaaaccaggaatcctgctctccagccccccagatgccaggacccaggccctttgcagccactcttgtcccctgaggttaccaagcatcacaagggggaggagcaggtgccgggccatggcgctagagtcagcggaggcagagccaagtgaaggtctgctccctgcagggctctgtcactgcccaggcagcccgtgactcctgatggtcccaggggcagccccaccctccctggctggagcccatctctgggaatctgagaggatctggggctggaagggggaagctggggagcctgaaggccccacccagagccctgcgcacatctcatgtctctggaggcccagggtgggggtggaggacaggtgtcctagctcctggacacctgttgggtgggagagggagggatgaaaaacactgcaggcaaaggtcaaagaggaggacagtgttctgtgtccttggtgagcagtggcccttaggacaggggaagtggcccctcacgggcatgactcatcggagacctcacctctgtttggggtgcggctgccccagtggcttggccttttcttctcacacagctctggttactggagctgctggccaggtctgggacaggagccctagggaattcaatcccatcccaacaaaaggatcacagattccagcaggttgggcagggcatagggaccctgggagggggctgggcaggctggcgaggctgaaaaagcctccaccctgctctgtgttccagtgacaatgctcttagctgccctgtcacttactctgtgtgactttgggaaagtaacccaacctcttggtgtgtatcagtaagagccagtttaagggacatatgacttggccgagcacggtggctcactcctgtgatcctaacactctgggagactgaggtgggaggattgcttgaggctaggagttcaagaccagcctggtcaacatagcaagaccccatctctacaaaaaattaaaaaatacaaaaattatgaactgcagggcgtggtggtgcacgtctgtatcccagctactcgggagatgaggtgggaggattgcttgagcctgggaggtcgaggttgcagtgagctatgattgtgccactgcactccagcctgggtgacaaagcgagaccctgtctcaacaacaacaacaaaaagaaaaaaaaaaagaagaataagaagaagaaagaaacatatggctcttcaaagaggagttgaagagagtttaaggaagaaactatttatagaagtgtaggcagggtcaaaggaaaccaaagaggctgggtggctcacggctgtaatcccagcactttggtaggccgaggcgggcagatcacctgaggtcaggagttcaagaccagcctggctaacttggagaagccccatctatactaaaaatacaaaaattagccgagtgtggtggaactcacctgtaatcccacctattagggaggctgaggcagataaaaatgcttgaacccaggacgtggaggttgcagtgagccaagatagcgccgttgcactctagcctgggtgacaagagcgaactccgtctcacaaaaaaaaaaaaaaaaaggaaaccaaagagggatggtaacgcatcctggggccagcaataatagagagcccttgctacctgctggcctgaagaggcagagagggggcagttactggaacccagcaagagctgcagctatggaagagatagctgttaggagccgtggccttcaatagagaaatgcagcctttaccagcagagagggagtggggaaagaaaaatccccatctcactctcatctcatcctctctatttttaattaaaccaattaaaaaattttagagacacggtctcactctgtcacccaggctggagtgcagtgctgtgattatagctcactgtaacctcgaattcctgggcttaagcgatcctctggcctcagcctcctgagaagctgggactacaggcacgcaccaccatacccagctaatgttttttatttttgtagagatggggtcttattatgttgcccaggctggtctcaaactcctgtctcaagcgatcttgctgcctcagtcttccaaaagtgctgggatcctcccatcctctgatcaccccctggctcttttcattgaaacctcccagaggccagagttcaagggagaccatt

SEQ ID NO: 1243267 - DNA, 4001 bp, Homo sapiens
ctgaaacctctgcccctcacgggttcaagcgattctcctgcctcagcctcccaaggagctgagattacaggcacccgcccccacacccagctaatttttgtatttttagtagagacggggtttcaccatattggtcaggctggtctcgaactcctgacctcaggtgattcacctgcctcggcctcccaaagtgctgggattataggctcatgcgcctggcctggtttttatcttttatgccatatctttactgtgcctcttctctgtttagatatgtttaagtacataagtacttaccagtgtgttacaactgctctggtatttagtgcagtaacaagctgcacaggtttgtggcccaggagcaatgggctagaccacacagtctgggtgtgtagcaggctctgccatctgggtttgtgtaactacactccatgatgttgacacaatgatgaaagtgcctcatgatgcatatctcagaacatatcccggtcattaagtgacacatgactgtaggctacaaatcactgaattgtgtccttcaacactgaacacttgaaaattttatggtttgtgagttgcctcaatttttaaaaatcattgcctgaggcttctgtcaccaggtcctcccgaactccccctcactccttcaggcccaggccaagctggcctccctctcacactgtcctgctggcccccacagtccctggaagggggaagaactgggtgtttggtccctgccctgacaggtggcagtgagagcagaaaagcaagtgaggagagaatgagagcaggaggggcgcaggttgcagccccagaccaaggagggggctgctgtgcttgtgtagcgggaacaggggtagagggtaatgctcaccccgcacccccatcaccccacccggtctatccccagcctcactgccactggggctgattaacccccagccggtcacccagcagtccggccggtgcacgaagttgaaggtggaagactcgatgcaaatgggctggatgtacgcattgtaggtgacagaagaggccagtctcagcagggcaatgtcattgcgtaaaaccccaagtgcgtcagggttcacaatgatgtcctgcactttgtaacgactgctgtaggcccgcaggttccaaggagttggcctggaagtcagctcgcccagctggaccgtccactcggagggatagtagtgcctagcagaaaaggagagagggcggggagccttggaatagggggctggccgcctgagcacgctggaggcccagtccctgaggccaagctgctgggtggctactgtttgctcatcctggaggccattagcaagtctgaggccccggccgccccccagactcacttttggaagcagtgcgcagccgagagcacccagcggcggctgagcaggctccctccacatcggtggcgtctcctcaggcgcaggctggcctgccatggccagcgcccgcgcgcggactccactccgcccgccaccagcgcgtgaatttcccggtggccgcaggcctctgggatggacagacggacgcggctgagctgccgggtggggtggggtgggcaggcccgccctgcccggctttgccccggggtgcgcgcagcggggggctccccggggaaccgcgcgccaagaaggtgacgctagggaccctcccacgtggtgggcagtggacggtcccacccctaggacccattagttacttgagagcatcacgttctcgggacctggaacagagagcagtagatgggcccccgtgcaccccggcccagccgccctggctggcatcgcgcgtcctgggcgccctacctgacaacagctcctcctcctgcgactctgcaggacacaagaagtgaccctcgcggcctccacctcccggcctcctcgctgcccccggtcccgcctgtagcgccccgagctcacccggcttcccgagtccagcccgagccagcagcagcgccagcagcagcgccccgcgcgcgcccatggcctcctctcccgcggcctggcgcgccctctgcctcctctcgcgccggaccggggtcgccccctgggggcagggcgggttgggagctccagcttaatcctcccaaaccaggcccaagggctgtttggggcctctcaggcctggtagcgccctggctttcagctcctaagggcgggtcttcaaccacattccttgatgtggcccagacccggtggaccccacagtccttttcttgtctgcagcccgggggtcctggctgcccgcttggtgccccctgccctccacccaccacctcctccagcaccaggggcctggccctgagccaggagtccccttaaagcaggtaggcaaggccttcctgagggcccggtggggcctggaagatcgcgccactgcactccagcctgggcgacagagcaagactccttctcaaaaaaaaaaaaaaaaaaaaaattagctgaggatggtggcacacacctgaagtcccagctacttgggaggctgaggcaggagactcactcgagactgggagatagaggctgcaatgagctgcgataatgccagtgcactctagtctaggcgacagatcaagatattggaaaaaaaaaagaaagaaagaaaagaaaaagaaagaagaagaaagaaagaaagagaaaaagaaagaaagacaagaccttaacacagtaaagtccacagctaaaatcatactcgatgaaaaagtgaaagcttttcctctaagatcaggaacaaggcaaggatgcccagttttaccaatgccatgcaacattgtactgaaacttctagccagaataattagacaaaaaaaaaaagacgtgagaatcagaaaggaagaagtaaaatacttccatttgcagatgacatcttgtttgtagaagtctctaaagatttcacacaaggccgggcgtggtggctcacgcctgtaatcccaacactttgggaggctgaggtgggcagatcacgaggtcaggagatcgagaccatcctagctaacacggtgaaaccccgtctctactaaaaatacaaaaaattagccaggcgtggtggcgggcacctgtagtcccagctactcgggaggctgaggctgaggcaggagaatggcgtgaacccaggaggcggagcttgcagtgagccgagatcgcgccactgcactctagcctgggcgacagagcgagactcatctcaaaaaaaaaaaaaaaaaaaaaagatttcacacaaaaaaactgttagaactaataaattcagcagttgcaggatacaaaattaacactcagaaatcagctgtgtttctatatactagcaatgaacaatccaaaaatgaaattaagaaaaccgtcccagccgggtgtggtggctcacgcctgtaatcccagcactttgggaggtcgaggcgggtggatcacgaggtcaggagtgtgagaccagcctggccaagatggtgacaccctgtctctactgaaaatacaaaaattagtcgggcatggtggcgcgtgcctgtaaccccagctactcaggaggctgaggcagagaactgcttgaacccgggaggcggaggttgtagtgagctgagatcacgccactgcactccaacctgggcaaaagagcgagactccgtctcaaatttaaaaaaaaaaaaaattaaagaagacctaagtaaacgaaaagacattccatgttcatgaattaaaagacaatcttaaaaccgcctttgcaaacatatcaatgagaaaaacctaacgtggctgactccatcttgcttctagcctcacaggctggctgtccttcgctcattcctgggtgtagaccaagctaaccatgggaggaatttagtttatagtttaactttgaagtaaggatgataatcatccctccctaaaactgatctcctccttgttctggaaatgaaactgtattcgtaaaacaaatgaaaggctgccgagactaagtcgcatgctgacacagctcttggtgtgctacggtac

SEQ ID NO: 1243268 - DNA, 4001 bp, Homo sapiens
cccccacctcttcggccccagggctgagtccctcacgctgcagagaacccaggaccactgaccaggaattcagttctgttgctgctgccctggaaggggaaggacaaggtccaggctgctgagtgcaagggtagacagtgacaccatgggagaccccacaggtaggtggaagatagcagagagcactccacggctttttctttttgaggtagggtctcgtcctgtcgcccaggctgcagtgcagtggcatgaccatgactcactacaagccttgacctcccaggctcaagcgatcctcccacctcagcctcgtgagtagctgggactacaggcgtgcaccaccatgcctggctaattttacagtttttgtagagacatggtcttgctatgttgcacaggctagtcttgaactcttgggctcaagcgatcctccctccgtggcctcccaaagggctgggattacaagcgtgagctactgtgcccggcctcagtctgtgactttaagcgaggtcattcccttgcaacctgagttttctgatttgtaaatcttctaccatgaaaggtggttgttacaattaacttgacaatatgtacccagtacatggcagattctcagtaaatggttctttattattactctagaggcagggactagccttgtggggcttgagacaaattgtccactccccagagccggagaccctgcctgaccccagccatgacttacttttcaaagcagtgggcagcagtgaggacccaggtgtctgccaccagggagccgctgcagatgtgggctccttgcctcctcacactggcctgccagggccactcgccagggactgtgttgccctcctgaggcttgggggggccggggccacgctgtccacaggctgtggaaaggagttagtcacactgacagcagatacctgtcctgacctcaccccagtcccaacccagacccaagtaagacctaggccccgtgtccccagaccttaccacgctgagcggcttgaagacctgggaagagagagacacaggtaagatgcagggactccaggcctgcctagctttggggaggagaggggatgggctggggggcgggcccagggtccttgcctgtgactctgattaccttaccagcccctcccagaatgaaaatatttatatgaggccgagacagcttttattggaacctattcagtgtgcacactcagtaattaattctccttcagctgtgctcagcactctggggcttggggttcagcttgggagtaggccagccctcctccaggcttcagaacccccaactcctgcccccgccactgagtcagccaggcggcctgtgtgtgtagagagcattagcttaattgtcctcttagcagcagaggcctaagaggaaggattagaggcctgcatcatttccaagtggggagggccccaagaaatggagacttacctcaccctggtctagagactcagtcttccccaccttcccagaaactgtctgagagcccgccagagagagggcccctgcccaccgcccctcacaggcacacaggcaccccatgagacagctgagccaggctgcccagaggatggatgaaaagaaagggaaactgaggccagaggagcccagagtttgcctgacgtcattgtggaagtcgagggggaggcaggcacaggacacacgcaggcagcacctcacacacacacaagaccacaggccccgccaacgcaaactgcagctggcccgagaaaatctcatccatgttgacacaggtggccacatataccaccccacagagtcctacggagttacatccccactggtggactgtcgcccacaggcggtccccccaccaagaagcagggactgctggggcagagatggcccctgagcccccaccaggccacacccataccccagcacatggcggcttaccctccatgaggactgtggcacccgcgatgagcagcactgggccccagcaccacttcatgctgccccgggccactctgccacctgtgctccactctgagagaggccacctgggtctccctggctccacctctgctccacctccagttggctaggattcagctgtctgcttgccctagccagcagttcctagctctggggctgtggctgtgtgaccctaggcttgtcaccacccctctctgggccttagccgtggagccaaattgtctgggtttaaatctgtttccttactacttgagtggcctgggagagctaacctgcctgtgccttgtctgagaaacagttgttgaatggaaaacgtctcaatgacagcctggcacagggcaagctcactcccagcatgaaagtgccatcctggaaccatggagggcacgtgggcagctcctcccagtccccacttttcatttccactcccccacttctcttccagccagggctaggtgggtttcacatgccttctcccaggtctgctcagagacagtgtgtgccaggctgagtggtgaggagccagcacccactgctgcttgctcgctgtgagcctttggcaaatcccagtatctccctgggcctgctggcttcctgggaaacagggtgacagcggtgcccaccttcctcataggcgcagaggactcggtcaggcgggaagaacactttggcgcgtgcctcctcttcctcttcccactcctaactcaggctggcccagaccattcaagaaccctgaccccaagacagaggcagctgtgggtaaggtttagcatatattatagatgctggccgggcatggtggctcacgcctgtaatcccagcactttgggaggccaaagcaggcagatcacctgaggtcgggagtgcgagaccagcctgaccaacatagagaaacactgtctctactaaaaatacaaaattagccaggcctggtggcgcatgcctgtaatcccagctactcgggaggctgaggcaggagaatcacttgaacctgggaggtggaggttgtggtgagccgaaattgtgccattgcactccagcctggacaacaagagcgaaagtccgtctcaaaaacaaaccaacaaaaaaaaaagcatatagatgctggagccagatggaccaggtggattcaaatcctgagagcctcctgcagtagctgtgtgatctcaggcatactaattagccactctgtccctatcatcaagatagggataataatagtacccacctcataaatcactgtaaagattaaacgagtttaacacgttaacacaagtttttttttgttttttgtttttttttggagacggtcttgctctgttgctcaggctggagtgcagtgatcatggctcactgcagcctcaaccttctgggctcaagcagtcttcccgccagcttcccgattagttgggactataggtacatacaccaccatgcctggctaatttttttttttttttttttttgtagagacaggggtctcactattttgcccaggctggtctggaactcctggcctcaagtgatcctcctgccttggcctcccaaagtacagggattacaggtgtgagccactgcaccctgccaacacaagttcttaaacagtgcttggcatgtaggtaagtggtcagggcataataggcaaaacaaaaaccttcacaacctggccctgaccctccaaggctaccaatactggcttggaatggtcgataaggcaactggaggggttaaagttaaactcaaggaagaacttcccagcaagcatttacagaaccagaagggcagcctgcccttccaggtgtgtgctcagccttcccaggagaggaggcctggctcctgtgggcagcaggagcgagctgccagcctgtttcctgggggtgggggccaatggtgccccaggccttgctgactccacacactggagatgagactacccataaccacccttcccagcaggccctccactctccctctgactcacccttcccagctccagagaaggcaacaccgagggagg

SEQ ID NO: 1243269 - DNA, 4001 bp, Homo sapiens
tgtgcaagtgtgtgagtgtgtgtgcatgtgtgtgtttgagagtgtgtgtgtgcgtgtgtgtatgtgagggtgtgtgtggactttctcatgtctcccttctaaccccagggaggcagggcagggcgggctgggacggcagcaaggtgggacagagcctgctttagctagctgtctcccctccacctgccctctgtaggctggaattcttagtcctgggcagcctagaggtcaagggaggaggggaccgcagctgccacttctgccatctgaggctgtggctgcctccaagacacctgcagcagtagaagccccctgctcccgggaccagccctgcagttgggggttgtagtttgcaaaagagcagtattctcctggaaggacagggcaggggctgggagtgaagaggcaggcctcttgctcacccctgtacccagagggccttattttcctaaccacactcccaccctaaggattggccctgactttagtttcctccatccacgtcccatgattcacttctttgcctggttcctgccaccaatgcaggccgcccggtgcaaagtgccgtgagtcatcttccctgagcccctccttggacattaaggaccacttcatcttcccggatgatccccttctgtgccacgtgtgcagctaaagtcagagggaggaaagcagcacactcactggtggaagaatagagaaggccgagcagcaccaggagcacccctcgcatcttgccatccccagagagacccgccgcggacaccatgggcagctggggaaacaaaacccaatgactccatcctcttcccaaacacatgcagggttttctatgcctcttttttccatcctcttcccaaacacacatgttccctcccaaacatcagaggctccccctctttctactaacaaaggttccaagatgtagggcactgacctgtcttatccctagtgcttggttctgtgtggtaaagaggcaggaccagttggcccgcactgtggtttgtgagatggccagagaagagagggcagcttactcttgtcagttttcttctcaatccagcccaagcccctgagcaccccagagagttgggtctctgaaaagggctgctttttgactcgtggaattcaacccttgccttaactctgtagccataaaatgctgctgaaagaaaagtagagttttagtggaagcccaccctgggattaatgcctctgctgtggttttacccttctaaactctgctggctaaaagaacgctagggcttctgttaactgttaacagcctgtttttttgttttttattttattttattttttttgagactgagtctcgctcccttggcaggctggagtgcagtggcacgagcttggctcactgcaacctctgcctcccaggttcaagcgattttcctgcctcagcttcctgagtagctgggactacagatgtgcgccaccacgcccagctaatttttgtattattttgtaatattttgtaatatttgtatttttagtacagatggggtttcgtcacgttggccaggctggtctcgaactcctgacctcaggtgatccacccgcctcagtctcccaaagtgctgggattaccagcgtgagccaccgtgcccggccaatagcctgtatctttacataggaacagccccagcatttagcttagttcatttgcaaaaccgcggtaggaagtagacactcgagttatcgccattttacagattcagaaactgatactcagagacatcaactagccagtccaaggtcacacagctgtcaagcaatgcacagaagcccaaggaacccatgtgcacagttctaagtcaccatgttccactcatgacactggatgcctcttgtcctcagaatggtcctcagagttcgtccatgaactgttcctgctcaaggagaaatgaactcaggctggcctgacacagtagagttcaacagaaggatttcttctactgccttgggaagaatgttccattgtggcatcacggttaccatggcaccaccaagcaactgtctggacatggggacttacgaggagctaggatgaaaggcctccttgttgcttagccttggcagggctcttctggaagccaggctctctcctagtctgagaaggcaagctttttgctggattacaaagtcttctctggtcgtggccacggtctgtctaccccactcagcgcccgccctgtgtccacacatgcttgtcagactggactgaggaagcccacaactggggtgggtttggaatttccagtccccgtcagcatcttacactcccagggtggtttctttcagacttagcccagttttctttagcctctcagtttccgggtccaatctaagctaccagaccagctctgccaaaccagaggcccagatgggatctgccactccagccactgtgagcagctttggtttcagcccaaatgccaggactcgagaagtgtcgacaaggttgaggtaagatgttaattccacggagccacagggggagggtgggcgcacaggcctctggtgcagacgctcagaagatccttactggatgggtagatgaatggctgatggaaggcaggaaggctggtgagaaagtggaaactggctgggcacggtggctcacgcctataatcccagcactttgcgaagccgaggcaggcaaattgcttgagctcaggagtttgaggccagactgggtaacatggtgagaccctgtcttttaccaaaaatacaaaaatttagccaggcgtggtggcacacacctatagtcccaggtactcgggaagctgaggtggaggttgcagtgagctgagatcgcaccactgcactacagcttgggcgacagagtgacagcctgtctcaaaataataataataataataaagtgaggcctgagtccaaagggagccgctacctccttcccccatggttcccctgatgtcctgccggcttcaccaccctccctcacctttaaccctgggcaggggggcgggggtattggcttctgctacaagaacagaaaatttttggcagtgggagaagtgcgagttgattctttaatttgttccacatcacaggtatcaaaaagctgtattttaaatttttattttttattgtttttagagacaagttcttgctctgttgtccaggctagagtacagtggtgcaatcacagctcactgcagcctcgaactcctgggctcaagtgatcctccagcctcagcctcccaagtagctggaactacaggcctgtgccaccaagtctggctaatttttcatattatatttttttgaagagatggggtctcactgtgttgcccacgctggtctcgaactcttgggctcaagtgatcctcccacctaaacctcccaaagcattagccattatatagatatgagccactgcacccggccctcaaagagctttcattaccatatgtttcctccctcacaatccccagtcaccctggcaggacaaaggcatttcctgagctttccaggtgagaacgtggtggcccagaatgtgtttctcattcagttgttctttgcttaatacccgtatccagccgggcacggtggctctcacctgtaatcccagcactttgggaggccgagacaggcggatcacgaggtcaggagatcgagaccatcctggctaacacggtgaaaccctgtctccacttaagaccagaagtcttaattttcatgaactcacatgtattcatcttattcagttaggactctttgtgtcttgtttaagaaattcttccgtagctcagcatcagagatctagtctactctatcttcttctcaaacccttgaagtcttgtttttcacatgtaagtcctcaactgtatggattcattttttgtgcatggtgtggatacttagttatgccagcatcatttgtcacaagtctccaatgtgactccagcacatatcaaagtataaatttctttgttgaacttctctttgtactt

SEQ ID NO: 1243270 - DNA, 4001 bp, Homo sapiens
tccccatccttactgtctggcaaacttccctttgcctgtggatgcttgattggaacagcagcccctccgtagacaggcgggcttctgctggctgagttgggcattgcctccgagcccagcaccccccaacctccaccatgctccccgatgctgcccagtctcacaattgttccggagtccacaactgtgtctgtttccaccacaccaatctgggcattccctaggggcagattctcatgtctgcagtgcctgtggcgtcgtggacatatattcaacaaaccaacagcagaactgggctcctgtgatgtgaatgtctagtttccaggacagccccagccccacccccattgaggccactttggagtggagcccaactgctcttcacaaagtcatctaggagcagagaaaattgcagaccagatctttctctcccttatcatcatgacaatagccactatttagagagcctagcggctgtgccaggccctggaggggctttcgcttcctcatctccctgcatcctctccacagccccaggagacggacatgaccagcttcattttagaggtgaggagtctaaggcttagagaagtggggggacttggccaatgacacacagccagtgcatggggaagccaggattgaaagccggtctgactcagagctgggttgggtgccttccaagaaaggagacccttggtttggttccctcaaaaccacctccaggatgggaacggtggctcacacctgtaatcccagcactttgagaggccaaggcaggaggatcgcttgagcccaggagttcaagacctgcccggccaacatagtgagacccacatctctaccaaacaaaaacaaaaacaaaaacaaaacacaactagctgggtgtgatggcatgcacctgtagtcccagccactagggaggctgaggtggggaggtgggaggatcacgtgagcccgggaggctggatcactgagactgcagtgagctgcgatcgggccactgcactccagcctgggtgacgacagacccagaccctgtttcaaaagacaaaaaccaaaccaaaaaaaccacctcgattgccccactttgggagtcagacgtggatctgaatcccagctgcaccttcactggcagtgtgccctgggcaagtccctgcttctctgcccataaggtgagggctaaaaccccccactctgggagccctaagagaatctagttggaaggcagcccagctgaaggccaggcactggttaaaccccaggggaatccgatccaagtcacctccccctcccctcctccctctccgaggaaagtctcaccttctgccccttccgctcctagaaagaaagagaaagaggaggggtgagtagggaagactcgggttccctgaccccttagtacccaccactgctccagagggctggccccttccctgacagagccaaggtgggaaagagaggccaagagctagggaggccgggggttttcttgggccccagacaagggcacaccccagaaaatgatcacgccggctccctccagtgcattgtccccaccctgcccccacgtcctcacttacctgtccccgaccggagtaatccaagatagagcagaatggccacagcccccagctgcccaggccccaggacccccttctgggccatggcccaggacaagggcccctggggcagactccaggcacgcaaggtaggaagccttggggtggtgtcgaaggcaggacccagatgttggctcagagggaaggatcccagaatccgggctggaaaggggcagcaagtgtccaaggctggcctctaaggcagggagcggccgcaacgggagacgcctggagtatccgaagcgagcagtgtggacgagtcaccagcaccgtctggccacgcagggtcctcccaggagtggctgcacctacctgcccgcccctcccctggccccgcccactggctgggctccgccagctcctcttgccaccaaagtcatgagtcctttcagagctgcaggcccgtgtgtgtgcatgtatgtgtccgtgtgtatgtgtgtgcacatgcataggccttttgtgtgtgtgtcccggtgtgtagtgtgtatgtggtgtgtgtgtatgcctgtgtaggctgtgtgtgtcctcttatgtggtgtggtatgtgtgtgtgtgtgcatgtacaggctgtatgtgcacatgtgtaggctgtgtgtgtccctgtgtgtgtagtgtgtgtgtctgagtgtgcgtgcatgcacgtgcatgtggtttgtgtgtgtgtgcagtctccctggaatgtgacgactctcctccgcctcaggtctttcaggttatctcaggccagttatgccccccagggcctggccccagcttttattatctggagccacagccactcctcccttcttccctccctccttaggctggttatgggagcttaagacactatggtctgtcccctgccaggccctttctgcgatgcctgcacctcatgggtggtggcgagcttgtggagcagcaccaatcatcccacagacatttcctaagtgcctatgatgttcccaggtgtccaggacaaaacaggcaccagccccgtcccccttgagccctgagctcatggtgaagtaggggtgacacacttcaatcaaataatcacaaacaggctggcaaggtggctagtcggctttgggaggctgaggctggagcatcacttgaagccaggagttccagaccagcctggggaatatagcgaggcctcatctctacaaagaaatataaaaattaggcaggcattgtggcgcatgcctatggttccagctatttgggaggctgaggcaggaggattgcttgagcccaggagttcaacgaagcattgagctatgatcacgccactgcactccagcctgggcaacagagggagaccctgtcttaaaaaaaaaaattgcaattacacaataatttcaagctaggaatagtgatgaaaaagaatggcgtgagcacaccacagcctggcaaaggctggcattgtgaaagggtcctcgaggaattgccttggaaactgagaccgaaagggattataaaaggtggtaaggcgaagatggggggatggggtgcagagggcagaggctcagggaaagaaggcttgccgtgtggctgcggtgggagtgaggcatgtatcctccttgagggccactctggccgttcaaaacacctgttgaggctgggtgtggtggctcacgcctctaatctcggcactttgggaggccaaggcacacgaatcacgaggtcaggagtttgagaccatcctgaacaacatggtgaaaccccatttctactaaaaatacaaaaattagccaggcgtggtagcacgcacctgtaattccagctactcaggaggctgaggcaggagaatcgcttgaacccaggaggtggaggttgcagtgagccgagatattgcgccattgcactccagcctgagcgacagagcgagactccgtctcaaaaaacaaacaaacaaaaaaaattgtggagcttggatgtggtggctcacacctataatcccagcactttgtgaggccaaggtgggaggatcattctcaagatcaggagtttgagaccagcttggccaacatggtaaaaccccgtctctcctaaaaaatacaaagaaaattagccaggcgtggtggcgcatacctgtaatcttagctactcgggaggctgaggcaggagaattgcttgaacctgggaagccaagattgtgccactgcactccagcctgggcaacagagggagactccatctcaaaataaataaataaataaaataaataggccagatgcagtggctcacgcctgtaaatcccagcactttgggaggctgaggtgggcggatcatctgaggtcaggagttcaagaccagcctggccaacatagagacaccccacctctactaaaaatacaaaaattagttgggcatggtggtgggcacctgtaatcc

SEQ ID NO: 1243271 - DNA, 4001 bp, Homo sapiens
ggcaacatggcgagacctcgtctctgtttaaacaaaaaaaaaaaaatctcagccaggcatagtggcttatgcctgcaaccctagcactttgggaggccgaggcaggtggatcacctgaggtcaggagttcgagaccagcctggccaacacggtgaaacaccatctctactaaaaatacaaaattagctgggcatagtggtgcttgcctgtaaccccagctactctgggggctgaggcaggagaatcacttgaacctggggggtagaggttgcagtgagccaagatcgcgccattgctccagcctgggcaaaaagagcaaaactccgtctcaaaaaaaaaaaaaaaaaaaaactaactcagacagtaaggctcttgattttgtatcacaaaattatcccaggagattttggactatccaggattaagaggctgtactacctaccacacacatacgctggcatttgctgtgctcatcttagatcctagccctgataggtgctcaaaaatacagttgaatctatccattcataagtcagcattcagcaaatgctactggaggctagcccctattttatgccaggcacagagccagacatatgcagacagaagaccaccatgtgacacaacaggatgtactcaatagtagcagcatggatatagaggagttaatggttacatgccaagcaaggtagatttttttcctaggaagtgacatctcaggtggattttataggacagatgtaagtttccaacactggtaggtggtcggtggggtggaaggcagtgtatagcaaactgagaaaactgcgttatctaaagcacaaggggaccaagcacagtggctcacgcttgtattaataatctcaatatgttaggagcctaggcaggagggtctcttgaagccagctctggcaacaaagccagactccctggctctacaaaaaattttaaacttagccaggcgtggaggggagtgcctcttgtctcagctactcgggaggttgaggcgggaggatcatttgagtccaggagttcaaggctgcagtgagctatgaatgagccattgcactccagcttgggcaatagaggccttgtctcaaaattagtaatactaaaacacaaaggtatgaaaccagagctaacaggagcgccacacgttttaacaacaataaactacgtaaagggagcacagaagtgctccggtgttgattggctggttaaaccttcaccagattacgaagagccctgaatgccttgctaagaagtgcggcctttgtcctgaaggcactaaggaactagtttcaggcagtgaaggacttactcagattttcaggtgggaattatcacttcagccgctttatggagggggactaagtgtgggggactaggcttccccttgcaggtagaggaatgacaagcttgccaagcaagcaacccagctggactcagacctgctatttcccagcctgcacaaggaagcgatcagctgccccgccggcccctggcagacgcaaaggaggggtgtggagtaggcgccgggcgcgagaaggcagtaaggacaaggacaaccaggttggatcaacctgacccgctctggacgcggggcggctgaacagcaagcaggcagggcaaccgaccacgtccaccaggcccaagcgggcctggagacgggctatccagcacgacagcacgttccgaggccagtccagactcggacgccgggaacccgagcagccatcgcccggcctgctctccaaccctgtaggccctggcgcacggggcacgggccgacgctgcaggctgaccaggggcaggccccggagcgccagaaagcgaccacgaccacagttcggctgcccctcccgcccgtcgggccgtcgtcctgggccgggccgcctcacctcgcgcgggcggcgggctcttcggcgtctcggcggctctgccggccatctccgggcaatggcagcggccgccgccgccgccgccgccgccgccattctcgggcgttagcgtcgtggcgtcatcacagcgcgcagctgacgccaaaacaagcctacggggcgggtcgggggcgggtcgggggcggactctcccgaaactgggctacgcggctggcggatctccgagcgtggcctgccaatcaacctcttcggggcggggacgggcactctcctgaaggggtgggtctatttgtcgctcaaagtaacttgaccgctgcctgcgagacgggtcggtgatagaaaaaggaaggatcgcgggaaatagggagaaagtttcaagtttctggttgggggaaaggggactctgtaatgcgagcttgggtaaacaatgctttccaacagaggtttctggaagtgcctctggaactccgcaaaggatagacttaattttcattaacaaaatctattttttaaaactgcacttagaataatttcaacactccatgtgttgaatttggcctccatcaaagaagagatgcaaagggttaatttgtagataggtgaagtcaatcttgggccaacttctggactcatggttatttgttgttgttaatttaatttatatgccgagtctgaaaagcaagcggatttttaaaaaattgttaccattcacaatgacttctctataggatcagaactggttcactttacagtcaacccaacttggaggggttaaaataggtgctgcagatggtaagtgcattgtaacctccatccatcttccccatttcagtagctctgtattcaaatctttattgagtatgtactttgcacatggaactgtctttgattgactgtataagctaatgttatactttaaacctaaaaataaattaacaccaataaaacattgtcgtcggctgggcgccactgctcacacttgtaatcccagcactttgggaggccaaggcaggtggatcacctgaagtcaggagtttgagaccagtctgaccaacaaggtgaaaccctgtctctactaaaaatacaaaaattagccaggcttggtggcaggctcctgtagtcccagctactcgggaggctgagacaggagaatagctacaacctgggagacagaggttgcaatgagctgagattgcaccactgcactccagccttggcgatggagtgagactccgtctcaaaaaaaaaaaaaaaattgttgtctattttatgtagtaaggtttctttcttttcttttttcctgagatggagtttcgctcttgttgtcaggctggagtgcaatggcacaatctcggctcactgcaacctctgcctcccaagttcaagcaattctcctgcctcagcctccccgagtagctgggattacaggcgcctgccaccatgcccggttaattttctttatttttatttttatttttatttttatttttatttttattttttttgagaaagagtctcgctttgtcacccaggctagagtgcagtggcgcagtctcggctcactgcaagctccgcctcctgggttcacgccattctcctgcctcagcctcccgagtagctgggactattggcgcccaccactgtgcccagctaattttttgtatttttagtagagacggggtttcaccatgttagtcaggatggtctcgatctcctgacctcgtgatccgcccgcctcggcctcccaaagtgctgggattacaggcgtgagccaccatgcccagccgtagtaaggtttcttacaagatttcatttaaaaagaacaatggtggcccagcgcggtgcctcacgcgcctgtaatcccagcactttgggaggcccaggtgagcagaccacctgaggtcaggagttggagaccagcctggccaacatggtgaaaccccattgctaccaaaaatacaaaaattagctaggcgtggtggcaggcgcctgtaatcccagctacttgggaggctgaggcaggagaattgcttgaacctgggaggcagaggttgcagtaagccgagatcacgccattgcactccagcctgggcgagaaga

SEQ ID NO: 1243272 - DNA, 4001 bp, Homo sapiens
cccccggagcccaggtcacccaagatcccggcggtgacggcttccaccagcagcccctgagcagcctccagctgcggtgatgggtgtgtgagacctaacgggctctctctgctgttaacttaggctacagcctggggacttgcctgtccacttacccaatctggtcttgccctccaaacccccactgtgtttctccctctgagccttagccacctctgaggcaacatcacctgcttccatcccaccccaaacaaaatctaggctccagacgttgatataagtaggaccctactggtccttctctccgccctcggctcctaaagatcctctgtgagcttcgacttctcccagccgtgcaggctttggtattggacggtgttatgtcgggaccgcacttctctgcccttactccactcacccttcagtggtcacctcctccgacaagccttagccacccgcactgggccagggtcctgtgctcccccagctcccgggtgcacatcccaccagcgaccacaaagtcggggacagaggccgctcaccgtcatgttcggctggaaccggtcttctagcaccgccagggccgcgtcctgaccagagcctgaaggcaggagaagcatctgaagtcaaccgctgcgacgccgtttggagtgaggccaaggtcacaggggcagagttcgaggagaagggacagaagcgctcacccagggctgtgaagggcagacggctgtaggagccatggggatgcacaccgtagagctgcggtccagtcaggtctacgccgcccacgatcagcgatgcacccacgtggccctggtacctgctcgaggatgggcggggtcggccacaagctggggcctaggccccacctctctatgcccagctcctaggtgctatccccgccccttcctgtgggctggcgcccgatgactgacatcgccttttcctgtagcccaggttctcttgggccggcctcttccggtcacctggcccgtcgcggtcccgcccttctttctgtcccgccttccaatggccccaaccccgtaactacccctgccggggtcctgttagccctgcccccgcacctgaagagcgtctggcgcaggatgcgagtgaccgtggccacgcggggctcgcggcccgtagataacgcgtgtagctccatcttggacgccaccatccgtgtggtcatctcggcgtccgcggctactccagccccacagcagctgaggcaaaagggaggatcggtgtgggcagggctgggacgtgcggggaccggagtgggaacgagggggccgttcttttttgcgtacgggaactgggctcgggagtctcactagattttgggggcgatgaagtggatcttctcgcagctcttgtccgccacgaccgaatcgttagtggctcgcgtatcggcgcccagaatgaccccgtcctgaggagagggagggaccgcagcttcagtgcctgctcgatactctcggctcccctccagctccccgtccctccccgctgctcacttggaacaccaggcccgcgatggtggtcccggtcttgcgtgcgtgagggaccttgagccccgggaggacgcgttccaatgatgcatttctggaaacggaggagggcgcccatgtttcggctctgctttcaagacccctgttgcttcccctaacctggtccccgtctccctcatcttccggggtaagcctggaacccaagtcgaccaacacaccctcccccacccccagccaggaaaaaaggccacgagcaagcagaggcggctcaggagtgaccgccccccgcgcccccgcttcacctttggcagttctcgaaggagaagccccctcggggctccagggctggcttcagcatcttggggcaggcagaggggattaggggtcgcgggcggatgagtcggccagacaagcggggccagtgagcagctaaaaagtcctctgctaggcttcacgtctgtacttcctgctttcgctttcgcctttacccttcctcaaaggcccgtggcggttttctgcatcttgtctttcacttttggcttcacttgtggctctgagcatttggggaaccgggtgatgtcccttgctgtgccctctgtgctgctcactgggtactctgttggatagagggacaaatctcttcccttctggacttgttcaggtcctcctccccctccatctgagccccttgctcttaccctagcctcaactctgacctccagtcccagcatagtaaagctctcagagccttggccaagtcagcattgttgctggccacccagtagcatcaggcatagctgacttttgttccttgtcacctttcttccaactcttgcctcttttgttgcctttactcctctgcaaaaacctcaaacagaggctcagtcctcagtcacagggaccctggtctttccatcttccatctcaggtgccatcttccctctctcaagagggcaccatgggtgttgggttccactcatggccaagccttgttatttcacctccccagtgacctcttgtctgcacacatccttttcctagcacttctagtctcagctagcatcctctcccacctggacattgcactggcctccctggttaccttgcaattcttgccccccgccccccgacccccaggctactccttaccctgcagagagcgggtctttctaaattggaaatctggtcacattctttctctggtttaaacccttcagcagtctgggcctggtggctcacacctgtaatcccagcactttggaagcccaggagttcggggctgcagtgagtatggatcataccattgcactccagcctgggcaatagaccccgtctcaaagggggaaaaaaaagacttgggtttgaggctaagagcagcacgcagctgccaaagggtttatcttaattttttttttttttttttgagatggggtcttactctgttgcccaggctggagtacaatggtgtgatctcggttcactggaacctctgcctcccaggcacaagcactcttccacctcagcctcctgagtagctgggaccacaggcacacaccaccatgcctggctaatttttttttttttttttttttttggtagagatggggtttcaccgtgttgcccaggctggtcttgaactcctgagctcaggcgatccaccctcctcagccttccaaagtgctaggcttataaccatgaaccactgtgcctggcctattttacggttttttttttttttttttttggacacagggtcttgctgttgctcaggctggaatgccgtggcaccatcttggctcactgcaacctctgcctcccaggttcaagcaatcctcccacctcagcctgcctagtagatttgactacagctgtggctacacctggctaatttaaaaataaatttttttttttgagacggagttttgctcttgttgcccaggctggagtgcaatagtgtgatcttggctcaccgcaacgtccacctcccaggttcaaacaattctcctgcctcagcctcccgagtagctgggattacaggcatgcgccaccatgcccggctaattttgtatttttagtagagacggggtttctccatgttggtcagggtggtctcaaacttctgacctcaagtgatccgcccacctcggcctcccagagtgctgggattacaggcatgagccaccgcaccaggctaatttttaaaatttttgtagagatgaggtctcactatattgcccaggcttgtctcgaactcctgggctcaatcaagtcaaacccaagtctttttttttttttgagacggagtctcgctctgtcgcccaggccggactgcggactgcagtggcgcaatctcggctcactgcaagctccgcttcccgggttcacgccattctcctgcctcagcctcccgagtagctgggaccacaggcgcccgccaccgcgcccggctaattttctgtatttttagtagagacggggtttcacctt

SEQ ID NO: 1243273 - DNA, 4001 bp, Homo sapiens
cagcctcccgagtagctgagactccaggcacacaccaccacacctggctaatttttgtttttttgttttttttttggtagagaaggggtttcaccatgtggcccaggctggtcttgaactcctaagctcaagcaatccgcccacctcggtctccgaaagtgctaggattataggcatgtgctaccaggctagcctgaaagctagtgctcttaacaagtgcttgaatagcactgaaatagtgcctgcccctagtatcccatgggagaaaaatagtaattcctctcctgtagaaaagccaacatatcctaggctgagggtccttttccggatccagctgaattagttgcacacagcaagttgcgggagaatggacactttgcaagaatggctttatagcagatgctctgaactgggtctttacatttgccaattcaactaacaatcttgtaaaacttagaaacatgtgcaacaggtctagcaggatgaacaactccaaagccaagaggtggtggatgtacaccctcaaacaatgagcttactagatgacctttgagatgtttccttaccttattcattaaggttcaaatctccaactggtcttttttttttttttttttttggagacagggtctcactctcacccaggctggagtgcagtggcatgatctcagctcacgacagcttcgaactcctgggctcaagcgatcctcccgtctcagcctcccaaaatgctgggattacaggcgtgagccaccatgctcggcctcgtgttttaaataaaaactgaaacctcatctatatatacatttttttttttgagacggagtctaatcagattcccatttaaaaatgttaatgggttaaaaccacagctgatccaggaagcccttcggggtgctgagcatcatccagatttcgataacaggaactcggtcaaatgaagacaaacatagatacgaccctgggggcgggggtcagggccaaattgaagctagcccccttagccccactccggcatcatccaggcatcattcactttgcatcattcacatttcggtgaaatcaacttggttaaacgaggataaacataaatacgaccctggggccggggtcagggccaaatgaaggtagccaccctgcaccccactccagcatcatccatatttcggtgaaaccaattcggtcaaacgaagataaacatagccttggggcggggctaaatggagctagcccactccgccccacccaagcatcatccagacatcagtcactttgcattattcacatttcagtgaaatcaactgagtcaaatgaagatacgaccctggggtcgggggtcagagccaaatgaagctagcccgcctccgccccaccctggctttatccagatttcggcaaaacgaacttcaaaacgaagtgacagacacgagcttgggggcgggggtcagggccaactaaagctagccgcatctcccgacccccagcatcatccagatttcggtaaaacgaacttcggcaaaacgaactcggaaagggaactctgtaaaacaaacaggctaaacggaacaggcagccaaggccccgaagtggcggcggctggggcaggggcgggaggctggatgactccggcatcgtgagccgacgctggtctggactcgtgaacaagtaagggtcaccagccgccctatctgcgtccccagctcgtccgcggccgccgcgccatctccagcgtgcccgtgactcagcagcggctgcgccgccggcccagctatagggcgctcgctcaccggttgaaatgatccaccacactgagcagcaccagggggtggaccaccaccttctgcactgccagctccggcatcgcgacacaccccgctcgccaggcctggctccctgccacacgcaaacaccggcagcagtagcggtcaccggtaccctttcaggcccagttcctcttcttccggttcgtcagccctcgcgcggcctccttcttccgctcccagagtgcctcgcgcggcgggcccggatcttcgccaccgccgtcatttgtgggcggagaaagggctggagaaaggcgggaatcgcccctcgtccctcgccgtgcgtttccctggacttaagggccgaagggacaccggcgacttgacctcctggtattggcctgtaccgtcacctgcagaggcttttcgcctcaattccttcccagcaccctccccccgccacccccccaaagtaaatagttgacagtttacttttctaccacccggaagaagttcacttttgcttcaggtcaaaatcctccgcgatttctgagaggaactttaaatctctaacataagagcacgcttttaatgtaatttggtaatttatctcattctcgttttcattgccgggggaatttctcctttatctttactgtggacactttgcaatgaacgtggcaacctgcaggtttccacctgtcgttatattactgcgtaactagggctagaagaacgcaattgtgccgttgcttttgaaatcaaaatttacagaagcgttgaagaaaagacggaaggaaggcagtaaggaagtatgttgtgatatgtagctaggaaagagaagactaaggtagacaaagacttaagcttatttgcaggaggcaaattataagaaaaatcatacaggtttatatcgtctcatttgaagttgctgtttctgtaaacgaaaacagtacttaagcaacctgaattatttacttatattttgttctgtttttaaacaatttttgctttccctttatcaccagaggattttcccaacattttggcctcttgtctttttaaggtggacttcctgatctccaaatgtcaagggacacactcagtctctcttatttgtgggtggtgaaaaacattagcaaagattagactgaaatttggccaccaatgagagacattaatgtagtcaggagtttgaatttgtctgcatgtgaatttatctttgtcttctgtctgcaacttggctttattttcagattttctgctagatctgcaaggaagtaaatggcaggatatgcttaatattcataattaattgaagagactcaatgctatctttattttttcatttttttttttggtacagttggtgtctcactatgttgtccaagctggtcttaaacccccagcctcaagcaatcctcccacctcagcctcccaaactgctgggattacaggtgtgagctactgtgcctggccattcattcttaattataactagaaagatataagggttatgttaatggggaaagaaaactaagaattattgaatctattgagtgcctataatatgccagccctggttcagacgcaaatatttaatccttttaattaatgcttctcaaactttgatatgcttacaaatcaccaggggaccttgttaaaattcagattctgattctgtaggtctgagatgggacctgaaattctgagcttctaacaagctttcaggtgaggcccatgctgtgttaacaaggcttgtaacaaccttacgaagtcggtattttctcattacaaatgaaaattgttgctcaaatgttgctctcgaggtgggctttttctcacgctttgaaaaaattttgtctttctccccctaatgtgtttctgctttagttttctccatagtttttaccacttgtgaatagtttgtagaatttacttattctgttcattctttgtctctcattagaatgtaagctcttgtttagtttgtaaactcctgtttacttttttttttttttttaaataaatgagagacagtctcgctctgtcacccagtccggaatgcagtggcacaatcttggctcactgcaaccttcacctcccaggttcaagcgattctcatacctcagcctcccaagtagctgggactacaggtgagcgccaccatgccccactaatttttctatttttagtagagatggagtttcactgtgttggccaggcttatctggaactcct

SEQ ID NO: 1243274 - DNA, 4001 bp, Homo sapiens
acccagctgcagaaggacagggctcgcagggcagtgacgaaaccagggctgaggaagaccacgttcctggtggaggcgtttgggaaaacgagggtggggcccacgccgcaaactagaaacagaggagggagggtcaaccccttgcaggaggccgagcagaagcatccagaagcacacgtgctgtgggtgcctggcctcccactcccggctgccacccttcacggagcactgactctgcgctggccctgccgatggctcccctgcagcgtctccttcactctcttgatgggatcaccccagttccacaggcgggaagactgaacatgagggccgtactcgggagtggcggggtcctgctaggagccctagctgtcggcccacccagctgagccagcgcccctcactgccagggagtctctgcaaatttcatgactcacaacagcgcaggtttagtgtttcacatttctggcggtcacaaggccaacacggtctcccagggctcaaatcaggtgtggacagggctggttcctctggaggctccaggagaaaccatctcccgccctttccagcttccagaggcgcctgcacccttcggcgtggggcctcctcgtctgtgcatcccgccacctctgcttctgccctcacgccctcctctgactgtgttcctcctgcctccccttagaaagcctctgtgatgacggtgggccaccccccccgatgatccgagaccctctccccatctcccggcccctaactgaacctcttttgagaagccttttccagggggcctggtctaaggaggagctggagggaagcctggccgtgagctgggagcctgtggtacttactctctcctggcacctggggggaccatgcctgctgccgagggtcttttggggcagtcccactgagtacccgatggctgcctgaggctggaggctcccgcctcccttggagaggggccgaggagtcctgtggggggcccctgtgctcagaggcagctcggagctcctgcctgtccctctgaagcttcagggaggtcgggcccagctcctcaggctgggttggggttgggaccagggccggcccgagggctgcagtgccagggtgggccacgggcagccgcccctccagagcagccagcctggcgccctggctgtggacgaggccctccaggcgtgccagtgagtcctgcagggcgtccctctgggccttgtgtgccttcctttcccgggcccgctgctggctcctctcgcccagggtgaggtccaaggcccgcagccgcgtgtctactttccggcctcggcgctgcagcttcctcacccaggccttgagctgcgccagctccccctgcaccgaggcctgtgaccggttgactgcctgagccacagcctggctctcttccgccaggctccggaaccggacgtcaacgttgtaggacacgttgtagttgctggcgatgttctgcaggtgtgtccaggtcacctcctggaatctccggaactgtaaggaggacacggtgatgatggggcgggccgggccgggccggctgggcgggacgggaaaggctttgccctctcaagttgggagcagcggccgcgtgcccgggccacggccagcactggctatctgcccaccgatttgatccccactgcgatgccgtgagatgtggtgggtgccagggactgaccccaggccatgcagctgcaccacgtggggtgtggactccaggcccacagctggggctctgatccccaccgctcaccccataaccaccggcaagtcactttccctcgtgattccagctcctgcctgtgagcaggggacggcagggtggcctcatgagtgctttacgaggcccaaacaggaagcacccagcgcaggcccgacaggcccacagcactccggaactgtccgtggaccccgcgtgggagtccgggaggccgttcacaccgactgccacaaggtggacctgtgacctcccagtttccactccccatgacactacccggcccccatggcccccagttcccctgactcccttccagacccccttctagcctctggccccacctgacccccacatgttatgaggcttgtgtcctgtgtgagtggagcccagctcagctcttccctggtgtccaactgcaggtgaaataatcttcatggatggaaagagcgtcacacgcggtgttcgtgtccgccaagccctgatgtttaccaatctgcttctgtaacatccgtcttccatctgctgccaatttaaaaacccgactgcgccatgtcaggggtataacttgcctgttcctccagcctacggagcctctcgaaaaacggtttcctgggccccactggggcggcttcctgcgatgaagccccatgtagatatataggcacaaaaacaaggaagaaagacaaggtcttcctccacgagcaacccatccggagagacggcaaggccccagcagtctccctccagccgcaggagagggtgaaggtggctccgtgggtctgtcttgtgtctcgtccccccagctctcctgttgagtggttttccttctttggccctggctggatgtcaggttcttcctgccgcctccatgaaaggcatctgccttcaagccagtgggctctgagacttgcaggttcctaaggagacaagcttaaaacagatgcaaacagtttctttgaagaatcattcagctgggtgcaagcccgcgggcaggaggcgatggctttaacaggagcacatggacttgtgctcccgagaagtcgaagcaagacagggaacccgacgggggctggggagtcaacagagccaggtctgcacaggcacccatcacccaggccgtgcacggctgcatcctgggaggccccgtctctctcagtaaagcaatggaaatgtgactgggagccaccttaattaattaattattattattatttgagatggagtctcgttctgttgcctaggctagagtgcaatggcgcaatctcagctcactgcaacctctgcctccccggctcaagcgattctccttcctcagcctcctgcctcctgaggagctgggattacaggcgtgctttaccatgcccggctaattttagtatttttagtagagatggggtttcactatgttggtcaggctggtctcaaacttctgacctcatgatttgcctgcctcagcctccctaagtgttcggattacaggcatgagccactgcgcctggccaattaattaatttttttgacggagtcttgctctgtcacccaggctggagtgcagtggtgcgatctccgctcaccacaagctccgcctcctgggtttaacggattctcctgtctcagcctcccaagtagctgggattacaggtatgtgcccccacatccggctaatttttgtatttttagtagagacggggtttcaccatgtgggccaggctggtctcaaactcccgacctcaggtgatccacccgctgtagcctcccgaaatgctgggattacaggcatgagccaccgcgcccggccaatttttgtatttgtagtagagacggggttgccccatgtgggccaggctggtatttttggttacaggttgtgtactggcttgaatgagaccctcctaaaaacacacataagccccaggcagggccttatgtggaaaaggtctctgcggatgtcatgaaggattttgagatgagaccatcctggattatccaggtggccctaaagccaatgacaggggtacaagagacagaggaggaggcacagaggacacggcctgtgaagatggggcagagactggggtgacgctgccacgaggaacccccagaggccccagaagctggaagaggtaaagtgggaacccccagcccagagccttcgagggagtgtgcaccttcacttcaagacttccagcccccagaactgtgataggactcatttctgttgtttcaagccgcccagctcatgggaataagatcatccacaaagttgtcc

SEQ ID NO: 1243275 - DNA, 4001 bp, Homo sapiens
gcactccagtctgggtgacacagcgagattccatctcaaaaaaaaagttttaaatgttcctttcaaatgaatgaataagtaataaccctccaaaaaaatcgcatcaagaaaagaggcagctaccacacacaactcatttcctgaaaatctgctttggtggttggcatgttttttgagcaaagtgcaacctatgaccctttcccccacgggatggggtggggcagagggagcctttaagcctgttaagagccagcaccagaaggagccctcgagcaatttggtgacttgtgctcttctgtcctatgtttagataatgctctaatgtgtctccccctgcaaatttctctaattctgcatttttctccagtggaaaatgtggaaggtaggggagctatgaagactagtgtgtttctaaatggcttggacagagctgcccaccagtttgcgccctttggtacatgcctcttttaaccttcggacctgggtcacaggctgttatctataatggtaaggttagaccctttagggagcactggaggagcaccacctggtgaatgaggagggatattccatggcgataccaggaaggatgggggaagcatttggggtgccagagaccctagggacatggagctggaggctgggtggcctctgaagcatagctgagctctgcacatgccagcaggctagaagcaggaaaacacacaagttcaagctggcttttcgtatattgtgtataaaaagatcagattcaggatgatttggtgggattgccaggggctgaccggagtgttgctgggaaggagcctcagctccgctccaggtcctccaccaggtaggactgggactcccttagggcctggaggagcaagtccttgcaggtccagttccaggctggtgtgaaactgaagagcttccgcatcttgcttgggttggtgggctcggcccgcactgcctggtactgctcatccgtcaggaccttcccgtacagagcatccagcagccactcaacgtttgtgaccctcgcgataagcgcagcccggtgctggtctataaagtgcaggcctgggggtgggaggagaacatgagccagcagccagggtgtggggcctgtccctgctgaacttgagttcttcaggaattcctctgcaagcctaggggcagggctccagggggcggccaccaggaccccacatgcagtgggatgagggtaatattgtctcccttcccccgcagggtgtgggttggtgggtggggtgcgcagggttgccaagccgtgcctgccctgccctgccctgccctggttgcgggagcacagatgcaggctgtgcaggagtgcggtggggccgggctgggtgtggaggcctcacctggcttggctgccgactgaggaggggcctggatcccagctggcgcggctccagagcctggaaggatatgggccaagtgatccccttcccttcccttcccgccgtggggccggggtcccgttggtcggtaggccaagcgtggggagcctcctttccggtagagcagctttgtttaggggtaggaggaacagaaagcggaagagcccgcggggtaagcgctggtgtgggtggaggggaaagacggggtggaggggaacgggggcggctcaccctggtgcgtggccgcctgcagctgcccggccatctcctgcaggcccatgtcgcgcagcacgttagcggtgagctcggcgccgtaggtctccaggtagaagctgaccagcttgtcggtgaggtccaaggcgtccatggacagcagcgcgccccgcgggatgcgcccgtagccctcgcgcagcggcaccgacagcagcttcagcttgaacttcttgagctcctcggcggtcaggttctccagcgcatccaggatggcgtcgcgcgcgcgccccatggctccaggatccccggccgctgccgccgctcaccccgctgcagccgccgaccaggaggaagtcggctccggggcggaacctggactccccgccttcctcccactctggtctcccgactccccgccccggtccgttgccctccagcaaaaggcgcttccttactacacccttggtcccctcccacccaggcctctggattggggccccaggccgtcgggggacgccaggatcgcgccctccagctggcctgcgaggtgggacccgggagggggccgcagaggggctcatgggtggcgcctgcttgtctctgggcttgcaccagcgggtacagaccggaaacctgggctggctctcactgggtttattggagcacctaggcttagaacctcggatttctagaaccccgaaacctccgcggttccccgaaccttaggatcctctcccacatgtcgtagaatcttggaatcatgacagctagaagcgtgaagctccctcaattccacatactggggaaaaatgagttgtacaaaagggcagagagtgcaaatctctctgagcttcagtttcattttctacgacatggggataaccctccggtgcttataaatattccagcataacatggccaacccgatggctcccgaaaccttgccagatgcttcctaggggagccagaatttgatcccaacactgattaaaaaaaagaaaaaagaaagagagacagcctccaggagattaaagaccatgaacttgaagccatacagttctttgtttgaatcctgactctacttcccaagggggatatttggaatcctttatttttccctctcatctgggttgtaacaatcactgttccttgtagtcatacgaccctgacatattatacgtttatatgcttattggacattcatccctctctaaaatgtgaggcctatgagcatcggagaccttaactgtcttattctttgctgaattcctagcgtcaagaatgtacctggaaatagctgtgtgtggtggagggcgcctgtaatcctagctactagggcggctgaggcatgagaatcgcttgaacctcggaggcagaggctacagtgagccaagattgcaccactgcactccagcctgggtgacagagctagattccatctgaaaaaaaaaaatgtatctggaacacattaggtgctgagtaaagatttgctgagtgaaggaatgaatgaggctgtgatgcctgcagcatgttgtattcaaaagcttccagcatggctgggtgcagtggctcatcacgcatgtcatctcagtgctttgggaggctgaggccggagggtcacttgagcccaggaggttgagggtgcagtgagctatgattgtgccactgcactctgtgccactcggcaacagacaccttgtctcaaaaacaaacaagacaaccaggatgggccgggcacggtgactcatgcctgtaatcccagcattttgggagggcgaggtgggtgatcaggagtttgagaccagcctggccaacagagtgaaaccccatctctactaaaaatacaaaaattagccgggcgtggtggcaggtgcctgtaatcccagctactggggaggctgaggcaggagaatcgcctgaacccgtgaggtggaggttgcagtgagctgagatcacaccattgcacttcagcctgggcaacaagagcgaaactccatctcaaaacaggaacaaaaacaaacaaacaaaaaccacgatggggagcagtgctctgctaccctgctgaaagcctttttgttgttgttgttgttgttgtttgttttttcttttgaagacaggacctcactctgttgcccaggctggagtacaccggagggattgtggctcactgcagccttgaactcctgggctcaagcaattctctcacctcggcctcctgagtacctgcgactacagttgtgccaccatgcctggctagtttttaaaatttttatagagaatgggtttccctatgttgttcaggctggtctcaaagtcctgggctcagcagtcctcctgccttggcctcccaacatgctaggattacaggtgtgagccact

SEQ ID NO: 1243276 - DNA, 4001 bp, Homo sapiens
tcgcaccgcggtcatcgcctcctgcctgccgccgaggcccacgcacgcctcaaggtgcgggatccgcgcgcatcgtggtcggaggggctgttcggtggcacggggccgatggggaggtcgctgcagtgatttggattctgagtctctagagaggctcacgagctcctggagttgcggggggcgggggcggggcgaagcagccaggaaagagggtctgaggagcttaaggcggggctggcagaggaaagccgcgcagggatggagcctggcgataagggcgctgagcaaacgtaggtttcccggccttagtccctagaggaaactggagatgggcgggcggagccccagggcgggtctgatgggccgggcggagccaggcggagcagggactgaccagcccctgcggcccacgctcgcattcctgcacccggtgggccgttcgggctggctccctgctcggcgctggcccactttggactggaggcgcggcgttcgggaccgagccaggcggccggggcagggttgtccccttgtgctcagcggaggcccacgcacccctgaagctgcggaacttgggctggcctgacggtccccaggcggggcctcaccagaagggagactgtaagggctaggcagccgggatctgcacttatgtgtgcgggcccagggtggcaccgagagccccgtccaggatgtttttctgggtggagctggaagtcccgaaagccttgggagcccacacgcagttgtgcgcgtcccgaagtacccagcagagacacccagacagaggcaaatagagacgaacgcacactggctggtgcgtgtcatccgtgtggcaaaagcacacacgtatagctaccggcgggcacgtgtgcgcgcagccccagtaaagtctgccatgaatatttattgggcagtggaagaataaatgacaggtgcaggggctggaggaggcggggtctggaggcacggaggcgtccttggtccccgaggtggagacactgctgttgtcttacgcgactggtgcgcgcgtggggctggcttcacaggcgttgcattactccttttgccttgacccgcctcctagaaggggtagaccaccgtcctttcgttggtattcgaggcccccagacttcccagggacccagcctctcagtcctgcctggcccagttcagcccagtcctagctggtggtctcctagctcagggcaggagcctcctcccgggacccctcccatcccagcacacctgtgcttaagaccccaacctcagggcaacccgctcggatccccttccatgctgtggaagctttgttcttttgctctttgcaataaatcttgctgccgctaaaaaaaaaacaaaaaacaaacaaacaaaaaaaacccaacctcgcccaaccttgcccgtctttatctgcgaagaaagcacagaacccatgaaacggaacagggcccaggcagcccaggagcctggaagggggcagtggggcgagatgcagcccaccagggttcgcggcagcccagcccttcgcccccgggaggggctggccggaggtctgagggaggaccccaggagggaccctgaaggaggggaacaggaaggctctgggcgggacctgacgcgtgggtccttggcgaggaagcggggttgggtcccgagatcacgtaccagctcagagtggccctcacgcagcccgctgcagccgtgcggcctcctccaacatgcgcatgtcgcgcagcacggccacgacgagctcggctgcgtagtcctcgtagtaggaggcgaccagcttgtcggtgaggtccacgatatctagctgcccgagcgcgccccgcgggatgcgctcaaagccctcgcgcagcggcaccgtccccagcttcatcttgaacttcttgagctcctccggtgtcaggttctccagcaccttcaggatggcctcgcgcttcgttcccatggctcagccctgcgcctctgagcctccgagggcctggagccatcaggtcctacctttcctgcagcaggtggagctgccgcccccggggatgtcccgggaaggagactgatctggcagctcctattcaaccctgtggctcctgctgggaggggactctgcaaacaccgcctagagggtcccccagtttcccctgggagagtgggggcgccaaattgttgaggtggggattgctgttcccaatctgcagaggaggaaacaggttgcaagtcattgaggcaggaatggaactgattccatggtcaggcacctcccagcaaagaagtggctttgtagcctggcatggttgctcatgcttgtagtgccagctactcgggaggctgaagcaaaaggattgcttgagcctaggagttcgagttgtgattctgccactgcactccagcctaggcaatcctgtctccaaaaaaaaaaaaaaaaaaaaaaaaaatggctttggcaggagtattgggagctctcctatatttgcatatttgcatttgaggtcttgggtaagatctagaccacagaatggttggtctgtgcaggggacatttttttttttttttttgaaatgcagtcttgctctgtcgcccaggctagagtgcagtggcacattcttggctcactgcaacctccgcctccctggttcaagtgattctcctgcctcagcctcccgagtagctgggattacaggcacttgccacagcgcccaggtaatttttgtatttttagtagaaatggggtttcactatcttggtctggctggccttgaactcctgacctcgtgatccacccgccctggcctcccaaagtgctgggattacaggtgtgagccaccacgcccggccagcaggggacattttaattaaatttcctgccccctactccaagcccatgtgtgtacaggcaggctgacttggtggtcaggctgacaggctgactgaggctgatgttctgcttttaagtaagagaggaagcccaggagtaggggtaggttgcctttcttctttcatatatccttcatgtaccccctgaggtctgttgtgtgccaagctctgtgcctgcctgtctggtgggagagaccaaaccacactgatgtttgtcatcctcgcaaagacctgtgctatggggctgactgctgagcagaggggatcagggaaggcaaggccagggaggggtcaacaaaacagacaaggggctgggggtgtggcggttcatgcctgtaatcccagcatgctgggaggctgaggtgggaggattgcttgaggccaggagttggagaccagtctgggcaatatagtgagattgtctctacaaaaatattttaaaaaatcatggccaggagtggtggctcatgtctaatcccagcacttcgggaggctgacgtgggtggatcacctgaggtcagaagtttgagaccagcctggccaacatggtgaaaccctgtctctactaaaaataccaaaattagccaggcgtggtggtgcaccaaaattagtcccagctacttgggaggctgaggcaggagaatcgcttgaacccaggaggtggaggttgcagtgagctgagattgtgccactgcactgcatcctgggtgacagagcgagactccaactcaaaaaaaaaaaaatcagaaaatttgctgggcacggtggtgtgtgcctatagttccagctacttgggagactgaagtgagagggtcaattaagcctgggaagttgaagctgtagttaactgtgatcatgccactgctccagccagggcaacagtgtgagaccctgtctcaaaacaaaacaccaaaataaataaataaaaaaccgcaccaaaatagacaaggggcaggggaagcattcggacctcaggagtagcactggctggggctgggaggcatgtaagtgggtttggggatgggaagatggctggaggaggagctggcattgaggttgagccacagagggcaggtttaggatgggaggtgtgggttttgggtgggtggcatccccatcacttc

SEQ ID NO: 1243277 - DNA, 4001 bp, Homo sapiens
ttggcgtggcatcctgcatgggacccctgagagctggttccacagtggagccagagggaccgggtgtatggggccagcaggcacctcaaacatggaggagggtctaagcacctgtgcctcccatcctctgtcctccccacaaccttctgagcagggaactatttattttcctttttttttgagatggagtctcgctctgtcgcccaggctggagtgctgaggcctggtctcagctcactgcaacctccgccactggggttcaagcaattctcctgcctcagcctcccatgtagctgggattacaggtgcgcaccaccacactcggctaatttttgtacttttagtagagacggggtttcaccatgttggccaggctggtctcaaacacctgacctcaagtgctccacccacctcagcctcccaaagtgctgggattacaggcgtgagccaccgtggcgggccagagcagggaactattattgtcattttacagatggaagaaaacgggactctgagaagccaggacccacccatggtcacacagccccatccctggtggagccttctgagcgtagagcatggacccctgggtttgtgctggtggaagggtttacggggcgccagtttagtcagccacccctgtgtaggacacctatggaacaccatagggggcctctgaggagaatcacctccttattgccattgtgtccccaggccagtgaacatgacctgctctgcggctttacacagaatgctctgggctgaaacacttccttgaagcgttggaatgtgaccagacatcctggctccttgtaaaacccactcccaccagctgcagcccaataagttaaagattatcttagttggccgggcacggtggctaacacctgtaatcccagcactttgggaggcagagacgggcggatcacgaggttgggaaatgagaccatcctggctaacatggtgaaaccccgtctctactaaaaatacaaaaaattagccaggcgtggcggcgggcgcctgtagtcccagctactcgggaggctgaggcaggagaatggcatgaacccgggaggcggagcttgcagtgagccgagatcacgccactgcactccagcctgggggaaagcgagactccgtctcaaaaaaaaaaaaaaaaaagattatcttagtagttagacatatgctttgagcttaaaggaaattcacataaaccaccacggctatacatctttcaaatgacgcgcacacccccaccttcaccgtttcaccccgtaccatctgcttcttagatcaaaagattgtactcaataaattatcaggcaaccagggctctgcagccttcactttagcaactggccccctggggctgctttaaatcttaacttgtcttttctcattcctttgttgccaccggacttcatggttgggggttgggactgatcaccccaacagtttgcatacagctccctccaggcagggaatcacgggactcaagccccctcccccacccagctgcagaagggacaggactttgtctctgcttctcccgagctaccagcgagagcagaagtccatgctgctcccccaaccagcctcccacttccggcccccactgcccccaggagacgccacctcctccaggccaccctgcccttttctagggcttaagccccttccttccccagagctccttggggactcaacacaggagaaagaagagtgagaaggggcctctgggggttgagcaaggctgcagggacatggggtaggtaagggagtcgatggcgggaccagaggagagatgactccagaggaggcaacaaggggctgagacaagccagggtgggggcaggggtaggcagtggggggatgggtgcagggacatggcagagagagtgtccctttaccttcagcgtccatggtgacttgcagctgtctgggctggtgtgttggctgctcaggaccaaggctcccagaggccccaggctgggggtgggactgtggagggagggagggcccatcaagctgtcagccggcccttcccaggctccccaagcctccctcctgtcctctgccaggcctgcagattcctcagcaggccctgaaagtcagaggaggggctctgatggggaactcagaagccctgccccagccagtgaaggagcccgaggccctgttctcacccaacacccagccctcctggccctaacccagggtccaaggctgtgaatgtaagcatgtgctccctggtgagggcaggcaggcattttggatggtgtgctgggaaaatcatgggccctggacctgggttcaaatcctaactccatcctttttgatctcaagtacctttttacctttttctgtgcctcagtttccttagctttaaaatggcataacagggccgggcacaggagctcacgcctgtaatcccagcactttgggaggcagaggcaggttgatcacctgaggtcaggagtttgagaccagcctggccaacatggcgaaaccccatctctactaaaaatacaaaaattagccgggcatggtggcggccgcctgtaatcccagctgctcaggaggctgaggcatgagactcacttgaaccccggaggtggaggttgcagtgagtcgagatcatgccactgcactccagcctgggtgacagagtgagactctgtctcaagataaataaataaatttattaattaatttaaaaaacggcataacaggccggatgcagtggttcacgactgtaatcccagcactttgggaggctgaggcaggcagatcacgaggtcaggagatcgagaccatcccagctaacatggtgaaaccccgtctctactaaaaaaccaaaaaattagccgggtgtggtggtgggcgcctgtagtcccagctactcgggaggctgaggcaggagaatggtgtgaacccgggaggtggagcttgcagtgagccaagatcatgccactgtactcctgggcgacagagcgagactctgtctcaaaaaacaaaacaaaacaaaaaaacccggcataacaggctgggcacagcgactcatgcctgtaatccctgtgctttgggaggccaaggcaggagaatcgcttgaggccaggagtttgagaccagtgtgggcatcatagagacatacagagatcccatctctcccaaaaaaagaaaaaagaaaaagaaattagctaagtacagtggtgcacacctgtaggctgagatgggaggatcacttgagcccaggagttcaaagctgcagtgagccgtgatcgtgccactgcagtccagcctgagtgacagagagagaccctgtctctaaagaaaaaaaaaatgtaatggcataacatctacctcatgggtccaactgagaatcaatgagaaaactctgcaaatgaaacagagtaggaactcacctaatatccacttcccttcccttccctctttccaaggaactttaagggcacagacagcttagagcccagcttctgaaccagaaagtggggaaaccaccagtcaccgggactgggacttcaggcaagttcctgtccaagaactgccagggcctttctttcttccttttttttttttttttgatggagtttcgctcttgttgccgaggctggagcgcaatggcgtgatctcgactcactgcaacctccgcttcccggggtcaagcgattctcctgcctcagcctcccgaatagctgggattacaggcatgcgccaccacacccggctaattttgtattttttttcagtagagacggggtttctctatgttggtcaggctagtcttgagctcccgacctcaggtgatccacccgcctctgcctcccaaagagctgggattacaggcatgagccaccgcgcctggcccagggccttcctttcttcattggaaacccttcttgctacagttgctcacagggactgctagtcgctaaattcacttgcatcttcccagccttctccctttgctttctctgccg

SEQ ID NO: 1243278 - DNA, 4001 bp, Homo sapiens
ccaaagtgctgggattacaggcctgagccaccatgcccagcctaaaattttttctttcttttttttttttttttgagacagagtcttgctctgtcgcccaggctggagtgcagtggcgcaatctcggctcactgcaaactccacctcccgggttcaagcaattctcctgcctcagcctcccaaagtgctgggattacagacatgagccaccgcacctgaccttggaccagcttttaaaaagtcaatggactggtacttctgacagatgcccgatgcccttccctggccagtgtggaccctaagtccccaacagaaagcatgatgtttctaagaacaaacccacaccttctctcaaacagctcatggagccctgagcagagcatctgtcctacgaagggagggaggtccgggcagtggggcctgcttatttcaccaagttcctgttagacctgtagctgaggatggtgcccctgcaggcaaaagccagtgccgccttagagccacctgtgcctcctcagagcttagacaggatggtttgggatggaaagaattctccacggacacaggaacaatgaggcagattctacacaaactcagactccctgtaagctggatgccagggcaccctgccaagcctggaactcacacgctccgctctggacccaccttcaccttctcatttctaaagtaagcctgagggccagacgcagtggctcactgtaatcccagcactttgggaggccaaggtgggtgaatcacttgaggccaggagttcgagaccagcctggccaatatggtgaaaccctgtttctcctaaaaatacaaaaattagctgggtgtggtggcgggcgcctgtaatcccagctactcaggaggctgaggcatggaatcacttgaatctgggaggtggaggttgcagtgagccaagatcgcaccactgcactccagcctgggtgacagagtgagactccatctcaaaaaacaatttaaaaaataaaaaataaagtaagccgggcctccctgccattgcagagtggctccgtgcactgtagatcccacagagatgaacagttccactcctcagcggcttcggtgactgcacccacccctttatttgctctggggttgtggacgtccacttccatgccatcgccatcgatactcagagcccctggccggctggatgccctgggggttccagacagctcatgaggctcacaggagccaccccacctgctcacttcccaattcagccctgcgggttggtttctgcagttcaaggcctccctacatggagttttccagggcagccatcacctgcctttccagagacaaaaatgtacctcagagcacggtgcctgctcactcccggcctcctggataaaatgcagtaacagctcacaccggccccggcagtttattttatttgccagccagccaggacctggccttgcccagaagccatcaagtctatgctaccaactttttaacatttttacaaattaccaatgttaagatgaactcgcttgaaaatcaaagtgcatcttggaaaacgtcgctatgttgaaacgttacattcactaattaacaagtcccctaaatcaccagcggacagagaaaaagcccgttcagggccatcagtaactcaagtggggccaacactgtccccgtcacagttccttcttccctgagcctctctccaccacagaaataggaatactgggcacagtgcacactactgcctcctcttaccctcagatgctggcccgggtggcctcacaggctgggcctggctctgtacacaccttcaggaagggcatgctgttggagaccggctccccatcgtgtctccgtcccaaccgggtcactggcttttctcaaacaacaatgtcaccttcctacttgcttgtcatgctggggtttctgcaaagcctgtgcgctcacctggaggcacatcaccacctaggagaaagtttaacctgctcccagacacgctctaataaacctcctgctggtgttgcccagggaggggaaggcaaagttcaggaagtgtccttgctggtttaaaaaacggttagtcagtcagggctgaaaacagagtggcttttgtttttggcttcctaagctgataatggtttgcacaaaagacacatttcactatcatttcactaaggcagctctttgctccagacatcgccagtagtgggagaaggagggaggacgggagagagcgcggcccgacgattctgtgagatgcgccttacactccctgactttcccttcgctcttccagaaacccgacaaacagccccaccaccccctgggctccacctgctcagatcctcagacatcaccatgcccaggaactcagcggcgccacagtccatccccttctactctccccacttactcagacaccatagcagcaactttcccgttataagctgcctgctgaaaggatccctgggaaaacagtgcgagccagcagacccactagctcggccatgactaactgcacattttacccgaccaccccggtgtgagcactgcgatgctcccagtaaagagaaatgggtctgactggaaccattcagaatatcaatcaatcaaccaatcaaccaatcaatcaaaggtttatttacctgaagactaccagtggagggtccccgaatagggtatctggatggaacacatactccctactcatatctttattagactttttttttttaagatgacatgatgtgcaagctgttttttaaaagagcaaattttccataagtttcacagtatcgaactccactttgtggaaaattacatcccacccttaaaaagcaaagcaagacatggaggagaggtaactgcgtattcactaagggaaagaggcgcatctgaaaaggctgcatgccagatggttctagctccgtggcgttctggaagaggcagagctgtggagacacggaggatcggtggttgtgggggctggtgtgagggatgagccggcactgaatcgactctgtgacactataatcgtggacctgtcaaaacacggaatacacaccaccaagagtgaaccctcaactacggactttggctaatactaacatatcaggctgggtgcggtggctcacgcctgtaataccagcactttaggaggccaagacgggtggatcgcttgaactcaggagtttgagagcagcctaggcaacacggtgaaaccccatctctacaaaaaaaaaatacaaaaaatcagctgggcgtggtggttactgagtgtggtcccagccactggaaaggctgagaaagaagaacacttgagcgcaggaggcgaaggttgtggtgagccaagatcgagactgtaccaccacactccagcctgagtaatagagcagaccgtctcaaacaaaacaaaacaaataatcatgtaacgtgatcccggaatgctctacactatgttccattttctgtaaacctaaaattgctctaaaacatgaagcatattcatttttttaagtcaaaaaactttcttccattctaaaaaagaaatcaggatctaaaaatatgagaaggattagctctgacatgtcaggttcccacccttctgaagtgacaagcgtgaggctcggccacacccttcagaccacgtgggcctttaaggataaaatgcactggtgcctttggtgcctcgagtaacgtcactcaaggtttccctgcccagggctgccataacgaactagcacagaccacggggcgtgaagaaacaccagtttatcctctcagttctggaggcccgaagtccaaagccaaggtgtgagcagggctggctcctgcctaaggctctcggagaggatgcatctttgcctctgctggcttctgggagccccaggagttccctggctctggtcagtctctgccctgtcttcctatggtcttccccctgtgtgtctctcccgtcttccagggacacctgtcactggatttagggcccaaaccagcatgat

SEQ ID NO: 1243279 - DNA, 4001 bp, Homo sapiens
aattgacagatgcaccttagggatttcctgctaagtaaaatatttaaaagtgagcactggtattatttgatgtccaccgggttattggcagaacacacacggccctgctgttatctccacttaaactttattaagtgctgaggtagacaggaacaactgcatcttggggcccacctttcccccaggagcaggtgccctgaggaccgcgtggaccccttccacactgtactgtgcgtagtgcctgtccacgcatttcacctctcctacgagagtggacgtggccctaacggagttctgctagacttctgcatttgccaacaagctccgaggctcattgccttcctccccaaaggcaccaaagtaaaaattcttaattccaggactctctacaagcattgactgtctcccaaataaaagatgaaatctaagtagaaaagatgtcaaccacacacagtaaagtaattgtactcaaaataggtgtctatcagtaggatctcaaggcgtctgggcagcctggcctctgcggctagaacttgggtgaattcagccgagcagtatctgggccctcgggtgggggaatcgcggggaacttcttcattcaggggcacgtcgatcaggcaccctgggggggtggcgatcaggccccctgggggggtgtccccaggcgaggagctgacctcggtaagatccagctgacgaggcgctggggggaggggaagaaactgactccccagaatagaacctccttttaagaagggaagagggactccagcgcaattcaaccagaaatccagggccgaagtggtgaataagcagaaaaagcaggaccgtcaggtcttgacagtgcctttcccgactccaggggcagcgtcgaccggtcccacatcaaccccgccggccagcgcgcacctgcccagttcccacgccccggcccgggccgctccgtacctgctctgccccgtagaccgtagcaaactggatgaagtcctcgatgcggacgaaaccgtccccatccccgtccagggcatcgaacacggctcggaggcgggggccgtcctcctgactccccacgggctcgctcggaagggggtgggtctggctgaggtccgagggctgcggcggggacccgggaccttgctccagcgccagctcgcccgccgtgggcgcggggaagggagagaagacgtcgacctcgccccgcgctcggtggctgctgctggacccctgcaagcggaaaggcgcgctctccgggcagctcgcggggccacactcctcgggctcctcagtccaggagaacaacgggtcgagttctggaagcggcgcttcggagcgcggccctgggcccggggcgtcggggctcgcaagctgcccccgcgggccggagcgcggcggcggggcggacggcccggggtctcgcgggcctccctccagccccggggccggcccggcgctccaacgcgccccgccatctgcagcggccccgggcgcaggctcatccaggcccggggactgcgggtcggggccgccgacgggcgctccgaggcgtagctccgcagggcccggagccagttgtgccgcccccggcccgtccggcccgcccggctccgggtcgggccccggcggctccgagcccgggggcgaggccggcggggccgacgccatgctcccgagaggctagtggtgcggaagggcgcgggcggcagacaaaggcgctcagggcgcggcggcgggcgcgggcatcccctcggcggcgcgggcgggcgcgcgcggggcgcccgggctgctggggctggcgctcgggccctgctctgtcctcgcccatcttcgcaccgcgcctcagctgccctcggcccggcggcgcggcgggcgcaggcccatggcggcggggcggcctagggagggcggcgaggatccgggcggcggatggcgggggacgggggccgaggaggccgggggacgggggccgaggaggccggaggccgcggagcctgtgaagcaggatgaggagactaaggaggctgaggcgcctgaggtacccggagaactaacgccgccgccgcccaggccccgccccccgtcgggcctgacgtcagcacgtcccggcggggtcccagcccctcgccggcttgctgtagaggcaggcgccgggtgtgtcgcggcagtgcagcggccgcgaaggggtgttttgctgtatgtcatattcctcgtttcgccagagcgggggtcccgagcttcgggcgcgggacgcgggggtgctccgaggctgcgagtggaggcgtgacgtgacgtccctggcaagaggcgcgcggagtcaggccttacttagaacgtgttcccgccgcacagctaccagcgggcgcgaccgctacccacgcatggtgcggtcgagtaaacggcaccgcctggcgagcgagagacgcaaagggacatagccccctaggagctgagctcttcgggggtaaagcgttctcacgttgatgagaccaggaggcggcgcacgcctggctccgcggcccaggggttgcaggtgccccagggttcgcggggcgcagacgccgcagagggcgacgccctgcccgggtcccgcgcggacccgggggacgcagggtctgacacggagtgcggaggggccccagacacgcagtccatgtcccttgaaaccagaggcacgcgcggccacgcgctaggcctttcccttaagcctgtgaccaagatctccgggactcccagcgttgggacgggcgcgctggcccacgcccaagcgggaggatcgcttgcgcccaggagattgagaccagcctgagcaccaaagcgagacctcgtctctacaaaaaataagactcaagaagacacccagggtgaatcgcccgtctgcagccagcctcccgagcaccgtggccgcgtctgacaactgacctctgtgtctgggtgtccctgtcctcagagggacacgggacctcagaaaggaccacagcccggcggcaggcatgatggtgggaaagctagttaggacaggtgaggcactaaatttagcctgtcataatttgtatcagggaaatgatgaacttgtatttttacacaccatgggcaccaacacaagatatggtttcgtaagcagctttggcaagaaccaaaggaacggaacctctgcttccaagtgtacggtcaggagcagcgtgttaattaagtgagtcatcttccgtggcagaatcccagggtacatgggaccagacttcgcgaggctggcattaggaaaaggaatgtgagggatcctcctccccaaaccgtattctcattttcttgtaagagctgtacgtgttcatgaggaagatactgcattcaaagaacgaaatcaccagcagctttggcaagaattcaaatttgggctgatgccttcggccggataaaattttcagaagcagtgatagtgatgtgtcaacctttctaaataggggtgttagtgtgggcgaggcagagacagcaggctccctctgcttttatgtgccggcgctgccagaggcagaaggctggctttctgagagcaggggcccgcacgctctgtctgtgctagggctggaaaacgtccattgcgtgcccggctggtgtcctccatggaaccacagcctggaagcctgcacctccctgcctggaccagttagaggctgttcatgaaagactaaagggacaagttcccgtctatccgtctgctgttcagagctactatctgtgtcccctttgtaggctgtgggctgtagcagttccttcttttcttttcttttcttttttttccccgagacagggttttgctctgttgcccaggctgcagtgcagtggtgcgaccatagctcacggcagcctcaacctcctaggctcaagagatcctcccaccttaggccaggtgtggtagctcatgcctgtaatcccaggactgtgggaggctgaggcgggcggatcacgaggtcagaaaatggagaccatcctggctaacacggtgaaacccc

SEQ ID NO: 1243280 - DNA, 4001 bp, Homo sapiens
ggacttgaggggacttggaacccccagactggagggagccccttttcctgtccctggaacagcccttcctccatcctccctctaactggctctaattaaagggtgagaaaaatgcaaatttaagatttgctgaggacaagccggcacctcagcacgaggaattccagctggtgggggtgggggtgggcgctcctcacccaagagcagggtcctctcccctaggcaagccctggaaaccctcgctcaggctctgcagggagcatgtgcttctagggcccagtaaggcctctgtaccgaggcagcactgctggccccaagtggacgtggcccttgacttcctctgacccaccaccctgtaggcaacagtgtccgcctcccccaaggcacaggatatggtccctcggtaatgccagcccctggcatagggcaactaactatgcttgtcgggtgcagccaccagcccaggtgttggaaggtcgaggcaggcagcttctggggtccaggcctcgagcctgttggtaccatggggatcagagagaacttgctgctcgggtaccggcgggactctgatgtggggccaggccagggcctccactcacccggaagtcaatgcctacggtggagatgaaggtccccgccaggaaagcaccatccttgaatcgcaccagcagacaggtcttccccacacccgagtcccccaccagcatgacctaggacaagcaggagggttggggggagtctggtctgccctgagctggcctggtcagaagggggctgcaggtgaggagcaggagtggagggaggcagcccaggcctgcaggctcagcggggccagggaccccgatgggctggacacccagcgtatgcctctgaaaggctggggctgctctgtccttctgcacagtggccgtctcagtcagcggggagtgagggcagccacctgcatcccggaccctccctaacgtccatacccccacacggtggacagcatctgggaggggagcaggtggggtggcagctgggtacctcctaagagacttggggaggcctctgccgggggcttctccacatcccagtagggacatgaccccagcaaggctcgaggaatttgccccattaggatcagatctcgatctgaagagggacctgggccaagtctgaggttggggggaggtgcaagtgggcagcagtcaggccttctccccgaaacctgtgctaccaaacccaaaatggtcctcccagccccctgccaagtccacacagcctctgccttggtctggagtcccagggttccccatccatctggcaaacctcttccccccagcaaaaaaaaaaaaaaaaaaaaaaggcccacagccgctgggttgagggagggcagcatacgggaaatggtgagaccccgggcgggggccagggcactggggcgcgggaccccttgtgccaccatgccgcctggggggtgggggacaggccctgccagctgttggataccccagacctgggatggacagctgtgtgtgcacgatgcaccgtgcaagccccacggggttcctcccgcgtcggctccgcgccctggggccgcgggccctgcaccccctgtccgacccccaacccttggctcaggccgggcgccacctgctgcgctggcctggggggcgggtgcctggctcaccttgaaggcgacgtcgtagaagtcgacaccgccgccaagcgagggccggccgggctgcaagggcccgttgggcggcgcgtcggggccggaaagcgcagtcccggagcgcgccggtcgggccccgttggcggtgggcagcgtggaggcagcgggggtgctggcccctttgctcttgggggtcttcttcctggacatggcgggcgggcgctcagtgtgctcccgctgcagccgccgtgccctgggccgtcccgcaccccgcgcccgccgagcccgacccggacccgaacccttcccctggcggcggcggcggcggcggcggcggcggcggcatcatcccgggcgcccggctcgcgccccgcccccgccgctccacgggcgcgcagccactcaggcccggcctcccgccgccgccgccaatgccgtgcgtggggcggggacatgcaaatacacccccgctcggcggggggtggggggcggtcaggaggtccgggccccgtcccgcccccgatcacgacccctgcccgtggctgccttggggccaggagccagctgtggggtgacaggcctgggccaggagtcaccccgggatcctgaatcccctctgctggctgcacaccaccccagctcggtgacccccaaactggaccgccagacctgggaggaaggggtgtcctgagatgtgggtgctggggcagagggcccgcatggacgggcaccgcgggcttctgtctccttagccccagatgcctagcgcttggcccggtgcccttcactgctccatcccctccagggtaggcgggtccaggaagctccagccctggcttggcaaacacaccaggctgctggggcaggcgccctgggctcaggtgacagctggtcaccgggaggacacagcgggcgctgcgatctcccccacagcttctgcctgctgtgcacgcctggggatctgcgggaaggaggaagtcgctgtggcagccagcccccggccccctgagggtcccctcccacgggactctgccctcagggtctgaaaggtggaaagcagaggcccctgcccaggctgtgtggctggccccttgtccttctcctccaggttcggaccttcaggtggccagggccgattctccaaatcctaagctggtccctggcagacccacctccccaacctgggctgcactggagctctgtcaccccctctcacagagaagatgggactgcagtggtcagagctggggcacagtggtccagaggggtggtgtccttggcatgcaggggcttcttggtgtttctttgggagctggagagatgacccagctgtccccggagacctgacagctgtcaccaggaccttgggcccttcagagacctgagccctcccagctggcagtgcccagagtccaaacaattggctgcctctcgggtcagaggcctgagaaaacacagatggggggcactgcccagcagagtgattcctcgagagggcctggcagaggccgtggaagcctgccctacagcaagcactgttgtgtgccaggcacacgacctcttcaaagttatcctgcaaggtgggtactgccctcagtgtccagatggggaaaccgaggcccagaaaggcaaggagcctgtgcaaggtcagcaggctaggaagggcagagctaggatttgttcctgtgatctccagctccagagaacataaaccgtcccatggcagaaatccctgtagacttaatccccaggaacctggcagagctgggggtcaaacccggaagccctctcagaacccttccttgtctcactcctctggccccccagctcttccagaccaacccccagtgtgtgtgcactgggcctgggtagaggcatttagcttctgcagctgcagccctggggactccaggtgtccacccgcgctacaaggcctctttcaggatggctggcccagggtctgagctgggggcctcagcagctgctgtgcactggccccagggtcctgggcagtggactcccagtccagtggaccccgtcctgccagctgctgctcaggtacccccagggcgcgggcagcaggaggagttgggtgcaagtagggcatcctgcagggggaggagtgcggatggggcccccaggaagagaaggaggcaggcgcgctggagaaagtgggaggccaggcggggaggggagccttgagagagcagaggaaacgggcttgcgctggcaacctttaaaattaggagagtttacataaaaatccaagtctctggtttctcttgaaaatggggagctctgggtgcctgcatcacagacccctctcttggcttccagcaggcct

SEQ ID NO: 1243281 - DNA, 4001 bp, Homo sapiens
agatctataacaccttccctcggaccccagatgatcccagacccatgacaccttcccttaggaccatgatgccttcccccagatctatgacaccttccctcagaccccagatgatcctagacccatgacaccttcccctgagatcccagaccatgacaccttcccttaggcccatgacaccttcccctgagatcccagacccatgacacctttccccagatctatgacaccttccctcggaccccagatgatcccagacccatgacagcttcccttaggaccatgatgccttcccccagatctatgacacctttcctcggaccccagatgatcctagacccatgacaccttccttttggcccatgacgccttctaccgggaccatgacatctttccccggaccccagatcctggacccatgacaccttccctcggacctatgacaccttctcccagaccccagatcctgcacccatgacaccttccctccggcccacgacaccttcccccgagcccatgacaccttccctcggaccccagatgatcctagacccatgacaccttccccaggcccatgacaccttctctaggacccatgacaccttcccctgggctccagatcccggacccatgacaccttcccctgagatcccggacccgtgacaccgtcccccagaccccgggtccatggcaccgtccccgctgggcgcgtccctctggtccgtcctcctgccccccggcgtcacctcgggactggagcacgggcaccccgcagccaccgagctaccgagtctggaagccaggcaaaggcgttcctgggaacgttcggcggcgcttggaagggccgggccgagggcgagctccgtgcccagctcgccgggctcgggccccgcgtagcagcgcgcgccgcgggccgggccttaccgttactgtaggcgtacggggactctgccgcgccgtcctgcaggctctccaggatctcgcccttgcccacgtcgctgtcgcccaccagcaggaacttgagcaggtagtcgtagctcttcaccggactgccctgcgagcccatggccgcgccgcctgcgccccgcgccggccgcctgccgaagcaccgccgggtgaggccgcggcgtgagagagcccgcgccccgcacctgcgcccgttgcgtccgccccacggcggccgagtgggcgcgcccgaagcccagcgccggccccgccccgcccgcgcccgggcgcacctcagcctcgccgccgccccgccgcttcccgcaccaccagggccgccgcgccgccccacccccggccgcgccgccgccattggccacccttcgcccgccctcccgagcccattggcccacccgcccgtccgtcacgacttccccgccctcacggcgttccacacggcgccgccagacctccggtcgcaccgcctcttcaccaccccgccctgccttcccgtagtcaccagaggtcgcccgccgccctccttccctcagccattggcctgtctgcacgtctgtcatgaccgcccctcccccgcctttcccacacggcgttgcggagacagcggacgcctgcctcatcgccgtcgccattggccactcgcctcctgctttcccggaaccattggttcgattataagttcaccaagatcattcccttccctgcggctgcctcccagagaaatcccagagccgccggccgccccgcccccggcccacaacgccgttgtcctcgcccgccccgtcgccggcgccattgggtcgcttgcatgtccatcacggctctgctaaccccgcccctttcctacacgctcgccaatcaggggctcggaagtccacgttgtttgtatccgccccttcaacgcgcggacgggcggcaggatgcaggcgcgcccgagccgaggcgatgcggctgagtccgggaaacgaaagcccctcgcaggctgtgccgcctgcttccgcagaaccctcggagggagcggcggggtggccccgggcgcgtcctctctaaggcggtgcggccaatcggcgctcgatgaggcggaacttcctctccggggcaggggcgggacttccgcccggcggcggcggggcgcaccgttgggtcaccagtgagtctgcaaagtcgctgaggttctgggacagcgcggcgtcaccgagcgtgagccttccgcccggggacgcggccgccacagctcgggacgcggggagcgcggccggcgcgagctcaagacccggcccgacgtgctcactgcggcagcggcgcctcctggacggggacccagggcccggaccgcgctcttcccgggggcgccgccgagccctcgtccctgccgggcccggctgccgcaggtgcgtgggcgagcgaggcggctgcgtccgcgggccccggcgtggggtcgggggttgagtgggcacgtggttctttctggggtgacgagaaggtcctaccgtcgtggggatggtcctgcctctctcggtgaagttactcactcggaacgggtgagctttgtgatacgtgctctgcgttcagtagcgctgttacagtcgtaagtaaaagcagtaacgtcagcgccgacccagcgcagccctctccagaccgggtgcggagcccgtcacgtctgccccgccggcgaggagcagagcccggcaagaaccctcctccagaggggccccgaccagggctgtgcctccgggagcaggtgctgcttacacagagggacgccaggacgggcagccccacacctccagtgacctcccgtcccccagagctgaagacatggcctgactaagcggcgaccacatcgacgcaccagttttttcttttttgaaacagggtctccctttgtcgcccaggctgcagtgcagtagcgcgatctcggctcactgcagcctctacctccccggcacaagcgatcctccagcctcagcctcccgagtagctgggactacaggcgccaccatgcccggctaccttttgtattttttgtagagatggcgccttgccaagttccccaggcattaacccggaaacaacctggcgggtcagggagagcctcttctgctcagaggtcattgtgcccagacttgagccctggctgtgaagtccctgaggcccctcactccagggacgggaagcaccaaagatgtgatgtttcctcctcggtttctgagactgcctggaagcggggggtggatagtggtgagcagccgtctcctcctttcctgagaacataaatcagaaacgctttctgaggccgggcacggtgggtcatgcctgtaatcccagcactttgggaggctgaggtgggtggatcacctgaggtcaggaccagcttggccaacatcgtgataaccccctctccactgaaaatacaaaaatgagccaggcatgttggtacgtgcctgtaatcccagctacttaggaggctgaggcagaagaattgcttaaactcgggaaacggaggttgcagtgagctgagattgtgccactgcactccagcctgggctacagagtgagactcttgtctcaggaaaaaaaaaaaaaaaaaagtgcctcaaaaataaacaattaaaaatgttcttatggtcttcacaaaaataaacttttttaaaaaagaaaaacaaagtaaaacgctctccagacccagccgtgggccactgctgcctagttcccacctcctgggacaagaaagggtcatcccctggctgatgaagaagtcaggtttctcccactggagctgcccaccacagcctgtggacacagccctgtcctgggttcctgggttcaggaacctttccatagggtgagatccttggaaagctgctgtgccctctgacctcccagcctccgagcagaaaagtgtcccagggaacccagatgggtctagggcagcaggcccagtgaagggagggacggactctggggcagcaggcccagtgaagggagggacggactctggggcagcaggcccagtgaagggagggatggacagaggg

SEQ ID NO: 1243282 - DNA, 4001 bp, Homo sapiens
cagtgagctgaaattgtgccactgcactccagcctggcgacagagtgagactccgtctcaaaaaaaaaaaaaagaaagaaaagaaaagaaaacaaaacaaaacaaatgttcagtaactcattacagaggtattttcttctagcacaaagcgttgactccctcagcagtaagcaaatacctcaggggaacagcgtgcctataaggacctgtcatctgtgcacgctcgagacagggtcccaagagcagcccagcagcacctgccaccagacctgggtccgtgacaccttccccgggcccatgacacctttccccagatctataacaccttccctcggaccccagatgatcccagacccatgacaccttcccttaggaccatgatgccttcccccagatctatgacaccttccctcagaccccagatgatcctagacccatgacaccttcccctgagatcccagaccatgacaccttcccttaggcccatgacaccttcccctgagatcccagacccatgacacctttccccagatctatgacaccttccctcggaccccagatgatcccagacccatgacagcttcccttaggaccatgatgccttcccccagatctatgacacctttcctcggaccccagatgatcctagacccatgacaccttccttttggcccatgacgccttctaccgggaccatgacatctttccccggaccccagatcctggacccatgacaccttccctcggacctatgacaccttctcccagaccccagatcctgcacccatgacaccttccctccggcccacgacaccttcccccgagcccatgacaccttccctcggaccccagatgatcctagacccatgacaccttccccaggcccatgacaccttctctaggacccatgacaccttcccctgggctccagatcccggacccatgacaccttcccctgagatcccggacccgtgacaccgtcccccagaccccgggtccatggcaccgtccccgctgggcgcgtccctctggtccgtcctcctgccccccggcgtcacctcgggactggagcacgggcaccccgcagccaccgagctaccgagtctggaagccaggcaaaggcgttcctgggaacgttcggcggcgcttggaagggccgggccgagggcgagctccgtgcccagctcgccgggctcgggccccgcgtagcagcgcgcgccgcgggccgggccttaccgttactgtaggcgtacggggactctgccgcgccgtcctgcaggctctccaggatctcgcccttgcccacgtcgctgtcgcccaccagcaggaacttgagcaggtagtcgtagctcttcaccggactgccctgcgagcccatggccgcgccgcctgcgccccgcgccggccgcctgccgaagcaccgccgggtgaggccgcggcgtgagagagcccgcgccccgcacctgcgcccgttgcgtccgccccacggcggccgagtgggcgcgcccgaagcccagcgccggccccgccccgcccgcgcccgggcgcacctcagcctcgccgccgccccgccgcttcccgcaccaccagggccgccgcgccgccccacccccggccgcgccgccgccattggccacccttcgcccgccctcccgagcccattggcccacccgcccgtccgtcacgacttccccgccctcacggcgttccacacggcgccgccagacctccggtcgcaccgcctcttcaccaccccgccctgccttcccgtagtcaccagaggtcgcccgccgccctccttccctcagccattggcctgtctgcacgtctgtcatgaccgcccctcccccgcctttcccacacggcgttgcggagacagcggacgcctgcctcatcgccgtcgccattggccactcgcctcctgctttcccggaaccattggttcgattataagttcaccaagatcattcccttccctgcggctgcctcccagagaaatcccagagccgccggccgccccgcccccggcccacaacgccgttgtcctcgcccgccccgtcgccggcgccattgggtcgcttgcatgtccatcacggctctgctaaccccgcccctttcctacacgctcgccaatcaggggctcggaagtccacgttgtttgtatccgccccttcaacgcgcggacgggcggcaggatgcaggcgcgcccgagccgaggcgatgcggctgagtccgggaaacgaaagcccctcgcaggctgtgccgcctgcttccgcagaaccctcggagggagcggcggggtggccccgggcgcgtcctctctaaggcggtgcggccaatcggcgctcgatgaggcggaacttcctctccggggcaggggcgggacttccgcccggcggcggcggggcgcaccgttgggtcaccagtgagtctgcaaagtcgctgaggttctgggacagcgcggcgtcaccgagcgtgagccttccgcccggggacgcggccgccacagctcgggacgcggggagcgcggccggcgcgagctcaagacccggcccgacgtgctcactgcggcagcggcgcctcctggacggggacccagggcccggaccgcgctcttcccgggggcgccgccgagccctcgtccctgccgggcccggctgccgcaggtgcgtgggcgagcgaggcggctgcgtccgcgggccccggcgtggggtcgggggttgagtgggcacgtggttctttctggggtgacgagaaggtcctaccgtcgtggggatggtcctgcctctctcggtgaagttactcactcggaacgggtgagctttgtgatacgtgctctgcgttcagtagcgctgttacagtcgtaagtaaaagcagtaacgtcagcgccgacccagcgcagccctctccagaccgggtgcggagcccgtcacgtctgccccgccggcgaggagcagagcccggcaagaaccctcctccagaggggccccgaccagggctgtgcctccgggagcaggtgctgcttacacagagggacgccaggacgggcagccccacacctccagtgacctcccgtcccccagagctgaagacatggcctgactaagcggcgaccacatcgacgcaccagttttttcttttttgaaacagggtctccctttgtcgcccaggctgcagtgcagtagcgcgatctcggctcactgcagcctctacctccccggcacaagcgatcctccagcctcagcctcccgagtagctgggactacaggcgccaccatgcccggctaccttttgtattttttgtagagatggcgccttgccaagttccccaggcattaacccggaaacaacctggcgggtcagggagagcctcttctgctcagaggtcattgtgcccagacttgagccctggctgtgaagtccctgaggcccctcactccagggacgggaagcaccaaagatgtgatgtttcctcctcggtttctgagactgcctggaagcggggggtggatagtggtgagcagccgtctcctcctttcctgagaacataaatcagaaacgctttctgaggccgggcacggtgggtcatgcctgtaatcccagcactttgggaggctgaggtgggtggatcacctgaggtcaggaccagcttggccaacatcgtgataaccccctctccactgaaaatacaaaaatgagccaggcatgttggtacgtgcctgtaatcccagctacttaggaggctgaggcagaagaattgcttaaactcgggaaacggaggttgcagtgagctgagattgtgccactgcactccagcctgggctacagagtgagactcttgtctcaggaaaaaaaaaaaaaaaaaagtgcctcaaaaataaacaattaaaaatgttcttatggtcttcacaaaaataaacttttttaaaaaagaaaaacaaagtaaaacgctctccagacccagccgtgggccactgctgcctagttcccacctcctggga

SEQ ID NO: 1243283 - DNA, 4001 bp, Homo sapiens
catctggggccacatcccattcggctgggtccaggcccccatgagaggggatgaggaccacaccgtctcactcactctgttaaccacctaaattaagaggcatgctcaggcaggcaagccccagtgatgccacctatctagtgtattttagccatgccactggaagttaaaaacaaacgttcaggccaggcgcagtggctcacgtctgtaatcccagcactttgggaggccgaggtgggcagatcatgaggtcaggagattgagaccatcctggccgacatgctgaaaccccgtctctactaaaatacacacaacaaaattagccgggcgtggtggcatacacctgtagtcccagctactcgggaggctgagacaggggaatcgcttgaacccaggaggcggaggttgcagtgagctgaaattgtgccactgcactccagcctggcgacagagtgagactccgtctcaaaaaaaaaaaaaagaaagaaaagaaaagaaaacaaaacaaaacaaatgttcagtaactcattacagaggtattttcttctagcacaaagcgttgactccctcagcagtaagcaaatacctcaggggaacagcgtgcctataaggacctgtcatctgtgcacgctcgagacagggtcccaagagcagcccagcagcacctgccaccagacctgggtccgtgacaccttccccgggcccatgacacctttccccagatctataacaccttccctcggaccccagatgatcccagacccatgacaccttcccttaggaccatgatgccttcccccagatctatgacaccttccctcagaccccagatgatcctagacccatgacaccttcccctgagatcccagaccatgacaccttcccttaggcccatgacaccttcccctgagatcccagacccatgacacctttccccagatctatgacaccttccctcggaccccagatgatcccagacccatgacagcttcccttaggaccatgatgccttcccccagatctatgacacctttcctcggaccccagatgatcctagacccatgacaccttccttttggcccatgacgccttctaccgggaccatgacatctttccccggaccccagatcctggacccatgacaccttccctcggacctatgacaccttctcccagaccccagatcctgcacccatgacaccttccctccggcccacgacaccttcccccgagcccatgacaccttccctcggaccccagatgatcctagacccatgacaccttccccaggcccatgacaccttctctaggacccatgacaccttcccctgggctccagatcccggacccatgacaccttcccctgagatcccggacccgtgacaccgtcccccagaccccgggtccatggcaccgtccccgctgggcgcgtccctctggtccgtcctcctgccccccggcgtcacctcgggactggagcacgggcaccccgcagccaccgagctaccgagtctggaagccaggcaaaggcgttcctgggaacgttcggcggcgcttggaagggccgggccgagggcgagctccgtgcccagctcgccgggctcgggccccgcgtagcagcgcgcgccgcgggccgggccttaccgttactgtaggcgtacggggactctgccgcgccgtcctgcaggctctccaggatctcgcccttgcccacgtcgctgtcgcccaccagcaggaacttgagcaggtagtcgtagctcttcaccggactgccctgcgagcccatggccgcgccgcctgcgccccgcgccggccgcctgccgaagcaccgccgggtgaggccgcggcgtgagagagcccgcgccccgcacctgcgcccgttgcgtccgccccacggcggccgagtgggcgcgcccgaagcccagcgccggccccgccccgcccgcgcccgggcgcacctcagcctcgccgccgccccgccgcttcccgcaccaccagggccgccgcgccgccccacccccggccgcgccgccgccattggccacccttcgcccgccctcccgagcccattggcccacccgcccgtccgtcacgacttccccgccctcacggcgttccacacggcgccgccagacctccggtcgcaccgcctcttcaccaccccgccctgccttcccgtagtcaccagaggtcgcccgccgccctccttccctcagccattggcctgtctgcacgtctgtcatgaccgcccctcccccgcctttcccacacggcgttgcggagacagcggacgcctgcctcatcgccgtcgccattggccactcgcctcctgctttcccggaaccattggttcgattataagttcaccaagatcattcccttccctgcggctgcctcccagagaaatcccagagccgccggccgccccgcccccggcccacaacgccgttgtcctcgcccgccccgtcgccggcgccattgggtcgcttgcatgtccatcacggctctgctaaccccgcccctttcctacacgctcgccaatcaggggctcggaagtccacgttgtttgtatccgccccttcaacgcgcggacgggcggcaggatgcaggcgcgcccgagccgaggcgatgcggctgagtccgggaaacgaaagcccctcgcaggctgtgccgcctgcttccgcagaaccctcggagggagcggcggggtggccccgggcgcgtcctctctaaggcggtgcggccaatcggcgctcgatgaggcggaacttcctctccggggcaggggcgggacttccgcccggcggcggcggggcgcaccgttgggtcaccagtgagtctgcaaagtcgctgaggttctgggacagcgcggcgtcaccgagcgtgagccttccgcccggggacgcggccgccacagctcgggacgcggggagcgcggccggcgcgagctcaagacccggcccgacgtgctcactgcggcagcggcgcctcctggacggggacccagggcccggaccgcgctcttcccgggggcgccgccgagccctcgtccctgccgggcccggctgccgcaggtgcgtgggcgagcgaggcggctgcgtccgcgggccccggcgtggggtcgggggttgagtgggcacgtggttctttctggggtgacgagaaggtcctaccgtcgtggggatggtcctgcctctctcggtgaagttactcactcggaacgggtgagctttgtgatacgtgctctgcgttcagtagcgctgttacagtcgtaagtaaaagcagtaacgtcagcgccgacccagcgcagccctctccagaccgggtgcggagcccgtcacgtctgccccgccggcgaggagcagagcccggcaagaaccctcctccagaggggccccgaccagggctgtgcctccgggagcaggtgctgcttacacagagggacgccaggacgggcagccccacacctccagtgacctcccgtcccccagagctgaagacatggcctgactaagcggcgaccacatcgacgcaccagttttttcttttttgaaacagggtctccctttgtcgcccaggctgcagtgcagtagcgcgatctcggctcactgcagcctctacctccccggcacaagcgatcctccagcctcagcctcccgagtagctgggactacaggcgccaccatgcccggctaccttttgtattttttgtagagatggcgccttgccaagttccccaggcattaacccggaaacaacctggcgggtcagggagagcctcttctgctcagaggtcattgtgcccagacttgagccctggctgtgaagtccctgaggcccctcactccagggacgggaagcaccaaagatgtgatgtttcctcctcggtttctgagactgcctggaagcggggggtggatagtggtgagcagccgtctcctcctttcctgagaacataaatcagaaacgctttctgaggccgggcacggtgggtcatgcct

SEQ ID NO: 1243284 - DNA, 4001 bp, Homo sapiens
gggcagggaccaggagaggtaagttcgccagcgtagatggcattccctgaagcgcagatggactctggggaggctggatgctgactgctcccagttcatctggggccacatcccattcggctgggtccaggcccccatgagaggggatgaggaccacaccgtctcactcactctgttaaccacctaaattaagaggcatgctcaggcaggcaagccccagtgatgccacctatctagtgtattttagccatgccactggaagttaaaaacaaacgttcaggccaggcgcagtggctcacgtctgtaatcccagcactttgggaggccgaggtgggcagatcatgaggtcaggagattgagaccatcctggccgacatgctgaaaccccgtctctactaaaatacacacaacaaaattagccgggcgtggtggcatacacctgtagtcccagctactcgggaggctgagacaggggaatcgcttgaacccaggaggcggaggttgcagtgagctgaaattgtgccactgcactccagcctggcgacagagtgagactccgtctcaaaaaaaaaaaaaagaaagaaaagaaaagaaaacaaaacaaaacaaatgttcagtaactcattacagaggtattttcttctagcacaaagcgttgactccctcagcagtaagcaaatacctcaggggaacagcgtgcctataaggacctgtcatctgtgcacgctcgagacagggtcccaagagcagcccagcagcacctgccaccagacctgggtccgtgacaccttccccgggcccatgacacctttccccagatctataacaccttccctcggaccccagatgatcccagacccatgacaccttcccttaggaccatgatgccttcccccagatctatgacaccttccctcagaccccagatgatcctagacccatgacaccttcccctgagatcccagaccatgacaccttcccttaggcccatgacaccttcccctgagatcccagacccatgacacctttccccagatctatgacaccttccctcggaccccagatgatcccagacccatgacagcttcccttaggaccatgatgccttcccccagatctatgacacctttcctcggaccccagatgatcctagacccatgacaccttccttttggcccatgacgccttctaccgggaccatgacatctttccccggaccccagatcctggacccatgacaccttccctcggacctatgacaccttctcccagaccccagatcctgcacccatgacaccttccctccggcccacgacaccttcccccgagcccatgacaccttccctcggaccccagatgatcctagacccatgacaccttccccaggcccatgacaccttctctaggacccatgacaccttcccctgggctccagatcccggacccatgacaccttcccctgagatcccggacccgtgacaccgtcccccagaccccgggtccatggcaccgtccccgctgggcgcgtccctctggtccgtcctcctgccccccggcgtcacctcgggactggagcacgggcaccccgcagccaccgagctaccgagtctggaagccaggcaaaggcgttcctgggaacgttcggcggcgcttggaagggccgggccgagggcgagctccgtgcccagctcgccgggctcgggccccgcgtagcagcgcgcgccgcgggccgggccttaccgttactgtaggcgtacggggactctgccgcgccgtcctgcaggctctccaggatctcgcccttgcccacgtcgctgtcgcccaccagcaggaacttgagcaggtagtcgtagctcttcaccggactgccctgcgagcccatggccgcgccgcctgcgccccgcgccggccgcctgccgaagcaccgccgggtgaggccgcggcgtgagagagcccgcgccccgcacctgcgcccgttgcgtccgccccacggcggccgagtgggcgcgcccgaagcccagcgccggccccgccccgcccgcgcccgggcgcacctcagcctcgccgccgccccgccgcttcccgcaccaccagggccgccgcgccgccccacccccggccgcgccgccgccattggccacccttcgcccgccctcccgagcccattggcccacccgcccgtccgtcacgacttccccgccctcacggcgttccacacggcgccgccagacctccggtcgcaccgcctcttcaccaccccgccctgccttcccgtagtcaccagaggtcgcccgccgccctccttccctcagccattggcctgtctgcacgtctgtcatgaccgcccctcccccgcctttcccacacggcgttgcggagacagcggacgcctgcctcatcgccgtcgccattggccactcgcctcctgctttcccggaaccattggttcgattataagttcaccaagatcattcccttccctgcggctgcctcccagagaaatcccagagccgccggccgccccgcccccggcccacaacgccgttgtcctcgcccgccccgtcgccggcgccattgggtcgcttgcatgtccatcacggctctgctaaccccgcccctttcctacacgctcgccaatcaggggctcggaagtccacgttgtttgtatccgccccttcaacgcgcggacgggcggcaggatgcaggcgcgcccgagccgaggcgatgcggctgagtccgggaaacgaaagcccctcgcaggctgtgccgcctgcttccgcagaaccctcggagggagcggcggggtggccccgggcgcgtcctctctaaggcggtgcggccaatcggcgctcgatgaggcggaacttcctctccggggcaggggcgggacttccgcccggcggcggcggggcgcaccgttgggtcaccagtgagtctgcaaagtcgctgaggttctgggacagcgcggcgtcaccgagcgtgagccttccgcccggggacgcggccgccacagctcgggacgcggggagcgcggccggcgcgagctcaagacccggcccgacgtgctcactgcggcagcggcgcctcctggacggggacccagggcccggaccgcgctcttcccgggggcgccgccgagccctcgtccctgccgggcccggctgccgcaggtgcgtgggcgagcgaggcggctgcgtccgcgggccccggcgtggggtcgggggttgagtgggcacgtggttctttctggggtgacgagaaggtcctaccgtcgtggggatggtcctgcctctctcggtgaagttactcactcggaacgggtgagctttgtgatacgtgctctgcgttcagtagcgctgttacagtcgtaagtaaaagcagtaacgtcagcgccgacccagcgcagccctctccagaccgggtgcggagcccgtcacgtctgccccgccggcgaggagcagagcccggcaagaaccctcctccagaggggccccgaccagggctgtgcctccgggagcaggtgctgcttacacagagggacgccaggacgggcagccccacacctccagtgacctcccgtcccccagagctgaagacatggcctgactaagcggcgaccacatcgacgcaccagttttttcttttttgaaacagggtctccctttgtcgcccaggctgcagtgcagtagcgcgatctcggctcactgcagcctctacctccccggcacaagcgatcctccagcctcagcctcccgagtagctgggactacaggcgccaccatgcccggctaccttttgtattttttgtagagatggcgccttgccaagttccccaggcattaacccggaaacaacctggcgggtcagggagagcctcttctgctcagaggtcattgtgcccagacttgagccctggctgtgaagtccctgaggcccctcactccagggacgggaagcaccaaagatgtgatgtttcctcctcggtttctgagactgcctgg

SEQ ID NO: 1243285 - DNA, 4001 bp, Homo sapiens
tgtctgggtaacatagagagaccctgtttctacaaaaaaatactaaaaattagccaggcatggtggcatgcacctgtagtcttggctacttgggaggctgaggtaggaggatctgcttgagcccaggaggtggaggttgcagtgagctgagatcacaccagcgtgctgtgacgcactccagcttgggcgacagagtgaaactcttattgactcaagaaaaaaaaaaaaagctagctattgttattatttaggacacacctggcttttcttatatagtagatataacaagtttcccttaataaatgtatgtaaacttttaaaatgtggatctatttaaagaacaaatattaagtaaacagcacagtaagttgtacaaggatgtgtctacattgcacaggcaggtggatcctgaaatgtgggaaatacagccccagagaagtctccagccaccagcagctgttagaaagggaaatcgcatgttgggaagggaattttaggaagtttactctggaagccaatgtcaaggccacactatagaggaagatctgtgagaaggttgggacaaaagtccaggagagagttgacgagagccccaccgcagcaggggcatagcagcgggggcagctctgacatctgtttcagagtctctggcttctgctagaggaaggagagtagaaaacaggatcagcagctggggcgtctggggccagaggaccaagtacaaagaacgtggggcggaggtggggaagctggtgcatggcgtggggtggaggggggagtgtctggggaaggctagagagcagagcattagactcacagagactgggccagggctgattctatttcccagaagtccagactaaaatgaggttggtttggggaactgagaagtttctcgcccatcttcagggttgatcaatcatcagtgagggacaagaaatgacatgggacaaggcaacagatagaagctgggagctaaacttagctataactgacagagctgctgctatcacatggagggcctctatgcaaattttaaaagggcggcccttcctctgggccataggcatgccctgtgccaggcagccctgctaacctatcccatagcttatctgtgcccccaatccctttctcgtcatgcactccccagtatggggttgatggggagtctaggtgagtcccgcgtctcacctttcaggatggcctgcagcgaggccacctcctcttggcactgccgctgcaccgcagccacagcctcggccttcgtgctctcgctcacctctgccacagccttcatggtttccatttctgccagggcgcctgccagctcagcccgaagccggctgagctcacctgactcggcctcaccatttgccccttcctgggaccgggagtcctccagtgctgtgggggacagggatcagcctctcttcccatctcttaccccaggccacctaccggcttagcaagtcctgcaacctagtactgttgccttcatctggggcctccttcacctgggcccgcccggctcacctggccccgcccctgccccgcccccttcccactcgctctgccgggtgctgcctacactccatctcttcgcggtggccagtttcactcagtcctctcttcggtcccacctggccccgccctcctagtggccgcgccccttcctcaccgggccccacttcgcacctgtcactggccctaccccttcaatggccgggccacgcccccttttgcctgtggctgtaggccccgccccctttcccgacggcgtggccccgccccttcctccatcatccctctccaccccccatccgcaggtggctggctcggccccgcccccagcatcaccgttccccgcttgcacggacgccccctcacgtaccagcccccggccgccgccgccgctcatcgtcgtccgcggccaccggcgcagctgccgccattgcctcagcgcaaacggcggattcccgcactccctggtgacggagcgcaccgcttccgggtcctctcggctgtttccggatccgctcggctgtttccggatcggccccgggctggaggccccggacggaggatggggggattgccgagcctcggccgaagattcccgagtcggcccccggccccggccccggccccgccccggctcttcttggctgggtcgcgcggttcgggaggacgcctgcctttcaagcccggaagaggatccttaagaggtcttgcccggcgtctctccgtgaccttggaagccctgctccaattatgcctcctccgggacaccggcctgcggagagctccccctcgctccctcgctgcccctgcccggagccagcctttgatcggctccggccgcccttccgcccgagcctggcttgcgttaccgcgaattgtggcggggccctccctgcacctccgccctcttggagcgtccctcggggcagggccgggtcggcttcatttttctgagcgcctcggagtccccgcgtagttagtcggagtctgaaacttgcacgtccccacccccattttgttactcagccagtcaccgcttcctgctggcccccctttcctcctcccaacgccctcaaatccctcctctcctctccgcctgtgtctagatcaggctctttatctgtgacctccacccggacggtgacaggcaattcagatttatgtccagagccttggttccccttccctcaaaccttttttccctctgtaaaggacacgccaggaacctggaagtccttgattctacgtgtcctcctgcaagtcccgtaaactctacttccaatgtgctgactattccagaatgtgcccctttttctccatctccagcgctaacactccgtcccagctcccatcacttctcctgaacttccgcagtgtcgactccaccctttaattaattaattctccgtaaagcagctggagcgatttttgtaaaacagataatgcagtttgaaaatggccaaaggtagaacgcttttacactgttggtgggaatgtaaattagttcaaccattgtggaagacagtgtggtgattcctcaaagacctagaaccagaaataccatttgacccagaaatcccattactgggtatatacctaaaggaatataaatcattctattacaaagatacatgcacgagtatgttcattgaagcactattcaaaatagcaaagacatggactcaacccaaatgcccatcaatgatagactggataaagaaaatgtggtacatatacaccatggaatactatacagccataaaaaggaacgagatcatgtcctttgcagggacatggatgaagctagaagctattatcctcagcaaattaatgcagcaacagaaagctaaacatgcatgttctcacttataagtgggagctgaacaatgagaacacatggacacagggaggggaccaacacacatgggggcctgtggggtgggtgttgggaggggggagggagagcatcagcaagagtagctaatgcatcctgggcttgatacctaggtgatgggttaatgggtgcggtaaactaccatggcagatgtttccctgtgtaacaaacctgcacatcgtgcacatgtaccccagaacttgaaataaagaaaatggacaaaggatatgaacggatatttcactgctgtcacaggtggcaatatgtgcatgaaaagatgttaaacatcattagctatttattcgggaaatacaaattaaaaccacaattgctttcatcactacgcacttcttggaatggctaaaataagaatgctaacaccaaatgctggtgagtatgtggagaaactaggtttctcatattttgttgatgggaatgtgaaatggtatagccactctgcaaaaagagtatggcagttttgaacaaaactaaacacgcacttactttttcatcaagtataaaaccaagtgttttccaccaagcttggagctgaggtctcggctcaaatgttacctcctcagtgagg

SEQ ID NO: 1243286 - DNA, 4001 bp, Homo sapiens
tcggtcttctgaagtgataggattacaggtatgccagttaatttttttgtatttttagtagagacagggtttcagcatgtttgccaggctagtctccaactcctgacctcaggtgatctgcccatcttagcctcccaaattgctgggattacaggcgtgagccaccgtgcctggctcctaatgctgactttaatgaggaccttcctaaagttgatccaactagtagtgttcaagtccttggactgaaaaacaagtttatgagcagcaaggtcacctgattctgatcatgtgtatgctgtttaccctgagatgacaggccggtggccacagaagctttcatgaatgctgcaaagactctactatctctttgaaggctaccagggcctccacatgactaaatgccataaaaaagaacctcatgaatacagcaagaatgtgaaaggaaggaagtcacaaaaacaccacatgctcatgagggaaactccattctggacactaaatttttaaagtaaacttgttacttgtttgcctaaccttctaggtatcaaattacatcatcactaaaaataatccctgctttacccccaacacacccactggccatcaagatctgctgcttagaccagaccatgcccacagtcaggaaataatggcagcccagacccatgcggctccccagctcacatcagcaacaagtgccagccaaaggacctgaactctgaccacagggatcagctccatgatcagggaaagagggtggtcatgaagggcttacccatctcttcctttgctgacaatcttcacttcaaagtaataaatgccacaggcagcaggtatggggtgggtggcacgcactgaggccgcatctttgtgatttttgccatgacctaacaggagagggcaagtaagaaatttcagcagaaggaaatgcaaatggaagcctcatttttctctgcaactcctccatgacaactccactcctctgtggccagaggacgcacttacacaggccgaggaatcattagacaactgaataaacacttaaaccttccacctttgcctcacctcctcctgagaacagcagtcctgcctgagacactgcccatacaaacaaaacaagggtagaggcaatgtgagagatactcaagtgctgctggcagcctctctagaatccaggcagcccacctgggaggccaggggaagaaggatgaggccgacctggaagacaccccccaaactctagcacggaaccccaggctcagtctaggatgcctggcaggtggggaagcccatgagtctcacgctaatggtaggtatgtgaccacccctttcttctaagcagtggcgaaaggtcccgctgccgttggcgccagcctaggataagcacggaggccctggagtggaaggtccggcccagcactgggtttggacacctgttgcggttctcttgacggcaggtgtctcaggacagagaacaggcagtcagccctcggcctgttcagcctcaccaccctggacatcctgaaagggccaagccctaacttggagcacctaggcagggaaagggaggtgatagggcgggggcctggcagcagagccaccccacggacgctctagccttaattccccccagcctgacgggccgatacctttgtagtggacgcggaggttgccctgggagagaccaatgtagttgtatttgtccttggggctccaggagcgcggcagcggagtctcttgctggttgaccgcgggatacaggcgctgcaagcgccggctcagctcctgctccccaggggacggcagcccgcccccagcgcccccgccggaggagtccccaggctgcgggttcccagctcccgggtctgccgtcgctgccgccatcttggagggagctactattgtgtcactgggggcggggaggagcgggaccagatccgccccgctcagccaatggcccgtgagcctccctgggccgcagggaaaccgagtccgagtccggcacccctctttggacactgacacgccttaccacatttcgaactccataccccacaatgcagagctctcgagaggcggagcaactcgggctggtagagaattctgggagatgtagtataaccgtcctcagccataagcctgtcccatcgagacgtcgggacaccgaaaactaccattcccgccggcaaagcggctccggcctctcagcacacttccctccccatggcctctgttcatccccctgcctcagttctggtacctggggtcaaatcggctgtagtggttgactctcagggcacccgctgccgggtcccagtccacctttgctactttgtcctactcccagcccgcgggcgctaggctcgggggcgtggcgcatccctgactccgcccccgccgcgggggggcctctggggcctggtcgccatggcgaccggctgtacgctaccacagcttcccaggccgcgggtgctgattgcccgcctgcccgtgggtcatggcctgccagcagtcgcggtaccacagcttctcgtccgcgtcgaggtaggcgctggcagggatgagggcagagatgagggtttgagtacttctagagagggaaatggcacttgatccggacctctgcacctcctgctggcctctgaccattgatctagggctccagcaccacagagtcaatggttagaatcgggctgatttagcccagtgaagacgttacgtgctagcaaaacggtaggcgcactttatcattactagtaacaaccagcttgtattgaatgtactatatgccaaatgctttatataccacatttttaaatattttatttttgagacaagatctcgttctgtcgcccaggctggagtgcagtggcactactacggctcactgcagcctcgacctcccgggctcaagcgatccttctacctcagcctcccgagtagctgggactacaggcatgcgccactacgcttggctaatttttgggtgtttctttgttcgtttgttttttgtagagacgaggtttcaccacgttgcccaggctggtttcgaactcctagactcaagcgaccctcccacttcgacctctcaaactgggattacaagcgtgaacccccacacccggcctacgtaccatatttaatcctcacaacaactgtataaagtagtaatattaccattgaacaagtaaagaaatactttagaagcctggagagatcatcctctgggtagcttctgcctgtactcaggtgtatagcctctgggtactgcaaaatatgaccagctccatcagcctggagagccatacatacggattaaaacaaaaattttggctaaatcgttttctagttttgggacttcagacagggcccttcaagttccaggcctcagcttatatatctcaaacatgggaatgatacagcccaccccacaaacattgttgggaacatttaggcagaatatgtgaagctcttgacacagctcttgtatgtaataggcacccagtaagtgttgaatgaatgtagtgtccccccttctactcattcccagtgggggaaaaaaaaaaaaacaccacccaatcccacctaaactcttcagggtctgctgccttgacagagaaaagcctacaaaagcccctaagaggccaggcacggtggctcacgcctataatcccagcactttgggaggccgaggcggggggatcactaggtcaggagatcgagaccatcctggctaacgtggtgaaacccggtctctacaaaatacaaaaaattagccaggcatgggggtgggcacctgtagtcccagctactcgggaggctgaggcaggagaatggcatgaacctgggaggcagagcttgcagtgagccgagatcctgccactgcactccagcctgggcaacagagcgagactacgtctcaaaaaaaaaaaaaatttagccgggcatggtggcaggcacctgtattcccagctacttgggaggctgaggcaggagaatcg

SEQ ID NO: 1243287 - DNA, 4001 bp, Homo sapiens
tagcagcctatttttcagtaccttagtatcaacagtcacgtaaaatctagcaactactactttaaaaaaaatcagtacttttgatcttcaccgaattgataaagcttaagagtaatgtgatgaactaacagtttaactacttaattgccgtattactaattctggaattgacacacaagacaagagcggtgacatcagaacatttcaagatccaaaaacaattccaatactgattaaatcctcaaaaatattaaagttcagatcccttatccacaacacaggcaagcaactccaaataaataaatgcgaggagggaggaaggcaggacataaaatttgccatcaaactccacaatgttgttaggttagaaaattgtttttttggttttttttttgtttttttttttgctgattgaacaaacaagctttgcacaggctctcctgccctcctgatggaaaataagttagaaaacgccctaagacaagcactcaaagagtctagatagctatccccctctcctccctccctcattttaaaaaacagcgagaagaataatcaggcttccacgttttgggttagcctgttacagatgacccaagtatgcagaaataaaataaaccagtgaaactccaaggccaactgctgcaaaccttggctatcaatgaaagttgtatccaaagtactagaacgaacagtccccactagagacataatggcggttagcttcctgccaggcaccttctagctagtatctctctccagccaccaaatatcttaagaccaagcggcccttaccttctttcgtctgcgcattggtgatctgcaggtcgcagtcggcagctttcagcttctctctccccataatctgcttctttaagtcgcagagggagatgtggagcccatcaaaggtgacggtatcatagttgagtttagaggaaaatttataatgcacacaggacatggtgccaagggattcctaaggttcagcgaggagacgtggacactctcaatatacgtatatttataaactttaagagcaaaatatgtacacacaaaacactcaaagacaccgaaggaccctaaggcctcagattaaataccccccaaccacaagcaggggttcgtcagaacaataatccagagaccccccgatactcagaatcacttcatgggggaggaggaggacgaggacggggaagaggggaaatcgagaatccgccaacgggcacaatgtcacccggctgggtccccctcgctcatgctaaggggccggcagagacggggggattggcggtgcagtcagtagcggtcagtccacacgttaagagtccgagcgaccccacggggtcaggggtccatagcgcggccgcacctcccggcgggtctctctctccgtggattggggtgacccaggccccgggagaaggttgaggggagagggcctaggcccggagtccacgagcggcctcacgcctcctcctggcttccggacgaccggcgtcagcttccccaggcccaggcccaggcccccaccgcacacaaacccctggcgcctgctccccggaggccacgagcggccccacggcctaggccgaaaacgcgcggtcggcggaggagaggccttcccgcaggccgcccccggctccgcctccccccgccgccgccgccgcctcggacacaaagccggcgctaggcctcggcgaggcctcggagcacttcctcaccaccccgggccccagccggcggccgggtggcttcggcggaccccggggacaccgccgaggctccctgacgcttcttctcgccggatcctccgcgcttcgctcgcctttcgtttccgtcgccttgaggcccggaaccgcgagaacacgcccgcaagctgctgggcagcggctagggcttctccggctccctttttgtgttggccccctgccgctcgggggctctcaccgagcggcggcgacacctccaagccaggtactatggcggacgcggcctggcttcggacgagcgccccactgcggggtctcttaagcagggattgcacgggcggcgcgcgcgaggcggggctggcgtgcgcggataggcgggccgagaggcggggcggctgacgtcacaaagcgcacggcccgcccacgtgaccccgcgctttgtgactccaaagcgcggaaactgaaagagcagggacaacgggaagaaccatctgcttcaaaagggaggggggttgcgcgtcaggaggaccggctcacagggaggctcggtggggagagctcgccttgcaggggctgcgtgcagtttccactgcaaagtggcttgcctaggggtggccggctaactcccccttccccacaggccccgtcagctcctctaagcctcccaatttaagtgagcattatggttgctacgcagaaaactatggttgctatgcaagcgctccctagctgctgcttccaataaactggctaccctatactcttgacaagtggaaatcgtggagcagccgctgccaagaactgataacagccaccagcaccatacagatttattgagctcttactatgtgctaggcacagggctgatcgcataacaacattgccaggctcagcagccacgttgtctgggttggatccctggctgtgggggctctagatttaacccctctgtgcctgggtctccttggctgtaaaatgccattaaaaatagtacttggtttacttggattaaataaatgcacataaatccatagtctaagaccatgccggtgcattgacgtggctcaatgcaccgaaatattaatagctgtagctcaataaatgtcaatttaacaacaaaaaccctacgtggtcaacatgacattatttccgatttatagatgatggaactgaagctagcaatcatgtactttctgaatttgcagaaggggatgcctgctcagtggcagggtcccgattccattcctaagcgcaaatgccaggaacagtgacaagaaccccctcagtagattggaattttttttttcctttgggcatggggacgttattacattcagaaaaaatcataatataataaaattacattcataaacgatagttattatcgtttacaatccatgttcctcatcctctctgaattttacaggctaggctcagtgaatttaggcaactgagaataagatcctatagccgagaagtagcagagtttcccagggacttcctgcaagcacactccaaattcttactgaacttgatttaaaattaatcaccatcctgccagaaaagccttcctaaggccatctttttaaaataagatggcgatctttctctatccctttagtcttttcttcctagcacttgcagatagttgacagttacacatttactttttaattatctatctcccccaacccctaccttcggctgacaataggaatcttatctttatatttgtttttgctgtatcctcagctcttagaacatagtaggtgctcaataaatacgtgctgaataactggatacatttttacgtgatccatagagatgtcgtggcaataaaattttggccgtagtcaagggcagctctagagataccattacaatttaactcaaccacacacatcagtacttttcatatataacaagtttcttccacttttacctctttgttatttcaccaaaaacttattgctgccaggtcctcttcaggttggttgcttttttcttaaaagcctctgtgtgaatgaaagggcgagggctatctctagtgaaagaaaaactcgacgagaaaattgcaagccgtcatggaattcactccgaagcggtgaatctgttccttttgcccgtctgtggccgacccctttatatactgaatgcctaatttaatcagcgtggtgcatcatgggatctcaaagtgggccacaccctcaggatatgacagagtggatcataacctaatctgcagggggggatgtccttggaaagaatgttgtctattggtccaaccgt

SEQ ID NO: 1243288 - DNA, 4001 bp, Homo sapiens
ctcccccacttcttttcaagttcaactgaaaagatccgcctttggggtgccaattgcccggactgcctgaccaggatttccaagctcttcagtagccgcaccccagatgttccagtgccagcaggtgcaccccagctctggcccacacaggagcgatgagctctcccagccccctgaccattccctggcagcaaggaatggagctgggggctccaggacaaggttagatcggggtcttcccctcccttgctgagtggacagcttccgggctccgcgtgacacctggtccccgcagctggcgccagggaggctccaggagctcacagccaagtggcctcctgggcggtggggagatgggagcggcgccccactagccccgccctcgcttccatagctggacaattggttgattggagctgacaagcccccccctggcctgcacaacaacacagggctaagatctgctacccctgtgtttccttctctggggtgaaggttctctaaggctcccaggaaccaggggcacagtaggagtttcccattcgcaggtttcccggctggccccctcccctggggtcgaggtggcaccgcggggcatcgattccagtgccagtaaacacagcggcgctttctccacataagtgagccttctcttcccctcctcccacaaggggttcggggcacctaaacaccctcccgggtcactaagatgcctcctcctgcacaccctgcgggcggaggcagcggtccgggggcgcgctgagtgcacgcttgcagccggccagggagactaatcaaagtgcgcaggcaggctcccgctgctcctggcacctaggactcgctcccaggaggacggacgaggtagcctggatgcttcggaggggcgctctggggcaaggaaggacgtgcttctggaagcgacgcacaagggggctcagggtctcggcctcctgggggtagggggggacacgcctcgagatctttccacacaccctgaaaaagttcccgtccagagcgcccagactggcgctaggaggaggccagttctcggggacctagcgcttccctccatgagaccttctggacctgacccaccaggtcagggtgggtgcagaggcaatgactccgcctggacttacctagaactcccggcgagcccggctgcggtcacgttctcggccccagacccccgaattcccgtgcgctctctgcacccccagccacactcaccataagctggaggcggcggaagggggtgctggtttctcacgcactgtccgcaacttcgcgggcaggtcagccccgccctggcgcgcctgcctgggcgcggcgagggtccggacaggcggggaccctggcggccactgggtgggggtctggagcgcaaggactctcaatcccgggcgcgcggtccgctcctgctctctctgcctgggcaagaagctcggagttctcctgctccggacgccggggcggggcccacggctggctgtcccctccagatgtggggtgctcggctcggctcactccttccttcttcagccccggaggcgcgcgcgtgggtccagccagtgccgccgcctctgctgttcccggggctggcagagcgcccccgccccaccgcgggtgctgctggggggctggggcggagggggagggattcccctccgcgagttcgggtttccccacccgacgcggcccctgggctccgtccgccgtccgccaccctccgcgctgcttggagaaccacttcagggcagcgcagccagtcccaccgactctggctggaggaggcggcggcagcgcggctcgcacggggactggaaaggaggtgaccttcaaaccccgcgctcgggagaccaggaagggggctggggtgatcgagggagcggtgtgtgcacccagacggccagcaagagcgcttgtaggagggcgggagagaataaagaggaaatcttccagtaaaaatatagattagaaaataaacaaaggagagccggagagagcgcgagaaaatgtgtgcatgtgtgtgtgtgcgtgtgtgtctgtgtgtgtgtgagcgcgcgacaagcagcgagcagccccggctgcggagccaaaaataatctggtgcgcgagggagcgccccctcccccttcccctcgccagcgccgccgccgccgcggtcacgcgtgcagccctggattccagcgggcggcggcggcggacacgcgacccggtaccctggtctcctggcctaaaggggacagagggtgaaagttggatgctggggcaatgagcccaggactttcacctgcgcccgtcctcgtcctggtagtccccaggtgggctcactcattgagcaccagcgccctcctcccaaccccaatcaaagtagacaaatcccccactagagacgccaagtggaggcagcttcttgccccagtccatttcttctctgaggaagttttctggcaagtcttcaaatcttccggccaggcagagatcgagccctatccaagattcaaaaagttctccaggctggatgggatgcagggctggggtgggtgcggctggcctgggacgcccccaccccgcacagctgggcctctcctgtcctgcccccttcctggccacctactcccgcaatggacgctgaaggggtctagggattgtcctcctagcagatgtcttacagccagaagccccatgacgccttaatacacactagcacttaataagcatttactttccaccagatgctgttttaagcactttacatggagtcttttcaacaactggaagtagatactggaggtttatccatttcacagatgcttagagagattaaagcaatatttctcccttcctgggtcccactctggactggagtgagaaactctgctcttcccctaccttttcctttccctccctcccttccttcctccctccctttcttccttcctcctttcctcccttccttcctttctcccttcctcttttttccacaaatattccagggggttttgttgtacaataaagtcagtctgaggttcagtgagttgtaatttgttcaaggtcacatagctggcaaggaaccaggactccccaggcagtctacctcattttatgtggcaccaccctgccttctgaagggcaggtggcattggacaaggccagattccagccttgagcacttgatctgaggcgcctgttcattttcccatcctgtgatgtgactgtgtttgcacttataccatggatcctcttataagaaatgctgtaagctttccaaaacagggggccatgtgatgtgcattcctttgtactagatgtacgtgtatttcctagcgcccatcaaggagcagattccttaagggttcctcttgcaatcctatcgggctgcggtttctttcaacctcagaataaaagaaagggaacttctgcctataactatattactttttaaagcacgcaatatttaatcatcatttgaaaaagtaagtttgcaaaatccagaaagatatctttatcattggtcccagcgattttgcaatttgggttgatttttaccatatgtttccttaggattctctttgataataatatatttgtatgtaagcaatttttttttctttatactagtctcatccttcagtgatagcaaaatgaaaccataaatctgggttggtaacatcataatcatttcccccagaaactgttcacaatgggaaaaccgccgaatttaaatgtaattgtctagccatgcagggagatgagatgggttgtaaaagaggtattctcaatttaaaagcaaattatcaataatgatagaagaaataaatggcagttaacgggaaattctgttggaatatactgttttgtgcaaattcaccaacaggaattgtttgtctattctccttcattttttattccagaaaggaacaaatgaatgcaatcattcaaggcagtaacatcagctgttgttacattaaaatgggtaattgctgggccctttgatt

SEQ ID NO: 1243289 - DNA, 4001 bp, Homo sapiens
agagactgactgtggttcacgcatttgttcacatgcttgttccttcctctcactgtcacccgtttgctggttcacacctttgaaagccaccaaaatgatgacattaggcactaatttgacgaaagacaagggatgtttgaccgaagctcccaaattcactttctctgtaaggggacagagagagggagagggctgtctcgattagagagataactgtcagaaccctccatcttttttcctttaattttaattcaaagagatggactgacataactggttccatgatataattggttgcatctgatttatttgattcatttttaatcttatcacctatttttttttctttttgggattaggcaagacaagatgttaaaatcctttcttcatacctttctaatcccaacctgagaggtcttaacagttgggtgtgtctgtttgtaggctttttgtctactttttttttttttttttttttttgagacagagtctcgctgtatcgcccaggctggagtgcggtggcgcgatctcagctcactgcaagctcggcctcccggtttcacgcctttctcctgcctcccgagtagctgggactacaggcgtccgaaccacaccaggctaactttttttttttttttttgtacttttagtagagacggggtttcaccatgttcgccaggatggtctggatctcctgacctcgtgatccgccagacctggcctcccaaagtgctgggattacaggcgtgagccactgcgccctgccttgtctacatttttaggtatgttatataagatatgaacacagattattaataaagatacatattcattctttttaaagaggagatgagattagggcctatagacgtatactgtccaatatggtagccactactcaatggggttaagtttatattaactaaaattattttaaaagcccctcagttgcactaatcacatttcaaatgctcagtaggcccatacggctcatggctactatattggaaagctcaggtataaaacactcccaccattgcagaaagttcaactcaacagttgaactaattaactaatagttataattagtattataaaattataatactaatcgttttaatgctaatgctaatttactgtcaagaatactctatatattcctgacatatatagctcatacaattaattcctatagatgactctatatagctgacatgtagattgtttgtaacaatcagtaaattatcattagctgcttcttcccttaaatataattctctgaacatagagaagtaagacaatgactatcagaattcatgcttggtagcagagacaaaaggtaattgggttgttgatatttaatttgcttctggaacctattatttagagtcccagttttagaaattgtgatcataaccacaattgctcaatttgttatgcctgtgtagacttggccagttagaaatgtccagccctaatggctgcattctgatactttcctggaggggcaccatctcacctgggagggaatagagtagacatgctccatgaattcctcaaaagcttcctttcaaatgtagacaaaaccaaacagacagagaaacctactaataacaggcaatctcagttacagagacactggaatttttcatttgccttcccagagtgccggtctttgttccgataacttggtattttacaaaaagtccaattcttggtaatttaaagctaggaaattaatgggaaatcagaaagccaatgagcatttacaggtagaaaaagcaaactgtgattacctggtctctgaggagctaattacaggttcagttgaaaacgggaggaccatgagaaccatgtgcgtgtgcacacacacaaacacactccacacccccgcaacgcaaatgcactccatgcccacacaaatacacacagacaaacgcaccctacatccacacatatatacacacaaatgcaccccatgcccccacaacacaaatgcaccaaactcccacacatacacatagatacacacaaatgcaccccacgcccacacatacacacacacagaaatgcaccccacacccacacatacacacacacaaatgcaccccatgcccacacatacacatacacatacacacacacacaaatagaccccacacccacacatacacacacaaatgcaccccatgcccacacatgcacatacacacacacacacacaaatgcaccccacacccacacatacacacacaaatgcaccctatgccccccaacacaaatgcaaccaactcctacacatacacatagacacacacaaatataccccacacccacacatacacacacaattgcaccctatgccccccaagacaaatgcacccaactcccacacatacacatagatacacacaaatataccccacgcccacacacacacacacaaatgcaccccatatccacacatacacatgcacagaaatgcaccccatacccaaacacacaaatgcaccccacacccacacatacacttacacacacacaaatgcaccccatgcccacacacacacacaaatgcaccccacacccacacatacactcacacacaaatgcaccccatgcccacacacacacacacaaatgcaccccacacccatacacaaacacaaatgcaccccacaccccaatatacacatacacgcacaaatgcaccccacgcccacacatacatatacacacacaaatgcaccccaagcccaatacaaatgcaccccatgcccacaaatacaatcacacacacacacacatatgcaccccacacccacacacacgcacacaaatgcaccccacacccaaatatatagatacacacacacacacaaatgtactccaagcccacacttacacacacacacaaatgcaccccacgcccacacagacacacacacacaaatgcatcccatgcccacacatacactcacatacacacaaatgcaccccaggcccacacatacgcacacaaatgcaccccacatcccaacatatgcacacacacacaaatgcactccaaacccacacatacacaatcacacacatacaaatgcatcccacacccacatatacacacacaaatgcactcaaagtccacatacacacacacacacacaaatgcaccccacactcacacatacacatacactcacaaatgcaccccatacccacccatatacatacacacacaaatgcaccccacacatacacatacactcacaaatgcgccccatacccacccatatacatacaaacacaaacgcaccccatacccacacatacacatacaaatgcaccccatgcccacacatacatacacacacacacacacacgcacgtgcgcacacacaaaacccttccagcctgtgcccacctccaaagaagcagacagctgcattgctgcataaataaattatttggatagctcactgtttgagcacaatcgatccttcctctgtactagggtcaggcactgtatatccatagcctggcctgacctgcagttgtatataaaatatgatattaaaaaaactccccactagcccacttctacttgggaggctcacagtccatcaatcattcattcctctttgcccacaccggaaccaccaacagaccacaaacttgggggaagttaacagcattgaaaggaagactgttcctcaggaaagccacagttcctgtcacagaaatcatacagcacctcatagttttcctagagcatacttagcaggaatttactggaatggcagaaagagccgaagggagtctttccgtttcaattattttgaggatcttatatagctattctacacaatgcccagagtaggagataacctcttccggccccttcaaagaacaccaaaggtctaatggggagaagggaaaagacacagcctgacagtaatgcatcttctgccccatcaggaactctcagtcttggtacaatt

SEQ ID NO: 1243290 - DNA, 4001 bp, Homo sapiens
catcttctcatctatcactggggtaatacgtccagagtggcatttcgtaatgacagcaacattccaacaaatcgatagttatttaattcccaacaagctctggagtccattaaacctgattacattcacccatttcagtgggtgccgttatttttcctacaccggcacttaatctataacaggaacttatgagaactttcaaaagcaatttcagcatcaatcagcatagagtgaaggccacgatttgcctgtaattatttatcagatgggtcggcagagggtctgacaaagctccaacagccgaccttcaccccacgtttccagtagcagcaacaggcctgttaactttctaagttgccactgagccctacttcagaaatggcaaccttatcataccggcctgtgtataccagggaagacgcaacaagttccacgctgcaaaggaccgttctccagatgacccatttgtttataacaggtaatacagagaaaagcttccaaacagaggaacggccataaatccagaaagagagaatgttttgttgtgacttggaatcacccccagatgactctaatcacccaggttcgtacacttaacaaaaggtaacagcaaagttcagaagaggtagggggaaaagtgaccagaatggttcccagaaattgtaattaatgagctagggtatcatatagtttttaactatgaggggctggaggggacagagggaggcacaggagtaaaggtgaaaggacgtacctaaatatattttgttttccttttctgtagaaaggagatacagaatttattgcaaagggatgattatactcaaaaaactaattataacaacaaaaagccaccttggatttctatgatctgtgggttctatcgctagtagatgttagctttcaacggagaacttcagacataaacgcggaaggcaatacctgcttgcaaagaaaaccttatgatgagggggaaaaaaaaaggtccccaattgtttattggtagattaatcctctctgcacagaattaaaagacttcaaagtaaaaccagcacacatatcaaccctccactttcttgccatcattaagatgtacacatctggcaagggattcctagaataatctctgagcttcataaattacccatcaatagagtgttccttcttgcctcagtgccaccactcaaattcaggtggggagagccttctctgaaaatagacaatccgtgtggaggcgtcctatgaattaatgcatatttcatgctcctttcatttcctgggttaaagctcttaactgagtcacctcatgataagttactttgtctcatgatctgctctgggagactgagtccctcagaaagctgagaaggagagcaaatcctttgccccgtggtcaacctcctgaagctaagacatgaatgttaaatagcagtcagatcaatacaagcaaatatagctcaactacaccatttattcagccatgagagatgtcgatagctagattagggtgatccatctttttgatttcctactgtcttctcactgactacgcgagggctttttcctgtattaaaagtgtttgctttctcaaccataaaaattccaattattactctgagcactctggagttaagttgctggctggcagaggccttgaattacctgaatcagtccaggaaggtaaggagctgccggtacaatcataggcacgccataaggatgcaggagaactccttgagacgccagcatgctttacgtagagttattattccctctgaagctcaacacatcaatggagagttagggggaaatctatagacccaacttcttccgaactacaaagctgggagccaaatcccttctgtcaggagccaagcactcatcaacgccgggagaggaaagaaagaaaatccgcatcagcaactcttaatgtgaaagttttcttcccagacgacgaagagacacagcagctgcaaagttgaagctaccaaaatggaaggtgctattttgggaacagcttgcctaacatgactaaccaaatactcttcattaatttagttctcagagagagagagagacagagagagagaccaagagaccaagtgacagagggaaccaggctatgagatataagctcatcctactgaatttggccaaaagagcaagggatggggtctacatgggatttttagggaaaaataaactgagaaatgtaaattaatgtgattatcgcctccgagttaaaattcaaatccagcaggttaatgtgggcaacgtttggcactgatagaaaaaaaataagaagatattcagtctagttttcctcccgctctctctctgatttcaaatttaaagtggcaatttgtaaataagataaaactaccagccagcttgtatttgcacaatgtgtgctacgcagagagacagagttaaattatttacacgtgttatgtaatttcattctcacaacaagtctctgaagtcagtactattatcagtcccatataacaaatgggaaacagggctgatactagttaaatggtttgctcatggtcacatagctcgtacaaggcagtgcgaagctacaaacacattccagagcccgattcctaaccacaacactgttttcactgctgtatttcagtctgtaataacattttctatgccttttattttgtgtttttaacgacattctttattttgagctttcatctgtgatatattaatatgcaatacattaacaagagatgtcttcttgttctcagagtttcaaggcatagctaacaagcaccaaaactatggataaaaaatacattcaagcacagatttgaaatctttctggtgtttgaaaatacccaagcaatcatttgggatatgttacataggagcagataaattcctaggggatgacatgaattggaattaattccaattgaattaatatattaattaatataattggaattatactgacttgggtgtcagtataatcactagctgtgtgatcttgaacaagttacttagcctctctgaaccctgttcactcatttggaaaactgagataataatagtccctacttcaaaaggctgtgttatcattaaatgaagtcctagaaccataacatgatgtgtgcagtaccggcagctattagccacttttatcatgtattccctgttttcctgatgattggtacagacacatctttggtttcagattgaaggctttgacctgagactgaaggctcagataacaatcaaattgtcagtcttctaatcttcttattagaaagacatgtgggtgtgtgtagttccacaattttgaaagcaataatatgaagttctgatgaagtgaatccactcaaataatgcccaagtcccaggaatcactgaaaatcaccttcaaaatgaaacattcactggccacattccactgctcactctaaacaggacacttgatatagattttgttgaaactgggagagagcttcaaacaccgccaaacatatccaactattggcgttttctaaatccaaatgtcaattcctccactttcagatagccaaggtgtttttacactacactaattttagttgcttgatttagctgcataattgcatttctagataacgacggcggacagggtttggcagagaattcaattatttaaggctgaattttggccatcttgacaaggtttctctgtaattgattctcatgcatcaaagtggccacgttgtacaattcaaaaagctcccataacagctgcgcactgacccctcttactcaacagcccgatactgtttctaactttagcttttgacgatgactttcaacaccacatttctgagaagttaccggggaggacagaagcatcactgtgagacggacgtgtctctcccgtctgctttcctttagcaatcaacaggaggggagagctcttacttacttaggtaaggcctgtgtcagatcaaattgtctctttagtgttgtaaaatagaaag

SEQ ID NO: 1243291 - DNA, 4001 bp, Homo sapiens
aaactgggctaagaagctgaaactaaagtctcagtaatcaaaagaattgagtaatcaaacatgttttcaaaaataatttactaaccagctattacgtgatacttgctcatgtatcactagacttcatacaacttaactgctatgagttgaaatacctcaaataaatggcgataatgcttgttctatctgatttacaggattatcttgagggtaaaataagagcttgtttggaagcctttaaggccatttaccaaaaaaaaacccaaaaaacaaaaaacaacataaaaagccaaccagtccttctctttgccagactacagaaaggcactgagagatgaataggaacatagcttactcagccagatcatgtaaatatacaaagagcttagtaaacttgaaaacactgtccatatgggtgctttatgtgccagaaactacattattgccttatttaatcttcagaacagctctgtgaggtaaacacaaatatctccagtttagagatcaccatactgaacttttccagcggtttcaggtctgtcgggttctaaagccaccatacactatcttctgcagacctaacaattcaaagagggaactagtaattgaattaaaattctattaatgcaaatacaaattaaaaataacctcactcatcagtacacatagccaaaaacatcatatttaaataataccttggttaggctttgcatcctggacctatttgcccgactctttctacaaattaattataaaacgacttgagaaatcaaatggcctcaggtttaaatgccacacacacagtcaaacagctgataaacaatccgtacttccgtgtcacttcccattggcccatgaaggggaggtgcatacaaagctgacactcactggctagaatggccatttttctcatctgcaagccctgtccgaaggctgcgacctaacacacccggatcgcaacaacaacaggagtcctgtgcaatgcccggggtgaccaaaaagccctcgaggtagccacagtcctgatcctagtgacaaatgggggcatgtgtctacatccgggtcggcggagggctcatttcatctggcctggggggaaatgagtattaatttgtttacacagacgtaaacacagcccaaaacgcatcagcacgttgactcaaacgcccgcaacgccagggcaaaggcaatttggttaacagggggaagcgaacagacggagacgcctggagacccaggtgccacaacccggttaatcgcggtgcaaataagggcaagtcccctccccttgtccgtgtggtcttgacaacgacactagttcattctactaacaaggcgggcggggggtcagatgggccacacacacccattttcctcaacgggaccccagcgcgatctcagccttgctgtgctactttagggcaagacgcgttccccattcggaagccgcaggaaagcgcggcgagagcgggttagccctcggagcggctaagagcctcggaatagcgcagaggaagtccccacccctctcggggctgggagcccgcaacccgcccgagagtctctcgaggcgcgcgacgcggctcggaaggcaccggttcacgccaactaggccggaagcgcccctccgcccgcgagcgcacctccagcgtgtagctttcgctcatgctgcggtagctgtcccaggcctcggcccgcgccgcctcgtccatgttgaggcggctgcacagctcgtcgaaccgctgctggatctgaggggtgggcgactcggcaggcggcgcggcgtcttccgcctcgccgtcgtcctcctcctcctcatccgaggctgccgccgccggagggggaggcgggggcggtggcgactggtcacctcccgacggcatagcgcacccctgggcggccggacctcaggtgaggtgagggcccgggcccgcagccattcaaacggcgaagcgcccgcccgtccgccgcccgcaccgcgcctgcgccgccgcaaacgacgctgaccgcctgcaggcacccgtagtcttgagcacgggctgctgggaaacgtagtccaggccggcggttcaagggggccaaaaatcatgtttaaaaaaattagctcccctagtttcaccaggggtgaaataaaagcaccttccccgcattttaaacacgtacctccccaccgtgagaacattcaacagggctgtactgacgagaaaatgtccaaaagacactgacgtgtgaaggtttcgtatccaggctgttcccagaagtaaaacttcctcatcgcctggatatccttatctaaaaaatagggataatagcaagggcctgtctctgtacgttcacgaaactgcctttgcaaaaatcctaacagtgagaaagttatgacagtgcaagggatctgacctaaatgactccacgcttctcacttccgagctgcccttgttcattcctgggcgaagacctaactaactacaggaggaatttaatttctaatttcactttgaaacaaagattgtaacagtcctttccaaaaacaaaccccattcttgcctggggatcagtctgcctttgtagaactaacaaattagccacaagattagaaattatgatttaggaggcttgcagccagaggctataagattcctgacctccccaattgctctcagggataacatcactattgtaaaacctaagattggtgctggagatacttttcagaccgcgcattccgatgcactagctggcgccactcagaccataatctggctcaacaagttctgcaattccactcagtaacagaagacagcaagagcccacttcaaccccctgtgatttcacctcccacctgacaaattagcattcgccaatccctggccccctacccgccaagtcattctttaaaaaccccagtctccgaattttctggtaggctgatttgaataaccaaactcctgtctgccgttcagctggctctgcgtgaattaaactttttttttttttttgagacagagtctggctctgttgcccaggctggagtgtagtggcacgatctcggctcactgcaacctccgcctcctgggttcaagcgattctcctgcctcagcctcctgagtatctgggattacaggtgtgcgccaccgcacccagctaatttttgtattttcagtacaggcagggtttcaccatgttggccaggctggtctcgaactcctgacctcaagtgatccacccacctcggcctcccaaagttctgggattacaggcgtgagccaccgtgcccagccaattcattttatttccaattctcctttctttattttaattttttaaattgccaatccttgatttataaatgggcttgatataaaacattttccagattgaggagcaatctgaggattgagcaatttgaggattcagaaggcattactgttttgctatttttgttttgcttggtgggatatgtaaactgacagagggaaaagtgctgggacaaaagtaggggcttatggaaggtataatgacaggcgggaggacaggaaatggaactctgaagataggagaaaatcaggtagacaggtaacaggatatttcaggaacaattttgagacaatggaaccctcttaagaaaaccttagtaaaattcacagtaatcagcaatgcttttggagttggctaagtgatgagtctcaaggtgactatggggcaagaacagaagttgaacacaaatggtttagaagtatcttaagtatataggctggacgttgtggatcacacctgtaaatccagcactttgggaggtcaaggtgggaggactgcttgagtacaggagttcgagaccagcctgggcgacatagtgaaaccctgtctctacaaaaaatagaaaaattaacccagagtggtggtacacgcctgtaatcctagctacttgggagactgaggtgggaggaacgcctaagcctggggagtctgcagtgaactgtgaccatgccactacagcttgggca

SEQ ID NO: 1243292 - DNA, 4001 bp, Homo sapiens
aagttctatggaacggtgcagttctggagctgaagcttcctaaccactgtaggccagtcggaggtgcctagaacgagagaccatgggctgggcaccccaaaccttgaggatgtcacacaaacgctgttttttatgtgtgctgtgagcggtgcttaaaatgtcaacctcagacttgtcatctttgttactcaggtttcaatcaatggccacaacaggcaggacgaaagcccctcaattaaaggttgagaagaggtgggcgggggaagtgttcaaatctttgctctggccggtgcagagggtcacgcctgtgatccctggacactgaaatgcccaggcggatggatcacttacgctctggtgttccagaccagcttgggcaacacagtgaaattcccatctctaccaaaaaagaaaaatagaacaggtcaggcgcggtggctcacacctgtaatcccagcactttgggaagccgagggcagaccacttgaggtcggagtcccagaatggccaatatggtgaaaccccgtctccactaaaaatacaaaaactacccgggtgtggtggcgcatgcctgtaatcccagctacttgggaggctgaggcaggagaatcgcttgaacccgggaggcagaggttgcagtgagccgagatcgcaccactgcactccagcaggggcaacaaagcgagactctatctcaaaaaaagaaagaaaaaagaaaaataaaacaatgagccgggcgtggtggcgcgcacctgtggtcccagctattgcgggaagccgaggtgggaggatccctggggcccgggagttcgagactgcagtgagctcttccagcctgggtgcaacagggagacttttctttctttctttctttctttttttgagatggagtttcactcttgttgcccaggctggagtgcaatggcgtgatctcagctcactgcaacctcggcctcccgggttcaagcgattctcctgcctcagcctcccgagtagctgggaaatggggtttctccatgttggtcaggctggtctcgaactcctggcctcaggtgatccgactgcctcggcctcccaaagtgctgggattacaggcctgagccaccgcttttctctttataacacctttttctctttataacaggaaaaagggaggaagagagagggagagggagaggcggagggggaagaggagggagagggagacgggaggggaagggagagagggaaagaaggaaattaaatccctgttcttttactacatggggaaagaaagacatagatagattagatagacagattagatagatagatagatagatagatagatagatagatagattgattagatacatagatattaaatccctgttcttttactacatggggaaactttgggcgggtttcctaaactcggctcaacttgttctcctgtaaaacagggataatacaagtctttactccacagtttccgtgatgaaattaaaaatgaagttcttccatcaactttaaagtgatgaagtaatcggcgctcagagcgggcgcaggcaacgccgctgaggagcccgaggctaggctctcgggggaagggccgggcgacctcccaccccggccagggcaggccccgcagcagcgaactcggctccttcagtgatcgccccgagctctcgcctgcccagcccccacgcccagcaacccagatacgcgcgggggttcgggctccttagccccgaccactggcgccgccccgagggcccgaatcccctcaggccgccgggttccaagcccgcgtgcagcccacctcgtggggtgtctcctgaatcccaatccaggaatcaggcgtggggaggtttatcccgaagctagaggcccaaggcctgaggagaagcaacacccctcctcacctgaaaccagcaggccgcggccgggctcgcgagcccgccgaagactcggtagttacctcggccgcactccgaatgcacctacgccaactgccacttccggagccgctcaagctcccgccagagccgccggcaggcatgctcctattggacagaagccctacgctgtggccaatacccactcttcttcttcaatgggtcccccgatagctgaagcagcggtgctctcattggctggtagttcgtcctgacgaggcgggaccgcgcttgaggaagcctcctacaattggcaggaatctacgtccgtcaccttgcacccgccccggaaaaaatgggaggtttttttgttttttttttgtttggtttttttttttttttttagcgcgttttatttgaactttctggcgggagaaagttatatgatttctcggtccattttggaatggggatgatgatattaaaactgactcctgctgcttatccctaacgctttagtgaaggagttatctgtatccaaaggatagcagctaatcgaataatttcaaaatatttcaatattttgaatttcggagcctgtaaagaggcgtaggacagtccagttcatatgtatcctctcatggggttgaagagctcacgcaaaatactttgcctacataatctcttcaatctcaaaccgctgcaagggatctgagctactgaacagtctcaaatcacttgttagggccgccgctcgccgccagcgccaaaagaaaggggcccccggaattctccagctacgtacgaggagcgcgagcccacagccgtctcggctccgagcccgccgccggcaggaaagccacaaagaaaactgataaacccagacaagatgataaagacgatctagatgtaacagaactcactaatgaagatcctttggatcagcttgtgaaatacggagtgaattgtggtcctattgtgggaacaaccaggaagctgtatgagaaatagcttttgaaactgagggagcaaggaacagaatcaagatcgtctccttcagcaacaatttcttcttcagcagaaaatacaaggcagaatggaagtaatgattctgacagatatggtgaaaatgaagaagactctaaattgggctcaagtttgagaagagagaaccgctaaacaggggagtaaagactccagtaaccctcaagcaaagaagagttgagcacaaggagagctattctcaagctggaataactgggactgaatggacaagtggatcttcaaaaggcggacctctgcaggcattattaactagggaatctacaagagggtcaagaagaactccaagcaaaagggtgcacgcttcagaatattttcgtatagatggagcagtaatttcagcgagtactcccatagctgaaactataattgcttcaaacaacgaatccttaattgtcaatagggtgactggaaatttcaagcatgcatttcctattctgccagtcactgaattctcagacatacccagaagaacaccaaagaaaccattgacaagagctgaagtgggagaaaaaaaacacaggaaagaagagtagaaagggatattcttaaggaaatgttcccctatgaagcaactacaccaacaagaattagtgctagttgccgcagaacaatcaaaggagctgcaggccggccattagaactcagtgatttgaggatggaggagtcgttttcatctacatatgttcctaagtatgttcccttggcagacgtcaagtgagaaaatacaaaaaaaagggacgctccattcctgtatggataaaaattttgctgtttgttgttgtggcagtttttttgtgtgtgtttggtctatcaagctatggaaaccaaccatgtaaatcccttctctaatattcttcctgatgactctagaaaacccaactgaatggtatctctttggcacattcaacttggtcttgtatttttagtaactgtgttgaagaacattcgtgtacgctttttgactccaagaactaaaaataatgtgattttgcctcaataaacgtagtattccattggaaagcaaacaaaagatatatgaatggactttattaaaatgtt

SEQ ID NO: 1243293 - DNA, 4001 bp, Homo sapiens
tatgttctggggtaaaccgtgaagccccggggggccgtgagtgaggcttgggttcctccagctgtacccagccggggcgggaagggtggggggtcccaccttctcataatccaccagggtcccccgttttcggatgttcttcttggccaggtagatggctggaagaacagggacagcctgcagaggggccagctctgccctgcctcacggcatcaccctgaggcccccagtcctgggaacttgtctggggccagccgtccccttgctcaccatagtccagctctgcagccggcctcagggtacttgtccagaagtacggggtctggcgtggtgcagggagaaggtgtccaggacgcctgcgtctgtgcctccccagtgtcaccccaccctcagacctccctgggaagaagcctgggctgggcaggaggtgtctgaggatctccctgcctgcccaccaccgagagactccactgaccactggccagtctctccaactagaactgaggtcaactcgctccttagggccctgttcagacactgcctccctcactggtcaccctaagcccccattcaaggcggggtggggctgggggcctgcacaagtcttggatgtagtcacagtctgtgcctggggaggggtacaaccgacggcaggtcggcccgggaccctgatgtggttagggagggcaggaatgctgtcctcaggccttcacagcccctccctcaggacctgggcctagggacccccaggaagatggcagaatcctctgcacatacgaccccttgtggggccctgctgtggtccccaggaaaactgaggctccatccctcagccgggtccttctcaccacatccgtacttgcggtccaggacttttggggagggggcgatggaccaccagcccacggcgacatggcggagtcccactccaatcccagcaagctcggcgcccctcctgtctccccgagttggtaagctgggtgggtgggggtgggggtcccaccggctcccacctgcacccccgagcctgacctggaacctgtagggcgtctcgtctggccggagcatgaggctacgggggtcgcgcagcgggtagatgtagccatgctgcaccaggacggcgcccaggtgcagggcctctggggaggggtgggacggtgagcgcggggccgcggaagcgggcgagggcgggacgagccgggcctcctctcccctatgtgctccccacccttgcacagcgcgctcagcagggctctgagaactgccagactccaggaaaacccaggcctaggccaccagcccagtgaccccagggcccagtgggaggcagggcgctcaccctcctccgagacgcagaacttctgggccaaccactgcacgacgtcgctgcctgcacgggagagacagaggtggagggaggccgaggcgcgcacgcacccccgccccggcgcgcctcacctgtcaccgcgtggggaatgacggtgaccagcaggcgctggctccgcatcttcacgccctggtcggggtcctgcatgctcacgaccacccgctccatctgggcggagggagtcgtcagggggtgtctggccgccccgcaaccctgattccctggcaccggccgggatgccccggatccgggagcgcggagattaacgcgcggcggcggcggattccaggccgcagctggcggcggggacgcggggcgggccggggagggccggggagggccggggagaccccggagacccccaagggccccaggcctcgccgcccctcccggcctcgcagacctccgccccaggcccgccccgccccgcgcgcccccgtgtccccatgctctccggcccctcccggcctcgggcgccgggaaatcgggggacggcgggacacccacccgcctcgcaccttcctcagatgcggcatctgcgcccgggggcggccggggggcggcgcggggccggcggccatggctgcggggcgaggccggcggggatgaccgacgtcccgcccggccccgccccgcgccgcgccgcgcccgggttaaccctcgggccgcgaggccagagtcgcccaggccccggttcgggttttaagagacacggccacggcccagaggcaaacgagccggccccccacgagcgacccgagtcacccccccgacccaggtcccgggacgctgaggccctcgtgggtgaaggcgaagtgggacgggggagggtgtgggccgggggccgaggggggatgtgaggggatggagctcagctggagcagggggtggtctctgggagaggcagaggggctcatcagcgagggggggttactatggggagggtctcagggagggcagcggaggggatgggggttcagagagggagaggggttccgtgagtagaggagacccgtagggagagtgaactggggtgggaaacgtggtttagggcccactgtaaccccggtcctatgtgtggggccctgaggacatacagggactagaggcctggctgtggggccggggccagggccagcggtatgactgcccgaggccttgtgtcctgcgatgcttgtggccaagactgcatacattgctgtgacggtggctggttaggggcagggtgcatgagagattgggtcagctttctacatgggccggatgccggctgtcagtggagcacgtggctgctgcagagtgtgacccagctgtccccatctcctgctgtgggtcccttatccggggtccttccgggaaagtggctgatggctcatggctcacttccctcagctccacgcaggcctgggtggcccgctggggaatgagcagaaaccctgcccagggcaccctgacactgttggagaggagctttactgcagggaggccctcaacacacacccacttagtgtcaccggcggccgccaggcttcaggccccactccactcccagctctctccctcctccaatggctatgcctgtcccccaggtgcaccccgagccaggcccaggatcttcaggccccaccgggcagtctcggctcactgcaacctccgcctcctgaattcaagcaattctcatgcctcagcctcctgagtagctgggattacaggctcccaccaccacgcctggctaatttttatttttgtttttgtttttgagacggagtctcactgtgtcacccaagctggagtgcagtgatgcggtcttggctcactgcagcctccgcctcctgggttccagcgattctcctgtctcagcctcctaggtagctgggattacaggcacgcgccaccacacccagctaatttttgtatttttagtagagatagggattcaccacgttggccaggctggtttcgaactcctgacctcaggtgatgtgcctgccttggcctcccaaagtgctaggcttataggtgtgagccactgtgcctggccgattttggtatgtttagtagagatggggtttcaccatgttggccaggctggtctcaaactcctgacttcaggtgatccacctgccttggcctcccaaagttctgggatgacaggtgtgagccaccacacccggtcggatcattttttaaaaactaagtcgaggtctcactatgttgcccaaggtggtcacaaactcctgggctcagtccatcctcctgcctcagcttcccagcgtgctgggattaaaggcatgcccagccagcatcttttttttttttttttttttgagactgagtcttgctctgtcaggctggagtgcaatggcgcaatctcgtctcactgcaacctcctcctcccagattcaagcaattctcctgcctcagcctcctgagtagctgagattacaggcccccgccaccacgcttggctaatttttgtatttttagtagagacagcatttcaccttgttggccaggctggtcttgaactcctgaccttaggcgatctgcccacctcggcctcccgaagtgctgggattacaggcctgagccaccgagcccagcctcagcacca

SEQ ID NO: 1243294 - DNA, 4001 bp, Homo sapiens
tatccatcttacagataaggaaactgaggctcagagaagcccatcactgcctaaggtcccagggcctataagggagctcaaagccttgggccaggtctgcccaggagctgcagtggaagggaccctgtctgcagacccccagaagacaaggcagaccacctgggttcttcagccttgtggctgtggacggctgtcagacccttctaagaccccttgccacctgctccatcaggggcatctcagttgaagaaggaaggactcacccccaaaatcgtccaactcagaaaaaaaggcagaagccaaggaatccaatcactgggcaaaatgtgatcctggcacagacactgaggtgggggaactggagccggtgtggcggaggccctcacagccaagagcaactgggggtgccctgggcagggactgtagctgggaagatcctaggggagggcctgatggtccctgaaaggcaggggagacctggacgactccccctaaaccaagagcgcaccctagaaagtcagctccccaaggtggggaccggccagctcatgaggggtgctggttgaggggcctgcttgtgcaacggaggccacccagccagtgaaagctacttggaagggctgggaaagggtctgaggccccttcaatctggcaccaccagactcccatgcactccatttgcccctgccccattctcaggaaaaggggcccggcttgcccagaatgacccctggtggcagggggctccgcctcagggaccccttgagccccagccagctgcttggtccccagcttctgcccacccttggggtcggggctaggaggttggggttagctccacaggggtgaggagaaccgagcctgggactgcccaggcatctagctgggtcaaacctgaaaagccagtttcatccttgaatcttctcccggtctccaacaggaagtcccgttggcgggtgggagttcccaggataggagaagggcctccagacctaggccccacccaccgggacagacacacacattcaccatctcaagcggcacacacagaagaaactctggtcaggaccacctcggtcggaagcaggccctggggggccagggaagatcccctgcccattccccgcccagccccacaaacatgcccccagcatgacagacaaccaggccctctgccaatgccctgagcatctggggtctggctgtcaccccagccgggagaaggcctgtccccgttggcctctgcgcacagagtgagagtctgtcttcgggagtcgctcccagcccaccctggagcttcgaagtgtacagatgggggagtcagtgtcgtggggcagaaggcggagtcagtcccccacccccagctccacggctcctgctattcccatcggtgagggcagccgggacagggaccatcccgccctgggctggagtttcagctcggagacaccacccgccggtcgtggccgggaaggaaaatgcagcggggggagttcagaggaacctggggcacccccggactctagactcccgctcctgggaccctcagctgttgggcgggggctggagccgagctgtcccgcccggccaggccgctggggctgctaatccggccacgggctatttttgcggcgcgccgggctaggaatccggggctgggccgcctccgcgggcgactcgggaaactccaggaagaaaagcccggccgccccgggggggcctcgccgcgacccctccccggccccggccccggccccgacacggccccggccgctctgagcagctccggccccgggtgctgaggactcgccccgccctccggacgcagccccggaacccgcccgcccccggagccctgcgctcccggccgcgctcactcactgccgccgccgggggctctggggggtcctgagggcgccggggaggaggctgccgccgctggccgggagggcccgcgccgagtccccgcccgcccgccggtccggcccgcccgggaatgccctggagcgaggggcgtgcgcccgggggcgggcccggccggagcggggcggtcgcgctgactcagagctcaggaatgcgcgccgcccgcctgcccggcccaagtcacctcctcccggaaggccgccgggctcccttctccccagggtccgcctgcggggacacctggggctggggtctccagcgcctcggcccgacggaggacctggtgggagcggaccgcagtgtcagcgctgggcggctccgcctctccctggctccagattgaggcttgagctgtcctgccctgatttgtgctgagaagagggtgaggagggagagcaggcacggggtaaagggcggaggatgggtgtgtatccctggctcccctaaacccgacctcctccagaggcccacgctgacaagtcctgtatcccacactcacccaatcccactaagcactcacattccctcacacacattcatgtgcaccgatcactcacaatcatacacacacgtccccacatccttccacttcatgcgttcattcgcctgcacatgcacgtgctcacatgcacccacctactcatgtacatctttcatgggtacatacacgtgcacacacacacgtgtacacaccgatgcacacactcagttcaggaccacagtcattacccctccccctgccctgtgcccctacccccagaagccccgctccaccagcaggcactcaggccaggctgcaccggccccacccgaagccactcagcagaggcagcgcagtgtctggtgtccactctgggctcttctcactgtctcagagctcagcggccaccccggggtgggctcatatccctgcacaatctgggctggactcaaaatggcactctgctttccgctggggctgctggtgagagtttcccagcatttctctcctgacactgggtgggctgaccctcccagggtgggggacaggggtgccaacagcagagtacgggcagggctgtccaggagctctgagtggtgggtggccaaggcttcctctggatagagggtgcagggatcccttcgtcccatgggtccctaaggacccctctacagggtgcccccccatgcctcggacaaatgtgtcttcaggccctgtgctggtcacaaggtgctgctgcttcagtgccatcctctgggtctgggtggcaccagccctctccaaactgagctgttgcacttgagggcccgacgcagacaatggcctgctccttggctagacagaaaaggggagaatttgaactaaaggtgctggtacacttaccggtagatcccagagcctgggcaagattcccctgcccatatccttgtccatgccacgggatagggcggtgcctgcacataatgggtgctctctgaacacaagcaatatcaacacaattctcatgtagaaggagacaatggaagctttggagggggtggagggtaactccaccaggggatgactgccagtgcatcacggacaccgggtgagagggagcctgccccagtgccaacactcagtgctccgatagcctgcacgtgccacccctcccatgccaggctcacagccagagacaggacagtctccatgcttagcattattgacctgccagggataagcaagccctatcgggcctggatgcccagactaggctggcagggccagaagtggtgtcctctctggaaagctggggactgggcttgcctccaaagcatgccacagctgggcatctggtgtcagcaggtctcctcctgcagtggactctgtcagaccccacctagacccgctccaagacccagacactcatcgccagctgccaggagcaccagtcacagctggctcagagctgaaaccccccgcacccaggagtcaccttcagtggggagcatgccccagtctgcctctgcaggcaaatccccagctcagagcctgtgtccaggaatccccaggctctcagcccaccctggcctcctgagtgaggtcatcagaaggatga

SEQ ID NO: 1243295 - DNA, 4001 bp, Homo sapiens
tgtagggacatctcatcccagcccagttctatgggtgtgtgcagacgagaagtggtgaggctcacctggggcccctccccacgccccccaccgggcaggcccgttaccatgacaacgttggccaggtgtgccgagcacagggcgtagaccccgccggagcctcccaccaccggggcccgcatgtcggtgatggagacggttagggagcctgtgtgagcaagcggcgggtgagggtgcagccggccagggcagggggcgggggtgcgcgcctgcctcacctgccagcacgcctgccaggtagagcaggctgatgcggagcaggccgtgcaccatctccaggggcaccccgatcatcagctgcaggagggcgttgaaccccagctgctccagcctggccacagggaagcaaacgggtacgaagggtggggtcagccatccggccccacccccagccgtcacctcaagttgccgcacctgccttgcggctaagcctttctgatgtaatggcaggttggggcggggctcaccgggcagcagtgctactcacccaacgtgcatgaacatgtaggtgaggaagcgccaggcgcgggcacggtgcccggggtggtacacaagggggctcttcatgtactcggggtggtaggtctgcagcacccacttgttgaggcgggccccgtaacacaggaacacgatgatctggggacacgagtgttaggctggtcatggccaggagcgcgggaggctcccggggcagcggccggggggcccacctgggcaagagtgaccgaggccatgaacacggggggtgggcagctgcggtgacggtagaagtaccagcggcggtccacctcacaaggcaggatctcgtaggccacgtaacgcacaaaccgcttgtagacacctaggcctggctcatccagcggcccgtcccggggcagtgcccgctgtccgttagcaatggcccgcttgaaactgctggagcgcttgctgctgatctgggggcaggggcctgagtgtgggccacggacctccccatggcacccctgcctgtgaggctcacccagctccccgcatccacaagccccccacccaccgccgtgaggagctgcctgcccgcctcctctggccaggacaccgtgcccctgccgcctgcccaccgtggcactgaccaggtccaccagctcctggtagcagacctggccctgctcgttgctctgagccagggccaccagcatgtccagcttggccgggtccaggggcagctcatggctgtgcaccaggccagtgaaggtgtccgcaccgatgaagcctgtgttctcggggtccagctgctgcagtgaggagccgccagccaaggcctgagtgcgggcccgacccctggaccaaagggctgggccaggctggctgggagcatcaggctcaggctcccagcacttttgggacaggggccccgtgcctgtctgttccctgggaccctgcttgatcccaggagctggcagggcactggtgcctgggtcccagtcctccagctcctcagttgttcccccgtcttccaccctacccatcctggaaagcgagggccaaggtccaagaccagccagctgcccgccctccctccctccctccctccctccccccgactctcccttctccagccaggagctctggtccagtcagtcctctcctggggtcccagacacacggaccaaggtcgtggagggatgaggtaggtaccgagcggggctttcggggagctcggtcccgcacaagctcagctcagcggcaggagggccgcattgggggcggtgccagctccccagaccaccccccgacgcacctgctcctggatgagctgcagcagcgagctcctgtccatagagcctggccgggggccggggtccggggtcggcggccgcggccgggaggggctgctctgcggacgactccgctccgccccagccggcccgctccgcccgctccgctcggcgccgcgcttgggccgcgtcaccgagtcgcccgcctgcccgcccctgccgcacacgccgccacgcgcggccaagacacgcgcgcaccctgcacgcggacgcacaccccggacaggaaccgcctccagctagcaccgcgtctcagcgccggcccccacccccgctctggcgcagctccagcacactggactacctccacggcagccgctggtaaatggagtcacggggatggggggcacctaaaaccccccatgcaagaccgttcgccctctcacagccttcccgggctcaggcctgtgaggatgccacctcttccaggaagccttccctgaccactgcttgctccccctccaggctgacccagtactccctgcggttcatgttgccaccggctggagctccctgcttgcagcagacacaccccctccccccgcaaccccccaccgagcgcagcagcaaggaagtccctcgtcccgcatggccactacagccgcctcttaggaggaggaagacgctgctgcagccgccttggctctgacgaccaagcccagcccactcgtccacaccctgggctggaggcccctgaccactcttgcaactccatgcaggacagcaaaacctcccgccctaaggcggcgccagggctgggcacaaggggcattccaacacagagcagaacccccagggggcagggctgcagttgggatgaggggacctgctcctgggaaggcgggccaacccctccacaatggaggtgacagataagacacgtgtgactatggcagcccctgcaagggccactcagagggcttctcctagggttgcagtagtcccagaagacaggccgtgggggtacagcgggctcaaataccatcagtcgggagggacctcaggggccaatgccacaagctccaaggcagggcccgtgtgggccaggacttgggaaggggccccacctgccactccctaaaggcagacatgggaggggggggaccaggccttctgatacttgtccgggtgaccttgggaaggccacgccctgggtcccgagaagcaggcatctgggctcaactcccagcccgtccctccctctggcccatcctgcttccctcaggtcagggccccagggtcaccccgttctgtggcaggcagtgaccacatctggtcacacaagcccaggttctcggcgcagctcagccaggctggcaggacgctctggggagtgagtgggcagtgccagggcacactggaccctgagaaggggtcagtcaccggggaaacatctcaggcaccggcgccccccagtccatgccgggcgcgcaccgtcctcccgcagtgggctcccactcccagaccgcaggacctccaaggacactgggctcccaggccacagcagcccagagtggaccttccagaggccatatgcacacgcctgagacctcagaacagtgacccaggaatgaaaggaggggtggcgtttccagcccacataaagacaaacaacacattctaggttgaatcaaagcaagttgtcttcagagactgggatccgagatagaaaacacacagtgaagtttaatcaggaacccaacctccggtcctctgctacaaccacggaaacggctccaaacttgaggggggaccccccaacgcctgcttttggcccaaagctctgccttccagccctcctcatacccactggccacctaggaccaggaaaggggggtagagccctgagaattctgggtctggggtcaccagctcccacacctgtgctccccggccccacacacatgatgcccaggggtgggcaatccctgacagcggtggccggcacttgggagctcctgctcagccacctgccacggcccaccctgggggtccggcaggagccagggcagtgcatggcagcataaggccccgctgcagatcgactgccttcagaaacaaaaagtcccggcgcaaaggcgttcccggagtggcagcctggcctgcaccccagctgtgctgcccctg

SEQ ID NO: 1243296 - DNA, 4001 bp, Homo sapiens
gggcacatggctcccagctggagcatgagcctggctgggggagagcagaagggggaggtcaaggcccactgagggcccaagtcccggccacaggaacaaagctggtgggagaaggcaggcagcaggtgcagcctcatctgtctgaccccaatggctcccaaacacccccaagtcactggggcccaagcctagggccgcccccaacgcaggccctctgcgggtccccccccgggggtttggaaactggggaagaaagaggactgccggcctcaatggctcagactgcgggacgccccagaccctctcaggggaagtgggatcacaggagagggccgggtgactccacgtcaggcaactccacgtcaggctccccaaaatgctgtgagcgatggcactggccacgggttgggtgaaggtccacctgggccaccaccggccactgtgtctctgctgttggggtctgcactgagggctcaccttctcaatggtggcctcctcagagacgtcatacaccacacacaccacgtttgcctgagggaacagtgatgaggtgtgggtgacagggctgctggctcaccaccgacgaccctggccgttccacgccatctcgaggctccaggaggccccagaagctcacaggtagcatgggtgcagctctgaggccgggaaagcccagccttccctaaaacctgcctccagcctggtgttggcagagcaggcactccccagtgtcacactgggagctgctgctgaaccctcagagaagcctcttccccgcccactgccagtgcagggacaccaggccccagaagcataactgtggtcagcaagacccttggagcagagggctcaggacagacacggccacacctgcaacccaacaccctgcaagacagccgccgccttggcccctgcctcccccctcgctacagacagagtgacaggaccgcagtgaggggtgccaacagcaggggctgccctgggtggctgtggcctgtgcccttgcctggagatgtccccggcacacgtgctctggtactgggagctccgggtgcccggaggccgggacggtgggctggagcacacagcacggggacgtggcgcacacagagcccacaggaagagcaaacgctgctgccaccccggcaggagggagggagagcccgcggggaagggtcctgttatccctggagcaccactggactgagcggtgccggctcccagcggggtgcgctgtaggggccccgacaaccctcagtgcggaggtcacagaattatcagggccaaggacacccggagcacctcggtccaatcccccaggctgcgaagcggattaggccgagcccgcgcccagcccctccctcgtcccgcgcaccacgggtaccttgtggatctcctcccgcagctcctcgtccgtctgctcggcttctagggggacaaagagactccactgcggacccagcaggcccgccggaccgctgcgggccgggcccccgggaggctacggccgctacctgagtagtccacgatgtgggtgggcaccttctccggggtgacgtccgcggggatggtgatctcctccgcgcggggagggacctgcaagggacccgcgcgctcaccagggacccccggctgggcccgctcccacccccgcggcgggcgtgccccttacctcctcggggaactcctcgcccaccagggacaggatcagcgacgtcttccccacctgggctgcgcggggcgaggcggtcagcgcgagggccaaggtcacggcgccccccgacccccgagaccctcaccccgcctcacggccgccgcagctccgagacccccgggccggcgcctaccctcgcccagtaacaggatgcgcacgtcccgcctcatagctgccgcccggagccgctccccgacccggaacccggccccgacctggtcctcaagcctttcgctctgcccccgcgcccgccccgcacttccggttctcggccccgcgctgtccccacacttccggccccgcccgcacagccgcaccagcgagccgggcgggccagagcggacaggctgtgcggcgcgccaccgtgtggacgcgccggccacggcggacagcgcagggtcctggcgccctggcaggccgagcggccattgcttcacggcaccacaggggccttgacaaacagccgattaagggacgggcagaggctgagctcaggccaggagtgaccagagacagccagtgcaacaatgcagcaataatgcaataaatgcccatgtttattacaagatagaaacattaaagatttcttaggcaaaagggcaacaggtatgaaagtattcacagggcgccaaatttacaacagcttgctccaggcgatttacgtgaatcctggcctgtcccagcatgaggccattgacaacctggcgcctctgccaagcctgtgtccaggtgcctggcatgaccaggcgtgatgcccaccaccacagtccctgctgcatctcagaggccggggacctcccacacaaggatctcgttgcgggcggccgtgaagagcagcctggcggacggtgtaaacctgcacaggtgcactgcgttgtcgtggccggcaaagtcttgggcagtccccatggcacagtctaccagcctcagcatgcactctgtgggtagacggtgcaggtgggccagggccaggaccaggcagcactcagagggctcccccaacccacccagactgtccccactgggcatgatgctggtcgggggagctggtgctaaaagggctcctggctgtgccctccacgtgccactgggactagggggtccatcactgccaggctgtcggcctgcagctgggccagttccctccttaaaagtcgctgccacccgtgcattcaggccctgtgctgggcgctgtgcctggttcctcacctgcctcatcatctcctgactccaggaccctctctagggcagatgtcctcaccccaccccagagacgaggagcccggggcacaggtgaggcacctgtcttggaacagggcaccagtcagcccacttggcccccacctaagacaggcccaaactgcatccaccagcactcaccagcaaagccaacagccaggaggtgggtcccgggggacaggctcagggacatggcaaaaaagggcagtggtatcttctccaccacctgtgagcagccagcgtgaggctccaggcctgtgggctcagggctcagccaggccccacccaccaccctggatccctggggctcccagtgacacgcgggcagctgcgtgtacctgcttctggcagaggttgtagatgatcacctccttgtaaacaccggggcccacgtacatcaggagcgccccatcccaagggcagaaggcagcgagggagggtggcaggtggccctgagtctgcaaaggcgcagcatgctgcggtggggtggatgggtaccggccccacccacagtgccaggagcatggtttacctccgtggtggcaggcattgggaaactcaaccagtccacaagctcacagtggttccgcagccagtcggaggcccagacgctgacccgctggtccccactggcagccagccataggtctgtgccctccacccctaagtcttcacactgggaatggagtgggtgagggccgacaggtgccttctgccaagatggtgcctgcccccaccagcacccaggccccctctccccagctcttggggctgctttacctctttgcacgtgacacagatggtagagattggggcgccctggtggtcactcagcacacggaaggttgtccctgtgcaggggtggctcacagccacgagcccatccttgtctccagagaggacagtctgacctgggaccatgccgtcaccctgtgagcccccagcccggagactggacctgggccaggtcaggacggcaccatccccaacacacccaactcctcaccatcggtggagaaggcaacagtggtcagcgccaccgggtggg

SEQ ID NO: 1243297 - DNA, 4001 bp, Homo sapiens
aaggccaggtccctggtgggagggtgggaacagaggcagagctcagggccctccagccaggtcccaggcccagcagcccctccatggagaaactgaggcccagggatatgggccccgggatcttcctcctctcccatcctggcaggccacacaccgactgccgaggtggctgaagtctcccaggctgaaatggcggcagccctggcgatggtaaatggtgtccacgtcctgggtgagaaggagatgcttacagttcgcctggggccacaaggggcagggaggggctcagcacacatgggggaccagatgtctccagagcccttcaaaagggccctaccctcacccactgaatctcctctcggaaagggaagccattgtagtcacacagagcctcgtatgtctccaagaagccacctggggaggggataggggtgcgatgtggaaaaggagagagacaaaacatcagcgatggaggaagaccagacccacagactaggtggtggctgggacctgaatggctctgttcagtttggggcccccccagcttgcgggtctggggaggcagaggtggggcaggctggaaggcctgtggctctgccttcacccttaccacaggggctgcaggggtcagtggactccgaggggctgcttctctccagccgagccagcatggaggctggtgtgggcctccggaatagcttcctggtagggggttaaggagaagggggcaaaggacttccagcctctgggatgggaagcagcccttctcatgcactccctcctcccctgccagcccctcgaatttgccaggcctcacccaagggtcgagcgagggaagaccttcttgatggctgcagccacgtgctgggccagctgttccagggcggccacaccaggaaactccaggaccagctcacgcagggactccagctcaaaggtgacctagggaaggggcactactaggcctcggctccacacatgggcgcaggtgatggtggtagcatgaagaccaggctgcaggcccaggtagggtactaggtgtctcacctgagggggtgtctcctgcagcgccatggcctggacctccaggtagctgaacgtgcagtccacctagaaagggcctagatcagctgggaccaagcccccagccccgccctcatggaagtccagtcctttgggcagcctggggcagagccagatctgcctggactcccctcctgtcggctgcccagagcccagtgctggtgcaaagtcagggcccacaaggccaagaaggaccactctgcagatgcagccccctgccaaggtagctgctggcgggcgggggtgtggccaggccctgggactcaccctcagcgggaggcaggtggtgtgcagcaggtaggctctccatcgtagcagtgcctggggaaagacagtctgatatcctgggcagagcaagaggctctttctgtggggccacagccgcctccccggctctgtcccctgccccataccaggacatggttttgcacagcaccctccccgggtagccaggttttcagcagcagctccacctctttgggccacaggaacctggtgatctcgcctgtggaagggcagcctgctgggtgacttcagtccttgcacagaagccactggtgcccacagtctgtgccaggctggggccctggggcttatctgcggccagcgaggaaggaggggagaggatctggggcgcctgccctcctggggagcagggaggacctctgaccaggccctctggggcgctgggtgggcctctgattttggggctgcactacttcctcccggccaagaaggcaggaagggccagcgcttacctcggagctcacaggagatgccgtcgggggtctgggccatgggccgggcgggccggggaggcccaacgagctccggcgggaaacagcagaggacgagcgcgcacacaggaagcctggggcccagacccgcacggcagccacctgctcctccggcggcggaaggtgcgcgccgcttcctgccaggccgcccccggcccggcccctccccgccccggcctcgcggctcgagagcttgcccgggagcggggttgtgggaggggggccgagtcccacctgcccgcccgccccgtcgcccaggagcttctccgccagggtagacgtcggggtgggcagtggcgtggccgggagggtcgcgggtgtggcgggcctccagcgggtccttgcccccggcttccaccccgccccgcagtccctgccgcgaacaccaggggacgctgcctgcctggggatccccgcggcccaccggggctggtcccctccaaagcccaggctgcggaggtggacgaggcgcctggcagaagggggactgttcagcaaggagcgcccgaattctgccaacaccggaggtcctgcccgttgctccgaacctggagtccgtgaccctgttagggatccaagagattttgaatgggtgggaaaaaatgtcagatggggccaggcgcggtggctcacgcctgtaatcccagcactttggaaggccgaggaaggaggaacgcttgagccaaagagttcgagaccaagctgggcaacatagggagaccctgtctctgcaaaataatttacaaaattagacggcgtgatggcgtgtgtctgtaatcctagctacttgggaggctgaggtgggaggatcacttgagcttgggaggcagagtttgcagtgagcggagatcgcaccactgtactccagcctgggtgacaaagccaggtcctgtctaaaaaaaaaaaaaaaaaacagcctgatgggtccagacgcccttccttgccgcagaggtggggtcagggccgaaggtgagggtgtacccggagccttcggggggaagcctggggctaaggtgagccctgaaccccaagcacttcatagagggccggagtgagtcgtccaggtacatgagggtcttcttgtgtctgccttctccccaggctggagagagtttgggagggggcagccagagagagagaaataagccagtgtctccagggctgagaggggtcagacagtcatagggtggggcctggtagcctgttgccctctcaaagaccaggacctagattctggaaagttcacaggaagagactgcattttttttcttctattacaatctaaactccacttaagcggtaaggaacagcagtctaccctgcccatagctcagcaaggtggaggtgaaatgacagctaagggtgacaaggaggagtcagctgcagaagatgcagcacagagagttcctgctgcctccccgattgaagagacatacttggtttgtttgttggttttgagatagagtcttgctctgtggtccaggctggagtgcagtggcacaatcttggctcactgcagcctccgcctcccaggttccagcaattctcctgcctcagtctcccgagtagctgggattacaggtgcccaccaccatgcctgggctaattattattattattattatcattattattattattattttagacagagcttcgctcttgttgcccaggctggagtgcagtagggcgatcttggttcactgcagcctccgcctcccaggttccagcaattctcctgcctcagtctcccgagtagctgggattacaggtgcccaccaccatgcctgggctaattattattattattattatcattattattattattattttagacagagcttcgctcttgttgcccaggctggagtgcagtagggcgatcttggttcactgcaacctctgcctcctgggttcaagcaattcttctgcctcagcctcccaagtagctgggattacaggcatgtgccaccacacccagggaatttttatgtttttagtagagacggggtttcaccatgtttgtcaggctggtctccaactcctgacctcaggtgatctgcccacctcggcctcccaaagtgctgggattacaggcgtgagacaccatgcctggccacg

SEQ ID NO: 1243298 - DNA, 4001 bp, Homo sapiens
ggaaggggtggaaccagaaattcgacctaagcctttccgagtccacagcagctcaggccagaccacagccctatctgcctctagttagactccaagactgagcaggaagggcccttaggaatgaagtgatcttggcctgatttcccaggagagggagctgaggtgagggaaggcccatggagcctcagagctcctcagcttagacctcacatcctctagaagcctccccgggccactcagcaccttgcacatcctcatggctccccaaagatcagcgatcctctgcgacacttgctcactgcctgtctcccagcagactctatctaggtctcggctgcagcccaacactgcacatgaggggctgatgtacaacacgtgctcaactgacatcccagggaacaagtgagatggatgcccattgcctatcactcaagactattggttcttggagcacttatgtgtcaggaactgggccagatgctgaggatacagttgtcaggaccacacagctctggccctccagtagcttgggctggcccagtggttctcaaagtatggcccccaaaccaggcgtggtggtacaggcctgtagtcccagctacccaaggaggctgacgcaggaggattgcttgagctcagggccagcctgggcaacacggtgagtcccctatctcaaataaataaaacatttaaaaagtcgaaagtatggtccccagaccagcagcatcagcatcacctgggagctggttagaaatgcaaatttccagccccacctggacctcctgactcacaaaccctgagggtggagccccagccatcccagctttaccaagccctccaggagagactgatgctggctcaagtttgagcatcagtggtttaagagaggaagcaggcagggcgcagcggctcatgtctgtaatcccagcactttgggaggccgagatgagcagatcacttgaggccaggagttcgagaccagcctggccaacatggcaaaacccagtctctgctaaaaaatacaaaaattagccgggtgtggtggcacatgcctgtaatcccagctactcgggaggctgaagcatgagaatcgcttgaattcgggaggtggaggctgcagtaagctgaggtcgcgccactgcaccccatcctgggcgacagagtgagactccgtctcaaaaaaaaaaaaaaaaaaaaaagagaggaggcaaacatgagtgagctacagcccaagacagttcaattaaggagaagtacaggagggtctcccgttcctaggggctagggaggacttccctgagaaaggcacatttgagctgagacgttaaggatgagcagaagtttcccaggacagtatttcccaaaacaaggatatcaactgggagagggggcttgtgacaaacgaaggtgccggagtccctccccagaagattcccactaggggtgggagagtcccaggaatctgtatttgtaaaagggacggcaggtgatgcttatcatcagatcaacttcaccaaggagggaccggagcaagggtacccaagcggggacccgcaggggcagaggcccggaggagggccagacccgccccgcccccgttcgagtgtcaacaacaagatcgaatctggcctcggcaacttctcggcgggcagcagggaagagggcgcccggtaaggcccgggcattacctgggactagacagggccgcccgcgcggcacccgctccaggccgcggaccgagaagtccccgctcgggtccctcagccgagcctcgccgcggtccgccatcactaccctgccctgcatccacacggccgccaggtccagcggcccgcggcccgccgccgcccgtgacagccgccacgcgcccgggccgccctccgcgtcgcgccgcagctgctccgccagcaccttgagtggcggcgacctcggaagccgcacccccgcggggccgcctgagaacgagtccgcagccgccgccattccgcctcgccgcacccttccgccccgcctccgctttcccgccaactttgagaagcagcggggcccggccctcagccaccaatcaggagcgcgctggcagagccggccaatggtcgacgtcagaaggcgggaccgccgggcgaagaggccctctctagcagccaggagtgcgcatgcgtagataaaagtaaataaacgccctcaagttaggaatgaacggaggaaatgggttaaacgagaataaataattgaaggcagagaggtaaagaacttcctctttcaacgcatctcaaaatttggcgtggatgcagatcacctacagagtatgattattcatctttacattgccttgttttgaggttagtaaatactgaaacgaattaagagtccgtgtttattgggagtgagcaagaatccagtcaggagataaggctggggagggagacggggagagctggcaaacttgccttttcttttattattattttcagttatattttaatagcatcaaataattttaaggttaataaaatatattgctatttttcagacaagaaatgcacatttattgtaaaaaaaataggggaaaaatgtagaacaagaaaataattgtaaaagccgcttatagatacccactgttaattttggggtatattagcctttaggctttaaaatatgtgtgtgtattttttttgagacagggtctcactctgttgcccaggatggagtgcagtggcacagtgacggctcactacaacgttcacctcccgggcataggtgattctcctacctcagcctcccaagtatctcggactacaggcgtgcaccaccacgtccagctaatttttgtattttttgtagagacagggtcttaccatgttgcccaaggtggtctggaactcctgggatcacgcaatcctgcctccttggcctcccaaagtgctgggattacaggcgtgagccaccatgcctggcctattactgatatacaaatagtgttttgtatattgttttcacttaataatgaacatctttctgtatcagcaaatatccatctgcttcctcttgaatgactgcataatactcgatttgtcttatcacatattaaaccaatatcctacagttggacattaaggctatttccaatttttcactttataaatatatccactgtggacctacttaaaagataaatcttttttatttatttatttatttatttttttgagacggagtctcactctgtcacccaggctggagtgcagtggcgccatctgggctcactacaagctccgcctcccaggttcccgccattctcctgcctcagcctcccgagtagctgagactacaggtgcctgccaccacgcccagctaattttttgtactttgttttagtagagacgaggtttcaccgtgttagccaggatggtctcgatctcctgacctcgtgatccacccgtaaaagctaaatctttttgtgcatccttcaaataaaattcccaggaatctctccctaaaaattggatgtccccagtcagcaaagtccacagatcctaaatcaggcaatccttaaagtcaaggtcagttcttaagagaaactttgagttcccagggcctcctgcagtaccaggcattcagagagtattcagcaagagcttgatttttttttttttttttttttgagacggagtctcgctgtgtcacccaggcaggagtgcagttgtgccatctcagctcactgcaacctccgcctcccaggttcaagtgattctcctgcctcagcctcctgagtagctgggactacaggtacacgccacccgcctggctaatttttgtattttttagtagagacggggtttcgtcatactggccaggctagtctcaaactcctgacctcgtgatctgcccgctcagcctcccaaagtgctgggattacaggcgtcagccaccgcacccggccaagagcttcatttttataaaattgagccaggtcctattgtaagaactttgtaggaagt

SEQ ID NO: 1243299 - DNA, 4001 bp, Homo sapiens
gttgccttctggggcagcctcggcctcctcctgtggggcaccctccagcagagcggtgtcttcctccaggaagttgctgagctccgccagctctctacgaacgacactggtggcttggtccagccagcgcacacgccgcaggagggacagcagcaggggccgacggcgctcctggcgcacgctccaggcgttgtgcagctcccggtagcagttgtggcgagcacgctcggccgggtccagggtggccccgcagcccagggggcagcgctgctgggacccttgctggcaatgctgccggtgctctgccagggtcccacgcggcacctgcgaggtgcagccctcgttggggcaggccgttagctcaaaggggcatgagtcctggtgccccttgcgatgggccagggggcatgtcactatgcagccagcgtcggcgttcttgcactgagggtgaaggagaacgtgtgaagaaaccgggcaggacacccacggaatcccccacccctggctttccattcgccaggaaccagggaaccgggagcctcccacgcttttctgactctggtgagttggtggagagaacactggggcaaatgcctagacgtgggaagaagctagaagttccaggggagagggtgaggcctgagtcttggggaactggaaggtacacagttgggttggtctggtgagtggtatggatgccaggctttcctttttaacctcggtttacccatctgtaaaactaggggactagagagtagtggcaggcacactgggcacttgatcctctaaaaatcctctgtaatctccattttaaaagtcctctaaaatctccattttctaacccaggggcttggaaaagttaggtgacttgcctaaagtcacacagcaactaagcagtagagccacgatccaaactcagctatgtctggtcgtcccaaggctgcacttgtttctctctgaagatgggattctcctgccttctctcctagccctgccccacccctacaagggtgagaagggttgagggtcaggggagtgggtactttgagctaccttgacttccaggcggccaatggttttccggagtttattcatgtggacaacctttttccttttcacctctttcctacagcacggacaggtcttttgtctggaaggaggcatgagtaggggtgagtgttgggagtgggaagggagccctggtcaagccctcactcggtgacccaggtggtcccttcattagctggatgaggcattagggcatattacagggcgctctcagctctgagggtggggccggggtctgcagacactactgagtgagggtacacacattttagtttagggagatttggtggctgagtcttttggctgactttcccctctgttctgggccacagcaatggcccccagtctcactcctgccctcccagccccttgggtacccgctggcacctggctagccaccggaggatgcactttttgcagaagatgtggctgcatggcaaccttgctggcctcttgagaaccccatggcagacggagcacacgaagttgctgtcaggagggctggcgaagaggttgagatcatacccgccaccctgcaaaggccaggtgtcagcacctggctgggacagtgatccagtccctggtccacataccgagcaagagagcccagcaagcttttggcagggaggtgggccacagaacttcaagtaaaggggttggctcagcgcccactttgagggggcagctgtgggggttagggccccccaccccaggactactaatctctggctggagacgggggccttagcctggaattagacctagccagagccttccagaaggtttccttgtaccatatgggggtctgcaacccattgcccaccctttccgagtggagtggggtcgatccctggacaactgggcaggtttctggagttgggcacacatctcagggctggaagcaagagggccccaggctcaccatgatctgcgtctagacagcagctccacaggcccccagagctcaggagcctgcatttcacagtgggtgtgggctgacatcacaatagcattgtccagctcaagccagtcacaaccctggttcaggacccagagaccccgtacagcccagcccttgcccccttctctgaaggatcacaggtagccaggcgcggtggctcacacctgtaatcccagcagtttgggaggccaaggcaggaggatcacttgagcccaggagaccagcctgggcaactcagtgagaccccacctcttaaaaaaaaaaaaagccatacggctagctgcagtggctcatgcctgtaagcctaacactttgggaggccgaggcaggcagatcacttaaggtcaggagttcgaaccagcctggccaacatggtgaaaccccatcgctactaaaaatacaagaaaattagccaagtgtggtggcagttgcttgtagtcccagctacttgggaggctgaggcagaattgcttgaacccgggaggcggaagttgtagtaagctgagatggtgtcactgcactccagcctgggtgacagcgagactccgtctcaaaaaaataaataaaataaaataaaaataaaagagagcagctcttgacctgagataggtctatgaagcgcctggggcttgagagtggctgacagcgtttccccagaagcactgggtcagaaccaagcttcatggagctgtctcccccaggccagggcttcagtgggatcacagggattgccaccctcttctctccaatactgcggcccaggtggctggagatcctaaggcttaggggttttaggcattgactcactgggggtcttcacttaggatctgatactcaggtgctagctccacggcagtgacaactaaactcccgggtaacctgccgccccagagcagggggcccagcctcccaaaccaggtgtctgatccactccagcctagcaccacgggggcgctgagttcatctaggcctagttggtcaaatcctttagaatctcacctggtctcacaaggaagccactggaagcctctgagcttcccatccttgctagtgctctgctggctccacctggagccctttggaccaaggcattttacctgccagtgtagttcacttgagatgcgcatggccacaagactgttcgtagtctggctcctccacttaagaggcgtcggaccttacacatcacctgccaacctcccatatcctacccttgtgtccaaagccaggaaagaagaggaggcatctcgctagggttctccccgccacagcgtgaacatatgcacttgccgccaggctgataggcgagtcggggccccaagaacacccgcatgcagtgagttagacaaaacagctttatttgaaagacgtgggacagccaagttcccccaaccccgcggtcctggcgacgtcggtgtcaggcgtgggaggaccagtgtcctgcggagaaagaacaaggttaggggtctgcagtcggggtcaggagtcaggggccagacctcgcgagcgaccgcacccgggggggaggcggcagcgcctgtcggggcctgggtttcaccgccgcacatggggcagcgcgcggtgagctgaggcccccgggggctctgggcgccgaatctcacccgcggccacggccaaagccgggggcgattttcaaccaacgccggtctcgaagaccaccagcgagacgccagtggtcaacgcggcaggacctacctaagtgaagaggagagcgcaatggaggcgcggacgtttatagccactcttcgggtggattcccgagccgcggctggggacggaggcgccggcgtttatagtcgcttttcgggtgacgtagattcccgggccgcggctggggccggacgggcaagagcactcagagcccggtgagggcggggcaccgcggagccaatcacaggttgtcttataggagctcggcccgctcccgcttggggcggggctgcggagatct

SEQ ID NO: 1243300 - DNA, 4001 bp, Homo sapiens
taccaagaaaagcatggcagaggggagttttataggaaagatgctccacaattccatgtggttctgcattctgtgttatggaaactacattttaggaaaagacatatttgaaaaagaagggcaaagaccaatttgtgcaggttaggaaagtggagatgctgtggccgaccacacggtgaaggtgttggcacccaaagcctacgggaggcttttctaaaacaaggcctaagtcaagcctcacagcgctcagtaacagatgagaaggtgcggaacacaccttcaaacacccgctacctgctcacaagaaggaagtcctgccaggcgcggtggctcacgcctgtcatcccagcactttgggaggctgagacgggcaggtcaccggaggtcaggagttcgagaccagcctggccaacatggtgaaaccccttgtctactaaaaatacagcaattagccgggcgtggtggcgggtgcctgtaatcccagctactctggaggctgaggcaggaggatcacttgaacccaggagatggaggttgcggtgagccgagatggcgccactgcactccaggctgggtgacaagagcaagactctgtctcaaaaaaaaatattcccgttcagaggctgcccccccaaaatgtcacggctaagtgagatggaggagcaggggcagagcctgtagcagcctcacaagagaagtaggtagagctgtcccagcgtgggcaggcgcctgtgctgcctgacacaggtaatgaaggcagctctgcatcctgacactggccctgccacctccgtgggtgaccagcacacatccacctagcagtcccagctccctctgtaccaggagcccctgaagtcagctgactttgcttgcaaaatgttctagagcctcctaccagtctgggtgcacccccctccactccaccacctcagcagcttggatgtctgcggggaagccctcctgctctctctctcccctgccactgctgattttgctcaagagctgtattattcagcacttaggagggagcagacactgatctaggcttcctcccaacggggctggcagctccagaatacttgagcacagctccccgccaggagagccacgtcctccagtttctgttcctgaaacaccctggaggagccggctgtgagccctggtgcagctggaaaccccagcaaggtggtcagtgtctgctcctctgtggaccagcctgcctggctactcagtgatcggtgtgactcaagttctccttcaaacaaaactaagaacatcagactccaaacaagcccctctaaactttagggaactcctttcctctgtagtcaaaacaggcagacagcgggtccgaacaagagttgatagcaaaaactacaagttatttatttacaactgcccattccagccgcacaagcccaaatccaccaccactggcggagcggtggcacctgctgccctctgagtaccggagcgcccgccgcagccgccggggaccccgagcttgggcagggccgcaggtcgcccggtgaaccgaagcagcagtcggaccgggcgcctgcggctggcgcgaaggaggctgggcgggggatgaacgcgcccagagggcagaggcggcgcggcacagggaaacccggaccccacgcgccccgaggccccggcgccccgagtccccgcgcgcccagtccggagctgcaccggggcggccgccggcctcgcgacccctcccgcggcggggcacggccccctccccgcggcccctgggcgggcgcgctcacgtgtggccgcagctgccgatggccacgggccggtgatagacctccaggcagatggggcaggtgtactgcgcctccaggccgctgtcgccgcccgccggcccggccggcggctgccgctgctgagccgaggccaccaggctgcggaacatagccatcccggggccaggcccgcgccgcccgccgcccgctgtcctggcccgggccggcccgctagtcacagccgctactgcgccgcgctgacgtcatcgtagggcgccgcccccagccgggcttcgcggccgtcacggcgccactccgacgtcatcggggcgcgccctcgcgctgtcgccgccacagtctgcgacgggacccggcgtgcccatgtgtcaggtgggcgaggactacggggagccggcgcctgaggagccgcccccggcgccgcggcccaggtaagagctggcggccggacccgccaggccgcccctcgccttcccgccgcactcctgccccgaagggtcccggccgggcttgctccgggaagccccgcgtggagagcgggacctcgctccctagcactcggggaatgcctgtcaagcggtgacggccacctagaaggggacttactccactggctcgcgcctctcatcctagcagccactggggacggctctgccgctgacagtgctgtccttattcggagagaactggtgccgtgaagctgtctcgcctccccgtgtcagccttgggagactgaaaagcggcctttatgtgccccctgagccggcttttctaggctaaacatccccccagagcctttgtttttcttgaagtttggacagaacacaagcctgggtttgtgtgtgtaccgaggtgcctttctctgacccaactcagggtgagaaacaggagctgtctccccaaagcccactaggcgtggggaagatgtgatctgtgtttctctcttctcccccctcccatctccaaagccgtgagcagaagtgtgtgaagtgcaaggaagcgcagcccgttgtggtgatacgagccggagatgccttctgcaggtgaggcctggaggtggctgagaccctggcaaacatggcctcgctagcagacaggatagccgcaacttgtgatgctttgttaattctttttaaaaacatgtacttactttattcctgctcctgatggggtccctcgtgcccctggtgttgaagtggaggcgaaagcattggtttcctgcttgggaaagtttcccatgagctagccacagatcccctgatgaggtttctgatggaacttatggggacagttggaagtggggccgtggtgtctagactgggataagctgtaggaggaccaggcgtttgggggcagctggaatacatctaggggcggatcagagcatcttgggaacttggcagatggtctgggtgaaagtttttaatctcgtgtgagatgcttgtttcatctgtggcaggatagaggcttggaagacctctagctttcccccaggcgcttgtcatgtctttcttggcttgtagccattgtattgttcagttgtttccactagactcatagctccctgaagggaggaccaggtctctctccttttagccctcttaattcccagtggtggtgcgtggtttttttgttgttgttgttgttttttttgagatggagtctccctctgtcacccaggctggagtgcaacagctggagtgcatgatcccagctcactgcaacctttacctcctgggttcaagtgattctcctgcctcagcctcctgagtagctgggattacaggtgcctgccatcatgcccggccaattgtttttgtatttttagtagagacagggtttcaccatgttggccaggctggtttcgaactcctgacctcaagtgatccacctgcctcggcctcccaaagtgctgggattacaggcatgagccaccacacctggccaagataggtacttctttaaccacccaggagcatctgaaattgccaagaacaccaggctgccggcagaattcactgaggagaggctgctgtggctgtatgctaggcccttgtggccagaagggcttttgctgtgcttgctggtcccaaggaacagtggggagccggctctctaggggaaggccttaggaatctacatcgagctgggatccccagggatcattcaggtcagcacgtgggagaaaccttggccttccctgacccacaggggacagcgtggttt

SEQ ID NO: 1243301 - DNA, 4001 bp, Homo sapiens
gccccggtccctcctgacagtaggcccctgtggtttctggctagcggcagagccgtcactatggctgtccccgcgagtgggccagaggagctcccataggcaggaggccccagctcgggctaccaggttcacgttcacgtggcgacaacacctgggtgggctgtggggcgcagggacagcccggggactctggaaactctcccggctccacactctgggggataaaacctcaaacaatcgtgggaaaggaaacggccaggccccaggggctccagatgcactggacagggaagggccaaagctagccaagtggcagcacatcctgaggctgggtggcagtcaccaggcttgggacagcttcgcaggcaggagggggtcctgctccatctgggcggaggctcgggtcctgggcacccatgggccctggctcttggcactgcccctggggacaccacatcgtgaggacagactgagcgtcccacagccccgtgcgcactccgggctccagcagcaggggcttccttgggctcgcacaccctcccgctctgcagacgcacacagcccttggaggggtgcaccaccagccagtgggagcaccaggcgcgagagcccccagtgcaaacacagagaaggagcttaatactggggcagccacatctggccttgtgaggagcactgtggggacagctgagctgcggcgaggagctggaactgaggcagagccccccagtcccaggaaggctacagcacccgggggtgtagcttcccttctccctggcaaggccacagggctggtacaggagccccactggacagaggggctgtgggcaggccctgggttcacaaacgactcagctgaattcagggccagagtcctctttgctgtcaagagatttccacatccctcaagaaaaggccctttctgcaaggaggaagtctgagggcctcaggcaaaggtggccaagcaggcatcttaagtccctcctgctgtcccccaggccctctttgccaccactggattcccacagagccaccacctggctggtggctcccacatgaaacttcgtgtgagagaaagcgggactcagcttgagacccgtcagaaagtgaacaagcctttttctgcagagtaaagaggtcgctcactttacccacctcacccgagttctcaccaggcgccccagcagatatttccagggtcatccctggcactgacccctggatttgagccgggggggccgcctacttcacccgttcacgggaggaaggtgctggcaagatggtccacctggggaggcctcaggggacccccatactcaggcactcatggcaggagaagcggaagcagctcaggtgcccgtcggtaaacggatgaagagacggcgtggcgtgcacacccatggaaagggcgttcggccgggaagaggcgtgcagccccaccacgcaccggaaggcctggaaaacagtgcagggcagacagcaagcacgtcccacccgtgtcgtgggggtccactcacgctcaacgtccagcagagagaaacccagtgaccagaaagcagacgggtgggtgccaggcgagggggagagtcctgggtttctttctggagtgggaagaatcttctagaattgcatcgattgttgcataattgcaaacacactggaaacgactggatggtgcacctcctgagtgaaccctgagctgccagagaccaggccggggctcggctgcacagcacggccacgggctgaggggaaggaaaagggtcccaggcagagcttgggaagagaggaaaggtgcccagaaggttggctgggaggaagacagcctcgtcctccccggaaggactcaggaaagacacaagagggaacccagcccgactggcagggcggctgggcccgaggagcaggaggcagaacgaggcacccacagggtgggtgctctatcggcctagtttccagtgactgccagcctggtgttcagagagccagcagccgggagtagtgcccgcttcccccacaggaagttcctgtctgcgcccacccaggggctggtgctgagcagcttctcagctgaaggaagtggctgagggcgatgggtgtgggggcgtcgacagccttacaaagggaggggcgatcgcgcactggccctcccagcaggcacccgggactgccaatgtgtctcccacactggccgctgcacaagctgagaagctgggacggcccgtgcctcagggatctgcctggctggcaggccagcaccctcagcaagccccacagctgtcctgcacgagtggaggctgctcacacagcccttccaggcaggttcgtgatcacgcgtgtcctggcccacaggcttctggttacagaggtggctcactgctcagactgtcccctggctgagaacagctcctgctgggcccccagggggcctcctgcgcgagggctagagcagggtgcatgcccccacactgggatactcttgccatgagagatctaccctggaggaggaagttgctctggttggggagcttgcggaggggacagaaccagaccagcaacaaacttccgaagggaacctgaagagcctttaaactttctgtggtcatttgcatgcatgccttagcaacaccaacaagaaacaaagttagaagcagagagagaacagccagaaaacaaaagccagcaggaaaagtcggggagaaaaatctttgaaaggcaaaggctgtgtgaaaagctcttgcaggacccgcggtgagactaggatggtcgtcattctaccaagaaaagcatggcagaggggagttttataggaaagatgctccacaattccatgtggttctgcattctgtgttatggaaactacattttaggaaaagacatatttgaaaaagaagggcaaagaccaatttgtgcaggttaggaaagtggagatgctgtggccgaccacacggtgaaggtgttggcacccaaagcctacgggaggcttttctaaaacaaggcctaagtcaagcctcacagcgctcagtaacagatgagaaggtgcggaacacaccttcaaacacccgctacctgctcacaagaaggaagtcctgccaggcgcggtggctcacgcctgtcatcccagcactttgggaggctgagacgggcaggtcaccggaggtcaggagttcgagaccagcctggccaacatggtgaaaccccttgtctactaaaaatacagcaattagccgggcgtggtggcgggtgcctgtaatcccagctactctggaggctgaggcaggaggatcacttgaacccaggagatggaggttgcggtgagccgagatggcgccactgcactccaggctgggtgacaagagcaagactctgtctcaaaaaaaaatattcccgttcagaggctgcccccccaaaatgtcacggctaagtgagatggaggagcaggggcagagcctgtagcagcctcacaagagaagtaggtagagctgtcccagcgtgggcaggcgcctgtgctgcctgacacaggtaatgaaggcagctctgcatcctgacactggccctgccacctccgtgggtgaccagcacacatccacctagcagtcccagctccctctgtaccaggagcccctgaagtcagctgactttgcttgcaaaatgttctagagcctcctaccagtctgggtgcacccccctccactccaccacctcagcagcttggatgtctgcggggaagccctcctgctctctctctcccctgccactgctgattttgctcaagagctgtattattcagcacttaggagggagcagacactgatctaggcttcctcccaacggggctggcagctccagaatacttgagcacagctccccgccaggagagccacgtcctccagtttctgttcctgaaacaccctggaggagccggctgtgagccctggtgcagctggaaaccccagcaaggtggtcagtgtctgctcctctgtggaccagcctgcctggct

SEQ ID NO: 1243302 - DNA, 4001 bp, Homo sapiens
ttataggaaagatgctccacaattccatgtggttctgcattctgtgttatggaaactacattttaggaaaagacatatttgaaaaagaagggcaaagaccaatttgtgcaggttaggaaagtggagatgctgtggccgaccacacggtgaaggtgttggcacccaaagcctacgggaggcttttctaaaacaaggcctaagtcaagcctcacagcgctcagtaacagatgagaaggtgcggaacacaccttcaaacacccgctacctgctcacaagaaggaagtcctgccaggcgcggtggctcacgcctgtcatcccagcactttgggaggctgagacgggcaggtcaccggaggtcaggagttcgagaccagcctggccaacatggtgaaaccccttgtctactaaaaatacagcaattagccgggcgtggtggcgggtgcctgtaatcccagctactctggaggctgaggcaggaggatcacttgaacccaggagatggaggttgcggtgagccgagatggcgccactgcactccaggctgggtgacaagagcaagactctgtctcaaaaaaaaatattcccgttcagaggctgcccccccaaaatgtcacggctaagtgagatggaggagcaggggcagagcctgtagcagcctcacaagagaagtaggtagagctgtcccagcgtgggcaggcgcctgtgctgcctgacacaggtaatgaaggcagctctgcatcctgacactggccctgccacctccgtgggtgaccagcacacatccacctagcagtcccagctccctctgtaccaggagcccctgaagtcagctgactttgcttgcaaaatgttctagagcctcctaccagtctgggtgcacccccctccactccaccacctcagcagcttggatgtctgcggggaagccctcctgctctctctctcccctgccactgctgattttgctcaagagctgtattattcagcacttaggagggagcagacactgatctaggcttcctcccaacggggctggcagctccagaatacttgagcacagctccccgccaggagagccacgtcctccagtttctgttcctgaaacaccctggaggagccggctgtgagccctggtgcagctggaaaccccagcaaggtggtcagtgtctgctcctctgtggaccagcctgcctggctactcagtgatcggtgtgactcaagttctccttcaaacaaaactaagaacatcagactccaaacaagcccctctaaactttagggaactcctttcctctgtagtcaaaacaggcagacagcgggtccgaacaagagttgatagcaaaaactacaagttatttatttacaactgcccattccagccgcacaagcccaaatccaccaccactggcggagcggtggcacctgctgccctctgagtaccggagcgcccgccgcagccgccggggaccccgagcttgggcagggccgcaggtcgcccggtgaaccgaagcagcagtcggaccgggcgcctgcggctggcgcgaaggaggctgggcgggggatgaacgcgcccagagggcagaggcggcgcggcacagggaaacccggaccccacgcgccccgaggccccggcgccccgagtccccgcgcgcccagtccggagctgcaccggggcggccgccggcctcgcgacccctcccgcggcggggcacggccccctccccgcggcccctgggcgggcgcgctcacgtgtggccgcagctgccgatggccacgggccggtgatagacctccaggcagatggggcaggtgtactgcgcctccaggccgctgtcgccgcccgccggcccggccggcggctgccgctgctgagccgaggccaccaggctgcggaacatagccatcccggggccaggcccgcgccgcccgccgcccgctgtcctggcccgggccggcccgctagtcacagccgctactgcgccgcgctgacgtcatcgtagggcgccgcccccagccgggcttcgcggccgtcacggcgccactccgacgtcatcggggcgcgccctcgcgctgtcgccgccacagtctgcgacgggacccggcgtgcccatgtgtcaggtgggcgaggactacggggagccggcgcctgaggagccgcccccggcgccgcggcccaggtaagagctggcggccggacccgccaggccgcccctcgccttcccgccgcactcctgccccgaagggtcccggccgggcttgctccgggaagccccgcgtggagagcgggacctcgctccctagcactcggggaatgcctgtcaagcggtgacggccacctagaaggggacttactccactggctcgcgcctctcatcctagcagccactggggacggctctgccgctgacagtgctgtccttattcggagagaactggtgccgtgaagctgtctcgcctccccgtgtcagccttgggagactgaaaagcggcctttatgtgccccctgagccggcttttctaggctaaacatccccccagagcctttgtttttcttgaagtttggacagaacacaagcctgggtttgtgtgtgtaccgaggtgcctttctctgacccaactcagggtgagaaacaggagctgtctccccaaagcccactaggcgtggggaagatgtgatctgtgtttctctcttctcccccctcccatctccaaagccgtgagcagaagtgtgtgaagtgcaaggaagcgcagcccgttgtggtgatacgagccggagatgccttctgcaggtgaggcctggaggtggctgagaccctggcaaacatggcctcgctagcagacaggatagccgcaacttgtgatgctttgttaattctttttaaaaacatgtacttactttattcctgctcctgatggggtccctcgtgcccctggtgttgaagtggaggcgaaagcattggtttcctgcttgggaaagtttcccatgagctagccacagatcccctgatgaggtttctgatggaacttatggggacagttggaagtggggccgtggtgtctagactgggataagctgtaggaggaccaggcgtttgggggcagctggaatacatctaggggcggatcagagcatcttgggaacttggcagatggtctgggtgaaagtttttaatctcgtgtgagatgcttgtttcatctgtggcaggatagaggcttggaagacctctagctttcccccaggcgcttgtcatgtctttcttggcttgtagccattgtattgttcagttgtttccactagactcatagctccctgaagggaggaccaggtctctctccttttagccctcttaattcccagtggtggtgcgtggtttttttgttgttgttgttgttttttttgagatggagtctccctctgtcacccaggctggagtgcaacagctggagtgcatgatcccagctcactgcaacctttacctcctgggttcaagtgattctcctgcctcagcctcctgagtagctgggattacaggtgcctgccatcatgcccggccaattgtttttgtatttttagtagagacagggtttcaccatgttggccaggctggtttcgaactcctgacctcaagtgatccacctgcctcggcctcccaaagtgctgggattacaggcatgagccaccacacctggccaagataggtacttctttaaccacccaggagcatctgaaattgccaagaacaccaggctgccggcagaattcactgaggagaggctgctgtggctgtatgctaggcccttgtggccagaagggcttttgctgtgcttgctggtcccaaggaacagtggggagccggctctctaggggaaggccttaggaatctacatcgagctgggatccccagggatcattcaggtcagcacgtgggagaaaccttggccttccctgacccacaggggacagcgtggtttcaggagcccagacgcagcatgtacacgtg

SEQ ID NO: 1243303 - DNA, 4001 bp, Homo sapiens
ccaggacttctcccagaacttaagctccccagatcccagcactctggtcctacctctcagctctgatgtccccggctctgggagaggagtcccatcacatgttggcccctcctgggtcccaggtgcctcaggcgctgaagacagctccccctggctctcatggcatcggagaagggcttccacagtttcatccagctggaaggagaaaacatcaaaaatgttatgaatcccttagtgctttccaacatgatactcctttcctagcaggggaatctggggattggcagctgaatcaaggcctggtctttgaaagcagaaggtatccacctgggcccagtagcgattgacgatgaggagtgtggcatcatctgtggcctgccgcttctccaacttctcaattcgttctcggagttcatcttcacaagcctgccgttgttccagccgctctgccagtttcttgttcttgaactgtagtaccttcaggtccatctcctcctaccaaaggaaacaaaggggccgacgagagcgtcaagcagggcccacaaaccaatcacagagagagaaagaggagcagagcatctgcaatgcatgggagatggaggtattcccacactaaccgctaacagaatctaaggaggctcagacaacacacagcgaaagtgtctttgttgtgaggaggctcacgttgtttctgcctgtccccttgtaaatccttagtctttgacaagtcacacgccccctggaaacctgttttcctatctgtaaagggaagacaggcgtcgtgttctgagcttctttctaacctttctttcaaggtcctgtaacgcggaccttgctaaacttggggaagtgggtgtaagattccgcacagtttggccagagaacagagggagggctctgggaagttctgagggttaaggcaagagcccacgaaccgtggaagagatgcctccaagacgaatgggctcgataagagtcgtggtggtcttctcctcacgactcagcttcttttccgggggccctgagcccccgtcgccggcggcgcgtttgttgcctggcccagacatggccgcggcggctggagcgatgcagggtcccctgaggggcgtcaaacgggaggaggcggtacttccgtcacctgcagaagacacagagcagagatgtgggaacggctggtgttccacagccccaaacaccctccaccctgcacacacctgctggatcccgtcccccccggcgccagagccctcaccagcaggagggtcagcctagcgccgccatcttggatttcaccggacgtcactgggcgtcactggacgccactgccccccccccaacggtgcgcagggcgcaggcgccaaaggcagccccggatgtgaggaaacttctttatcttctgcttctattggttacgcttggtcccgccactcgggtcctctggcttcttcccaaacacctcctctttctctcggtgattggccaagaggcagttcccatagtaactgacaccgcgctcccacttcccagcctggaggacagcaccggccctcgtattagcaacctggaagagagggcgcccaggtgggcactcgcaacttctcacgtatctgcgcgttctcttcgctcccactggcgtgagcctgcgctttccgccttccttccctcacaagcccccttggcaaccgtcgccgttgagacggagggagacgcccccacggattcgccccgccgcgcctctccgcgcgtagattggccggagcgaggcgaacgggcccggccttggtagccgccgaccgagcgctggctgtcctggaacctaggcggcgggagcccggggcgcctcgcggcacggaagagcggcgagatgctcaaccgcaagaccagccactttttgggaatgagggtgcagtcggagcttgaacatctctccgagctgcggcgggaagcggggaaggatcgcagctcagtgcatgggtcggccgcgcggacgcgtgcgagtgtgcggactcagtggacgacggcggcggcggcgaaagcggatgaagaccccggagccaacttgtttccggtgagggcgggacagtctggtctgctcgtgaatatttataaaccggctcccccgcaggcgccacctgtcattatgcttactaacgttcgggacgtctcccgggctgcttgggcgaggagaggcaggggtgtgtgaccccggtggttactgtgctcgcgtagagcacctagggcctgctgaagccctccctcgcccgcgcctctccttagtccttgagatgagatggcaagttacagcggcttctccggcctgctggagattcgctacgggccaggacaccgcagctgccttccccaattcgctttctttccgcagccgccgctgccccgaccccggatctgcatgtggtgagtgtgaagagacaaaaattacactgaatatttgcgttctttattgtctccccaacagtcctgtctgtggccagggcatccccattttacagatgagactgaggcctggagatgcaattactccaggtgactggaagttggctttccagcctctccagtccaaagaggaggcagtgtgagaaaaaaagagccaaagacagaatgtaaatggagtctcatggccgctaaggagtattgtacagagggggacactgagggccacagggagtacttgaccaaggtcatacaaggtagtggcagagcagaaaaaagaattcaagattcctaaccctaggctttagaaatggagaggctcataagagttcatttaggcccagagagttaacgatttgcatagtcacacagcaagctggcaaaagagcccagcttcacgccggtggccaactcccagtctcacgcactagctgtcacagccttgtcatgataggtaacggccaccaatactctttttcttttactataacaggaagtacctggacgtccattccatgcaccagctggagaagaccaccaatgctgagatgagggagtagggactgaggggggcgtgggaagagctcttggcaaaggctgaggggtcaggttgggaaaacatgaggaatggctgactccaaagcatgtggtgggtgtagggtgatgaaaggaggcccagttgtcactcactcctctctccctcccaagggtgctggctgagctgctggagctagggtgtcctgagcagagcctgagggacgccatcaccctggacctcttctgccacgcgctcattttctgccgccagcagggcttctcactggagcagacgtcagcggcttgtgccctgctccaggatcttcacaaggcttgtattggtgagagggggcagctaccaggtttgagccccagggagaagaggaaccgggcctggcacaagtgaccatgggaagcagaagcaggggatttctgcctggaatatgtcattattagtagcatcatcatacacaagccatcagctttccaatccactgcttccttatctagaaattaaggatacagcacacattttacaggactgttctgagaaataatatatgcaaatatatgcatagtgcacaataacacctgctttagaatgtttaatagctcttgcttcagaatgtttaatagctgaaatgatctatttcttggtttattcccctagaatataagcttcgtaagggcaggaccttgtctgtcttgttcagtgccgaaaaccatacagtgggcatatagtgggtattcagtatttgttacatgagttaaggaaacaagccagtgctgaaacccagatctgtctgcttctgaagctcatggtcataaacagctgttgagtgaagtgaatgaatggataccagagagggcctcactgctgcatcttgctttccctaccagcaacccccttgggcaacgtggaggagtgctaccgctacttcaccagtgtccttttttgccatggagtcagggtcagttcccctggaacattctggaaactttacccatcccca

SEQ ID NO: 1243304 - DNA, 4001 bp, Homo sapiens
ttcggccttgcagctccagctccacctcctcactgctgctggcacccagtgccaccacaaaagccaaggccggctcactgagagggggccgcagctgcatcagcaaggggtctggaaggaatggacagaccctcatgaggataagagcagcagttactaccactctgtaccaagttccagactgagcccttcaatactcatggttcacttaatcaacacaacctatagtgcactattatctccatcctgaaagtgagacaaatgaaattcagggaggtaaagtaatttcctcaaagctacagagttgcgtatcacatcctcagggaagcttcctgtactttaccaatataattagaatcacacgcacatgcatgcacacacaatcattccgtttcaggagccccagtactttctgcttactatgtttataatttcctcccttatagcaagtgcaacactcatttctaggaagcgtcaaatacatatttaatactcaaccataatactgttttgaaacaaatgggtgtcaaaacatgaattgctctataaaccaagttagtcagagtctaaagcctgtgtttttgtgcactgcactttactgcccaaacatgaaatccatttcgtgagaagtagtaagataggcaattcaggggcccaacaccaaagtcccctcctccccaggacttctcccagaacttaagctccccagatcccagcactctggtcctacctctcagctctgatgtccccggctctgggagaggagtcccatcacatgttggcccctcctgggtcccaggtgcctcaggcgctgaagacagctccccctggctctcatggcatcggagaagggcttccacagtttcatccagctggaaggagaaaacatcaaaaatgttatgaatcccttagtgctttccaacatgatactcctttcctagcaggggaatctggggattggcagctgaatcaaggcctggtctttgaaagcagaaggtatccacctgggcccagtagcgattgacgatgaggagtgtggcatcatctgtggcctgccgcttctccaacttctcaattcgttctcggagttcatcttcacaagcctgccgttgttccagccgctctgccagtttcttgttcttgaactgtagtaccttcaggtccatctcctcctaccaaaggaaacaaaggggccgacgagagcgtcaagcagggcccacaaaccaatcacagagagagaaagaggagcagagcatctgcaatgcatgggagatggaggtattcccacactaaccgctaacagaatctaaggaggctcagacaacacacagcgaaagtgtctttgttgtgaggaggctcacgttgtttctgcctgtccccttgtaaatccttagtctttgacaagtcacacgccccctggaaacctgttttcctatctgtaaagggaagacaggcgtcgtgttctgagcttctttctaacctttctttcaaggtcctgtaacgcggaccttgctaaacttggggaagtgggtgtaagattccgcacagtttggccagagaacagagggagggctctgggaagttctgagggttaaggcaagagcccacgaaccgtggaagagatgcctccaagacgaatgggctcgataagagtcgtggtggtcttctcctcacgactcagcttcttttccgggggccctgagcccccgtcgccggcggcgcgtttgttgcctggcccagacatggccgcggcggctggagcgatgcagggtcccctgaggggcgtcaaacgggaggaggcggtacttccgtcacctgcagaagacacagagcagagatgtgggaacggctggtgttccacagccccaaacaccctccaccctgcacacacctgctggatcccgtcccccccggcgccagagccctcaccagcaggagggtcagcctagcgccgccatcttggatttcaccggacgtcactgggcgtcactggacgccactgccccccccccaacggtgcgcagggcgcaggcgccaaaggcagccccggatgtgaggaaacttctttatcttctgcttctattggttacgcttggtcccgccactcgggtcctctggcttcttcccaaacacctcctctttctctcggtgattggccaagaggcagttcccatagtaactgacaccgcgctcccacttcccagcctggaggacagcaccggccctcgtattagcaacctggaagagagggcgcccaggtgggcactcgcaacttctcacgtatctgcgcgttctcttcgctcccactggcgtgagcctgcgctttccgccttccttccctcacaagcccccttggcaaccgtcgccgttgagacggagggagacgcccccacggattcgccccgccgcgcctctccgcgcgtagattggccggagcgaggcgaacgggcccggccttggtagccgccgaccgagcgctggctgtcctggaacctaggcggcgggagcccggggcgcctcgcggcacggaagagcggcgagatgctcaaccgcaagaccagccactttttgggaatgagggtgcagtcggagcttgaacatctctccgagctgcggcgggaagcggggaaggatcgcagctcagtgcatgggtcggccgcgcggacgcgtgcgagtgtgcggactcagtggacgacggcggcggcggcgaaagcggatgaagaccccggagccaacttgtttccggtgagggcgggacagtctggtctgctcgtgaatatttataaaccggctcccccgcaggcgccacctgtcattatgcttactaacgttcgggacgtctcccgggctgcttgggcgaggagaggcaggggtgtgtgaccccggtggttactgtgctcgcgtagagcacctagggcctgctgaagccctccctcgcccgcgcctctccttagtccttgagatgagatggcaagttacagcggcttctccggcctgctggagattcgctacgggccaggacaccgcagctgccttccccaattcgctttctttccgcagccgccgctgccccgaccccggatctgcatgtggtgagtgtgaagagacaaaaattacactgaatatttgcgttctttattgtctccccaacagtcctgtctgtggccagggcatccccattttacagatgagactgaggcctggagatgcaattactccaggtgactggaagttggctttccagcctctccagtccaaagaggaggcagtgtgagaaaaaaagagccaaagacagaatgtaaatggagtctcatggccgctaaggagtattgtacagagggggacactgagggccacagggagtacttgaccaaggtcatacaaggtagtggcagagcagaaaaaagaattcaagattcctaaccctaggctttagaaatggagaggctcataagagttcatttaggcccagagagttaacgatttgcatagtcacacagcaagctggcaaaagagcccagcttcacgccggtggccaactcccagtctcacgcactagctgtcacagccttgtcatgataggtaacggccaccaatactctttttcttttactataacaggaagtacctggacgtccattccatgcaccagctggagaagaccaccaatgctgagatgagggagtagggactgaggggggcgtgggaagagctcttggcaaaggctgaggggtcaggttgggaaaacatgaggaatggctgactccaaagcatgtggtgggtgtagggtgatgaaaggaggcccagttgtcactcactcctctctccctcccaagggtgctggctgagctgctggagctagggtgtcctgagcagagcctgagggacgccatcaccctggacctcttctgccacgcgctcattttctgccgccagcagggcttctcactggagcagacgtcagcggcttgtgccctgctccaggatcttcacaaggcttg

SEQ ID NO: 1243305 - DNA, 4001 bp, Homo sapiens
tgtactttaataatatgcatattgagtgcaggggaagacacatgcaagtctgcaattcacttttaaagaaaaaataagattgatgggtggctagatacaccatacagcaaatatagcagaaacgtaacttatagactattaacctctgattttttttttttttttgagacagagtcttgctctgtcacccaggctggagtgcagtggtgcgatcttggctcactgcaacctccgcctcccgggttcaagcatttcttctgcgtcagcctcccgagtagctgggactacagatgcacgccaccaggcctagctaatttttgtattttcagtagagacagggtttcaccatattgaccaggctggtctccaactcctgacctcgtgatccgccaacctcggcctcccaaagtgctgggattacaggcgtgagccaccagacccggcccttaagtggtctttatgtgagtattaactgtataactcgaccttcctgtgttttttttaacatttttcaaaaataagatggagaaaaaaagtaggcattgaaattgcgtgagagactgcctgccatgtaagagtttagcaaaatgcctggactgcagaatgtgctcaaataacggtaacaaattactcaaaaacaaattactaattagttatgggccctattttccagggacttctgccttcagtatttctagtaaggctctgcacaagctgcaggagttgttaagtgaagatctcaggaatggagtctcagctacttctgtctcaccttctccaagagccagttggtaaggaggacacagcacaccaatgtggtcctggtttccctgtgcagtgcacgccaggggtgcttcaaaatgctgctgaaaatacgttctgacccaagaaagaaaagcacctggctttgaacagtcaaatgagagccaaggagggccgaacgccacctttgctgctcttgtccaggggtaaaatgttttgctttagaacagtaaggttctgcagacacccagcagatagtgcctcgacactctttgtgtcctcggacaatcagtgagtatcattcagagtataatttagagtctggagccagagggcctgggtttgatttgaggttttactgtgtgattttagacaagtcacttatcctttctcaagtttctcatcatcaatatggtgacaattacagttccaaccttatagttacccagggcattaattaaagactcgataaatgttaggagcaagagttgtatctccacgtccggaggctccttcccccacagacacttgtctccaaagttacactaatttctgaactctcagctgggttcctgcacccacccgccttcgaatcacctgcagcagcactgtccaatagaaaccgtgtgaggagccacaagcatcacctgaaattccttagtagccacgtcacaaaaatgggtgaaattaatttttaacgtttgacacatccaaaatattatctttccaacatataatcaacataaacatctaataaaagtttgcttttttcctagtcttctaaaactggtgtgtgttttaatatttcagtcttgattagctgtatttcacatgcttagcagccacatgtggccaatggctacttggctggacagcacagacctagagtggaggtcacacccgcagattccagccccacccccccaagaactaagatctgcccgaatgtacttggtgaaatcaaacaccaccagttattcttaagcactccaaacactaagaaccactgagtaagcggacgccttgctgggtgcggtcgagtgctagaaagcaaaagttgaggttctctgttcacccaagttcaggtaccggctcaggacctcggttacctcccccatcctccggaaaggtgcgcgtccaacagccagagagaggagagaacaattagttaaatctcgaggagagggcgtttcggcacaaatcttcagagcaccttccccatttaaaagtacatttcaggcacagttcatgcggaatcaagacaaaaagcctactccacgtttctcctccaacaaacttaaccttcccgtatccgcccctctggggtaacccatcaaactgagctcggccaccgtgctcggtccatagtgggccgtatccccacggcctagcgccgataattgcacacgggagtccgggaaacgttcgcggagtacacgtttgaattaatgactccgaaggggggatcggccgaccttccaccgcatcccacaaagaaactccgcgcccgccgacaccggcccgacacgccgacctcgccgctacccgtccgcgttcactcacaactcccccgtccaggcgccgggccgcgagcgcttccagggcagggcctggcgttgggggcttgggtctccggcccggcgggagggccccaagggcggaggccgcgctccccgctggtctgagtcccgcgggcctggctgggccaccgccgagcggacgaagcacaggcgcccttccgtccgcagcggccccgaccacttccgggccacggcctcgacacctcccactccgcccgccccgggccacactctttcttctcggagcccgcaccgcgctgccaggccaccgccgcactgcggggctgaggagtggaccggcttcacgaggcgtcctgccgggcctgccgggcagcccccgaaacacggatgcagtcggattccgccccaacttacatcttcccgccgccgccacctcctcctgctttcctcagccgccgaggccggcgccgctctgacgtcagagtcaaggagcgggaagtcgccgccgcccggcgcgcagcgatgacgtaaacgcctggcccaatgggcgccagcgaggaagcgttaaagagtcaaggcagtttgtgggagtcgcgctggggacgttcaaggtgtctcctagccggtaaagtccctgggactgaccgggctggttgcacgcttactggagcgggcacatgggtagcctgttgaacctgggagggcagcgcgatgaccgaggctcgtcctccggcgcggagggtgttaacgcgcccgtgccccgcccctttccttgcgcgggcgcactgggcccgcccgggcagactccggcccctgtcgccggcggtggaggcggggctccgggccgggctgtgctgaggccggcggggtggtagcacaggaggggttcgcaggctctgcggccgtgcgtggcggggcgtgggggcccgcagggcggaagtagctcggagagacgggctggggcagggcgtgcgttcgtgcggtcaaaatccactggtggcgtttggggtgttcccgtggacgcggcctcccggcaggcggacctccaccgggtgggcgcggcaggcgggctgtgcgggcaggaagagcgacgagcttgagagtgggagatggggtgcaacggcgggcctctccggggaggtgacactgccgctgagacccgaatggaagggcgcgcccggcgggggaacagcaggcgccgaggttcgctggaagcagggaagggaggcccgggtaccggctcgcaggcccgcgcgagcttcgcggcagcggcacggagcgtgtgaacggcgcagcgccgaggcttcatccatcggccggtgcagggtccgggcagggagcactgtcgaccagggtccgaccctgggagagtccagaggtggcgcctctggcagggacagaggagggggtgacgctgtaggggtgcaggcaggaggctccgcgtcaactccccacactgacggggcggatttttttttttttttgacagagtctcgcactgttgcccaggctggagtgcagcggcgcgatctcggctcactgcaacctccgcctcccgggttcaagcgattctcctgcctcagcctcccgagtagctgggattacaggcgcacactaccacacccggctaattttttttgtatttttctggtagagacagggtttcactatgttggccagactggtcgagaactcctg

SEQ ID NO: 1243306 - DNA, 4001 bp, Homo sapiens
tttagagtctggagccagagggcctgggtttgatttgaggttttactgtgtgattttagacaagtcacttatcctttctcaagtttctcatcatcaatatggtgacaattacagttccaaccttatagttacccagggcattaattaaagactcgataaatgttaggagcaagagttgtatctccacgtccggaggctccttcccccacagacacttgtctccaaagttacactaatttctgaactctcagctgggttcctgcacccacccgccttcgaatcacctgcagcagcactgtccaatagaaaccgtgtgaggagccacaagcatcacctgaaattccttagtagccacgtcacaaaaatgggtgaaattaatttttaacgtttgacacatccaaaatattatctttccaacatataatcaacataaacatctaataaaagtttgcttttttcctagtcttctaaaactggtgtgtgttttaatatttcagtcttgattagctgtatttcacatgcttagcagccacatgtggccaatggctacttggctggacagcacagacctagagtggaggtcacacccgcagattccagccccacccccccaagaactaagatctgcccgaatgtacttggtgaaatcaaacaccaccagttattcttaagcactccaaacactaagaaccactgagtaagcggacgccttgctgggtgcggtcgagtgctagaaagcaaaagttgaggttctctgttcacccaagttcaggtaccggctcaggacctcggttacctcccccatcctccggaaaggtgcgcgtccaacagccagagagaggagagaacaattagttaaatctcgaggagagggcgtttcggcacaaatcttcagagcaccttccccatttaaaagtacatttcaggcacagttcatgcggaatcaagacaaaaagcctactccacgtttctcctccaacaaacttaaccttcccgtatccgcccctctggggtaacccatcaaactgagctcggccaccgtgctcggtccatagtgggccgtatccccacggcctagcgccgataattgcacacgggagtccgggaaacgttcgcggagtacacgtttgaattaatgactccgaaggggggatcggccgaccttccaccgcatcccacaaagaaactccgcgcccgccgacaccggcccgacacgccgacctcgccgctacccgtccgcgttcactcacaactcccccgtccaggcgccgggccgcgagcgcttccagggcagggcctggcgttgggggcttgggtctccggcccggcgggagggccccaagggcggaggccgcgctccccgctggtctgagtcccgcgggcctggctgggccaccgccgagcggacgaagcacaggcgcccttccgtccgcagcggccccgaccacttccgggccacggcctcgacacctcccactccgcccgccccgggccacactctttcttctcggagcccgcaccgcgctgccaggccaccgccgcactgcggggctgaggagtggaccggcttcacgaggcgtcctgccgggcctgccgggcagcccccgaaacacggatgcagtcggattccgccccaacttacatcttcccgccgccgccacctcctcctgctttcctcagccgccgaggccggcgccgctctgacgtcagagtcaaggagcgggaagtcgccgccgcccggcgcgcagcgatgacgtaaacgcctggcccaatgggcgccagcgaggaagcgttaaagagtcaaggcagtttgtgggagtcgcgctggggacgttcaaggtgtctcctagccggtaaagtccctgggactgaccgggctggttgcacgcttactggagcgggcacatgggtagcctgttgaacctgggagggcagcgcgatgaccgaggctcgtcctccggcgcggagggtgttaacgcgcccgtgccccgcccctttccttgcgcgggcgcactgggcccgcccgggcagactccggcccctgtcgccggcggtggaggcggggctccgggccgggctgtgctgaggccggcggggtggtagcacaggaggggttcgcaggctctgcggccgtgcgtggcggggcgtgggggcccgcagggcggaagtagctcggagagacgggctggggcagggcgtgcgttcgtgcggtcaaaatccactggtggcgtttggggtgttcccgtggacgcggcctcccggcaggcggacctccaccgggtgggcgcggcaggcgggctgtgcgggcaggaagagcgacgagcttgagagtgggagatggggtgcaacggcgggcctctccggggaggtgacactgccgctgagacccgaatggaagggcgcgcccggcgggggaacagcaggcgccgaggttcgctggaagcagggaagggaggcccgggtaccggctcgcaggcccgcgcgagcttcgcggcagcggcacggagcgtgtgaacggcgcagcgccgaggcttcatccatcggccggtgcagggtccgggcagggagcactgtcgaccagggtccgaccctgggagagtccagaggtggcgcctctggcagggacagaggagggggtgacgctgtaggggtgcaggcaggaggctccgcgtcaactccccacactgacggggcggatttttttttttttttgacagagtctcgcactgttgcccaggctggagtgcagcggcgcgatctcggctcactgcaacctccgcctcccgggttcaagcgattctcctgcctcagcctcccgagtagctgggattacaggcgcacactaccacacccggctaattttttttgtatttttctggtagagacagggtttcactatgttggccagactggtcgagaactcctgacctcgtgatccgctcctaggttcgccttggcctcccaaagtgctcgctcctgggcgtcccaaagtgctgggattacaggcgtgagccaccgcccccggccgagggcgggttttgttctctgctgtgcctgtcaggcagtcgttgccctgtggttatttgtggagggattgacggtgcgctgagcttcagactttgtctgaacagcttcgtggcagcaaggaagggagaagggaacagatccaagccgatctttgggaggagagaaccagcatgacttggagactttagatgtcagagcaaaggacagggtgcagcttggtgacccggagtgggtgggtgggtgaatggatggatagatagtggggatgtggtctgccatcactgccctcttccctgtgtgggaagccagctcttggtgacttcctgccgagacccactccctctggccctgtccgagggtgtcaagtgtgcccttgacccttcaccctgggctaagggatgtccaaggagttggggacaaaggcagctaggaggaggagctacctcccgagtctgctgcagtaagtcaccagtgtgttcctgtgggtggaggctggcaggcccatcagtctggtttgggtacccgttggatttgggtttgatgacatgtaaagtgagttagagtctctgcattactgtcacacctgctgtgcccaggcatggaagattaagtggaacagaggggccgcccccctgctgaaggggccccagagtcggcgctaggggagggggcagcctcggtggtccaggcaggcataggcggaattctctgaggtggcattggagtccagtggtcagaggtgctaaaaggccccaaacctagagcccatgcccagggccccactgacacctggtgggcaggggcagcctggtgaccccacatgacatgggtgggcgtgacgcagcaccagctgggccgacagccctccccctgctggtttttaatgctctgcagtaatgtcatttggcctgcgaataagctttcacacattttatattaaatctacaagtatgatttattcaggcacttacgaa

SEQ ID NO: 1243307 - DNA, 4001 bp, Homo sapiens
tgcgtgagagactgcctgccatgtaagagtttagcaaaatgcctggactgcagaatgtgctcaaataacggtaacaaattactcaaaaacaaattactaattagttatgggccctattttccagggacttctgccttcagtatttctagtaaggctctgcacaagctgcaggagttgttaagtgaagatctcaggaatggagtctcagctacttctgtctcaccttctccaagagccagttggtaaggaggacacagcacaccaatgtggtcctggtttccctgtgcagtgcacgccaggggtgcttcaaaatgctgctgaaaatacgttctgacccaagaaagaaaagcacctggctttgaacagtcaaatgagagccaaggagggccgaacgccacctttgctgctcttgtccaggggtaaaatgttttgctttagaacagtaaggttctgcagacacccagcagatagtgcctcgacactctttgtgtcctcggacaatcagtgagtatcattcagagtataatttagagtctggagccagagggcctgggtttgatttgaggttttactgtgtgattttagacaagtcacttatcctttctcaagtttctcatcatcaatatggtgacaattacagttccaaccttatagttacccagggcattaattaaagactcgataaatgttaggagcaagagttgtatctccacgtccggaggctccttcccccacagacacttgtctccaaagttacactaatttctgaactctcagctgggttcctgcacccacccgccttcgaatcacctgcagcagcactgtccaatagaaaccgtgtgaggagccacaagcatcacctgaaattccttagtagccacgtcacaaaaatgggtgaaattaatttttaacgtttgacacatccaaaatattatctttccaacatataatcaacataaacatctaataaaagtttgcttttttcctagtcttctaaaactggtgtgtgttttaatatttcagtcttgattagctgtatttcacatgcttagcagccacatgtggccaatggctacttggctggacagcacagacctagagtggaggtcacacccgcagattccagccccacccccccaagaactaagatctgcccgaatgtacttggtgaaatcaaacaccaccagttattcttaagcactccaaacactaagaaccactgagtaagcggacgccttgctgggtgcggtcgagtgctagaaagcaaaagttgaggttctctgttcacccaagttcaggtaccggctcaggacctcggttacctcccccatcctccggaaaggtgcgcgtccaacagccagagagaggagagaacaattagttaaatctcgaggagagggcgtttcggcacaaatcttcagagcaccttccccatttaaaagtacatttcaggcacagttcatgcggaatcaagacaaaaagcctactccacgtttctcctccaacaaacttaaccttcccgtatccgcccctctggggtaacccatcaaactgagctcggccaccgtgctcggtccatagtgggccgtatccccacggcctagcgccgataattgcacacgggagtccgggaaacgttcgcggagtacacgtttgaattaatgactccgaaggggggatcggccgaccttccaccgcatcccacaaagaaactccgcgcccgccgacaccggcccgacacgccgacctcgccgctacccgtccgcgttcactcacaactcccccgtccaggcgccgggccgcgagcgcttccagggcagggcctggcgttgggggcttgggtctccggcccggcgggagggccccaagggcggaggccgcgctccccgctggtctgagtcccgcgggcctggctgggccaccgccgagcggacgaagcacaggcgcccttccgtccgcagcggccccgaccacttccgggccacggcctcgacacctcccactccgcccgccccgggccacactctttcttctcggagcccgcaccgcgctgccaggccaccgccgcactgcggggctgaggagtggaccggcttcacgaggcgtcctgccgggcctgccgggcagcccccgaaacacggatgcagtcggattccgccccaacttacatcttcccgccgccgccacctcctcctgctttcctcagccgccgaggccggcgccgctctgacgtcagagtcaaggagcgggaagtcgccgccgcccggcgcgcagcgatgacgtaaacgcctggcccaatgggcgccagcgaggaagcgttaaagagtcaaggcagtttgtgggagtcgcgctggggacgttcaaggtgtctcctagccggtaaagtccctgggactgaccgggctggttgcacgcttactggagcgggcacatgggtagcctgttgaacctgggagggcagcgcgatgaccgaggctcgtcctccggcgcggagggtgttaacgcgcccgtgccccgcccctttccttgcgcgggcgcactgggcccgcccgggcagactccggcccctgtcgccggcggtggaggcggggctccgggccgggctgtgctgaggccggcggggtggtagcacaggaggggttcgcaggctctgcggccgtgcgtggcggggcgtgggggcccgcagggcggaagtagctcggagagacgggctggggcagggcgtgcgttcgtgcggtcaaaatccactggtggcgtttggggtgttcccgtggacgcggcctcccggcaggcggacctccaccgggtgggcgcggcaggcgggctgtgcgggcaggaagagcgacgagcttgagagtgggagatggggtgcaacggcgggcctctccggggaggtgacactgccgctgagacccgaatggaagggcgcgcccggcgggggaacagcaggcgccgaggttcgctggaagcagggaagggaggcccgggtaccggctcgcaggcccgcgcgagcttcgcggcagcggcacggagcgtgtgaacggcgcagcgccgaggcttcatccatcggccggtgcagggtccgggcagggagcactgtcgaccagggtccgaccctgggagagtccagaggtggcgcctctggcagggacagaggagggggtgacgctgtaggggtgcaggcaggaggctccgcgtcaactccccacactgacggggcggatttttttttttttttgacagagtctcgcactgttgcccaggctggagtgcagcggcgcgatctcggctcactgcaacctccgcctcccgggttcaagcgattctcctgcctcagcctcccgagtagctgggattacaggcgcacactaccacacccggctaattttttttgtatttttctggtagagacagggtttcactatgttggccagactggtcgagaactcctgacctcgtgatccgctcctaggttcgccttggcctcccaaagtgctcgctcctgggcgtcccaaagtgctgggattacaggcgtgagccaccgcccccggccgagggcgggttttgttctctgctgtgcctgtcaggcagtcgttgccctgtggttatttgtggagggattgacggtgcgctgagcttcagactttgtctgaacagcttcgtggcagcaaggaagggagaagggaacagatccaagccgatctttgggaggagagaaccagcatgacttggagactttagatgtcagagcaaaggacagggtgcagcttggtgacccggagtgggtgggtgggtgaatggatggatagatagtggggatgtggtctgccatcactgccctcttccctgtgtgggaagccagctcttggtgacttcctgccgagacccactccctctggccctgtccgagggtgtcaagtgtgcccttgacccttcaccctgggctaagggatgtccaaggagttggggacaaaggcagctaggaggaggagctacctccc

SEQ ID NO: 1243308 - DNA, 4001 bp, Homo sapiens
tgcagactggagttcaggcattggctgattcaactgtgatgtgtggccagcctaatccaccaatgcccatgtttcactggtccggacgccaggccaggccgtgtgcaaagaacccctctcctgcacctcttactgaatctgcacaccgatcccgggagaaggtgtgagggttgctgtcattttccaaaggagaaaactgaggccagagagatcaagggtcccgcccagagtcgcagggcttgtacagagagaaagtgggagctcccatgctcttccccattggcaggatgggaggggacagggccgggggactcaccgcctggctgagggcatccccctgcagagtcagcacacccttcacctggtctgtgctgtaacatgtggcgtcagagcggtgcctgtggtcacccccccaccacccagccctccctcccggcgggctgcccctcctgtcccatcgcacaaccagctggtctgcaggacagggctatggccatgcctcctaccccccaaggtacccatttccccggtttccgcctagcccaggctcacccacagctgcctaggatgaagttctcttgcttggcgggcccctcagtgccggagcccggcagagtgaagcgcagagaggcctcctgtggaacagagggaaggaggggagctggtagcgcccactcaggcccggcccagtgctccttccagaagcccccctccctccaagtcagcggggggaaggaacaacgtggcctggcctcacctgggttcagctggggtgggaagaccctgcccaagcccccagggcacctaaccgtgagcccgatctctgcttataccacattccctgaacacctcctgtgtgcccgcctcggggaatacaaaacagacaggggcagcctcccagcttggttgagggggaaaggggcaaggggcagagtcagggaacaaggcagtagttatggtaacccgcggtcctgggccacagcaagcactacgccggttacttctgtgagctgcctggctcatttatctacaccccagcctcgcgaagcgggtactgttatctcccttttgccaatgagaaaagggaggcccagggaggttcagtgacttggctgaagtcacactgccaggcagaggcagaattcttcggctcccagattggatgccgctgctcccaaggcggccttccccgacccgaggccgggcgggactcaggcccttgctagcaccctcgtcgggacccgcccctgcccgcacacaggtacttatataatgaggtcggctcgagttcgcggaggcggggccctgcctgaaagccgcggcagccgcacactgtaggcgctcaggacgcagccgcgcggccccaggtggagccagggaaatgaggagggagggccgccacgcccggcggggcagggcgcgggtcgttaccttgaggatgtcctgcagctgcttcaacacagcgtgcacctcgtcgtgcagcagccagcggaactcctcctcctgcgggacagacccggcggtcgcgcccggccccgccgccccgccggcccgcccgctggcccgcgcgccttaccagcaccgcccgctccgccgccgtcgctgccatcacggtggccatggccgcaggccgccgccgagcgccctccccaccggccgctgctcctgtccaccaatctttctgtcctcggtcctccggtcctcccgtccgcccccggcgtctggctccgcccccacccgattggcggagcgggtaccaccccgcccccaggccggctccgtgctcgcgattggctggcgcctgtcggtccgcctcggcccccgaaacctgcgggagccctggaaccagactggcggctgcgggagtgaggctcgctccgcctggccagggacgcggccggcggctgcacgagtcaggcttgctccggctggccagggacgcggccggcaccagcctggggcgcccgcttgggggcggagctcccggggcgcccccaggatatgatagggcgctctgctccactcgcgctcactcattggccggcaggacagtctgtccccgctcctcctccctattggcccgcttggctccattggtcgtggttccaaccctgccgcggacctcgccgccactcccaagtccgtctcaccccggacgcggaggtcccgaaaacccaccccggccccgccgctgccttctcctcccacccatctcgccgaggacgagggaagcaggactcctgcggcacagctgtgttaccaagaagtgttttatttttcttgcagtagctttgttaattgcacaaaatcatgttttgtttttgccatttaaacattatcacacaatcctattctgaaagacaaatgttcattaaaaacaaagcaaaaataaaaattcacaaccttaattacctagatttgtcatttaaaggtttaaagaaaaaagggaggggctttcttacaagctttttcacaagtgtcacattttctccttaaaagggaaggatttcaaaagaaaggtgaaatagcttaaacagaaatattcataaaaaggaactttacagaattgtcaacaatattaagacaaaattgactaaccggtttcattaccgcatcttcccccgcccccacccccagtgtgttccgccaggactagaacaggctttgtgttcagacagaaatgcttcaaaatcccagtgaaatgaactgtgctaaaaacccgacaggcatcttccctgccctccccccactcgtcttctgcaatcctctaacccagtttctaatctctgaaaggggccaaagctgtgaggggggaaggaccccgccctagtgtggccaccctatatataattacatattgcatcgtaaatgctggccttccttctgcaaattatgattttggaaaatccaacccatgcagagggataaaaaactgacatcccttgggtaacttttttttttgcaacattccaagccccccccggtcccctatccaaggacaaatgtagggcctctaggatgtcccagacccacctcggagggccagtcagttcaggtaggtcaggcccagttctcttccctcccgacagaccccgggcccgggaagcaccgaagaccatgatgctggctggagtgaagacactcgtttccgtatcaagagctgagcctaagaaatgctcatcgttggtcaggctgggtctgggccaaagggacagacagaaagaaatactgtctccacgggaggaagagggagaggagggaggatggagagcggtgggcatgcaggggacttggcagggcagggtggagaaggtgggaccactgggaggggaccgaggtaagagtggctcttcagagccaggtgaagagtctgtggcctaacggaaacagaaaggagcgcccccaacccccactcctcttggctcatcactagtggccctgaggactccctcccaagggatggaatgcaaatccaaatactaaaacagcctagggaggagcgagcgcccgctgtggcagtggcatctggggcatggcttcgaggcggtgagggccgggcctccatgctcacctgcaggccggctgcttgctgcactccctggaaagccagggccccatcttctcgggactctgccagtctcttttcagttcacaaaggcgtctatggagcgctgggtgcacactggacgcttagacgtgaacatctttctcagctcatcacctgaggttggagggccccaagggcccctctgtctggagtctgtactggctcatctgggcccaaggcctctccttgtagggaatccagtgggggatggggacatgactacagcctcttcgctctgggggaagctgtgggaaggcttccaactctcgttgctgattctagttccttgactggaaggggtttgagataagacaagctcggaagaaaaaaagccaggcagcagtttctgggcagcttctatcctggggcgagagcctgtgtgtgtgtgtgtgtg

SEQ ID NO: 1243309 - DNA, 4001 bp, Homo sapiens
ttcataacttttattacaactcgcaaatggtggagaaccattgcattttgcttttacagaaacagctaacagacaaatccttgggagatcatctacttcttttggaagtactcctatagaaaaggtcaatttttaggatcctgttgacacataggcccgtgtatgaaaatgattagttttccatgacagagttaaggtcactttaaaaataataatgatgatgatgatgatgatggtgttaacattcattgaacgcttactatgtgccaggtactgttctaagtgttctgttataggaatgaagtgtctcaccatatccttgtgaggctgttactcaaatgattcctgctttacaaatgaggaagctgagacacagattagttaactcacttaaggtggtagttgaaagtattaatagttgtgtctggtgatatttttggttgtcacaacaaggaagcgggatgctactggcatctagtgagtagaggccatggatgatgctaaatatcttacagtgcttaggagacataataatgaattatccagcccaaaatgttaataatagtgtagaagctgaaaaaccctgcacaatgctgcaatgcctctccaacaccatcttatgttatccttctttgctcactatgcttcacttacattattctttactttcctcgaaccccccatacccttgtcttgctcaaggcctttgtattagctggttccttaatctttggagctcagttcacttcctcagacaggttttccctgaccatcctatgttagagtagtcttccttacatttcttcactgtttatttcttttcttttcttttttttttttttgagacagggtcttgctatgttgcccgggctggccttgaattcatgggttcaagtgatcctcccacctcagcctcccgagtagctggaactacatgtgcgtgccaccaagcatggcttgtatctcttatagcaactgcctctatctgaagttatcagataaaattattgtttgtctccactaaaaaaggataaacatcttgagacgggtattagtcttgttcacaactgttcaggaacagtgcctggtacagggtgggaaccaacattaatatttattgaatgattggctgtgcgtggtggctcacacctgtaatcccagcactttgcgaggccgagacgggcggctgacttcaggccaggagttcgagaccagcctggccaacatgatgaaaccctgtctctactaaaaatacaaaaattagctgggtgtggtggcacacgcctgtaatcccagctactcgggaggctgaggcagaagaatcgcttgaacctgggaggaggagtttgcagtaagctgaggtcttaccactgcactccagcctgggcaacggagcaagaacctgtcacacacacaaaaaaaagaataaagaaaaaatatttattgaatgaataaatgaatatcaggtactgagattaaaatggcaagcaaaacccccgcctttatgaagctagcaagttatggaggtaatcacatgataaacaaataatatataattaagcaaacaatagaccactcaggaggtttagggtctaccaaccaactcctaatccagggcaaatgagcaaactgtgttagggacctacaacttgcaggatctggatagagatggcaattagcagcatcaactctcaccttcatggctgggatataacatttcaaattggtcctggacgtggggataaagggcggcctgtgattcaggcctgaggatgtggaggtgtcttgggctgggctgctttcacgccagcagaactccagggccaactccagggccttctccaggcggcagagcggaccctaggaccccggcccgcgctgcagtggggagggtcagcaacctccacccaccctcatcctcccccatcctcccgggtactcaccgtgccactggccctgcagctagctaccgttgctatagcgccgacagcgtggcgggcggctggccgagaggagcacgggagaaacatggcaggctcccgtagcctcctgggaaatgtagttctccttggactctagcctgtttgctcgcggggtagcggactacgctcttccagctgtcggacctgggaaattctcctgtgctaaatcccgtggcgctcgcgggtgtcgccgcggtgcatcctgggagttgtagttttttctactcagagggagaatagctccagacgggagcaggacgctgagagaactacatgcaggaggcggggtccagggcgagggatctacgcagcttgcggtggcgaaggcggctttagtggcagcatgaagcgcaccccgactgccgaggaacgagagcgcgaagctaaggtatgtcgggctcccggggcctggagatcttcgtgcgctgtgagcaaggatcagggaaccggaagggcttggtttgatggcgagcggatgcgcggtgttaaactaagggatgacagggccttgtcagcaagggacctggagatattagaggggatgttacaaattcgtgctcttcaggatgcaggccgagtcttgttggatcggctcaaaaatgagaagcaagatacccatttccttgtccttcttctgcatctattccttggttaaatttgtcgccatccctgtgcctcagtttaccggattctcagatgactgtgatcataccagctgtgctttctcataatggtctctgaggactgagatcggcttagatgaaatatctgtgcagtcagctgtgtttctttggaacaattgtctccgtgaccggctgataacagtttgtgtcttttagcgctgtggatatgaatctttaactacattgctcctctctacctttgatgttcagcttctggtagttgccattccatgggatgaccataataatggcaacagagattttaaaaagcatttattgtgggtcaggcactgtattaagtgcataatatttaaattatttcatatcattgtcacagcagattgcaagatagatattatacagatggagtataaataacagcccagcttcacagatgaagaactgaggctcagaagcattgagtgttttcctttctctcattcccaaactcagatcctgttgatttgtctacgtatattgggaatatgcccactttttttttttttcatctccactaccttggaccaagctaccattatctttttaatagactgttggaatagcctattgattggcctacactcactctacaccctaacttaactcttcttccaccttctctcccttccctcaactaccattctcttctgcacaccatagagtaagatcttcgtgaaatgcaaatataattatgtccctttcctttctccttactctgccaaccacctgtttaaaaatattccatggctttctgttgctcttaggataaaggcaaaacttcacattgcctacaagatcctgcatgatctggaccctacctgctttcacaaccccattggatatgacactctgctctctgcctaccagtcactttggccttcttaaaagtcactcttcactatactttatcgggcttcagggcctttgcacatgtcatttgctgcctactctatgttaggcaaatattggcagtgaataacagtgttaaataacgtagacacagttcttgctttcatagaatttcatcttacacgtgagtctgtttagggcaatacacctaaggatttaaaatataaaatctgctctatattgacctgagttattgcagtatttcgtaagggaccagaagttttcatgcttgagtctgcatatgatgtggataatatattaaagataagcacaaagagggcgacccttctgctttagtctacacagtgcaaagaaacaaatgtcacctcatggtgttgtgcatgatgtctttctcatctttcaggtttatttttaaagtatttcatttattctgtgaagatttgttgagcacctattatttgccata

SEQ ID NO: 1243310 - DNA, 4001 bp, Homo sapiens
tcaaaaccaatgtaagcagcatagagaaactctctttccaacaacaacaaaaaaacacaaaacaaacaaaaatacttcccaatgtatggcttcatggttgcaagaagtaaaaactaagaagaaatgttcctttccgcaaacctccacacccacaactgccactattaacgttcttaagcctgacccccatcacccgcatctcagatacccacgtgttcacccactgatctcgtctgaagcctggatttgagtaagtgttcacttacgttccggacgggcatgaccggtccggtcagctgggtggccagtttcagttcttcagcctgttggtgaatgagaagagttaagtggggttggccgcactgctgcaaggactccaccctcacctggccccaaactttcccctggggattccgtgttcaggaccagtgtctgagccttttctacaacacactttgtggccccaatgttaagaacagtccttattagttaggtgactatatcttactgagttgacgcaacacgcacgagacagttatctacctgtgaaccacgggcggggcagagaaaactgttccctaatttaactacccggaaacgtatacaatggactctttatcaaccttatcctacaaggtctttctagaaatattttggaatacgaagcattttagggagagcaacgtcaatggaaaaagctgcctccaagtcacacagccttgccatgtccattaaggttatctctgcggaaacgcacaggtgaaccttagcagtcccgcttagctcatcacccacaatgttttggttcttctcaccccagcaagacccagggaccggtgtcactgataaaggagccaagcctcactgtccccgcgcaccaggacggccagagagccgtgtactcacagaactgtctcccttcttgggggccgagggcttcctggggaagaggatgagtttggagcggtactccttcagccgctgcacgttggcctgcagggactccgtggacttgttccgcctcctcggatccacagaaatgccgatggtccgggccaccttcttgtgaatgccggccacctgccccagaaccagagagagatggagacaggcccgggctttctccagccccgaggcctggatgaaaagcctcagcaatcagatggaaaagggttcaaatgtgctttcatcaaggccgtacagcgattccggagaatgtcatcacgcgactgaggccaacagaggggacttcggggccttcctgacaccgcagcgctgccagtactcaccctgagctcctccaggctgaagccgcggccggcgcgcaccttcgtgtggtaccgaaccgtggggcagcgcacgatgggccggatgggacccgacgcggggcgcggggcgatgcggcgcgccttggcttgccgggccttacgtctggtggagagaagcgcagcggcggtcacccttgcctaaggccgccaggccagcgctccgcgacggttgcagacagcgccccccgccctggcatcggccacccgcaagccaaggcgcagccgcgggcacgagccccaggggcagccccgagcgcagggctcacctgcggatcttacgggccggctggttgaaccacgtggccacgcgccgctgccagtccttgtggaagtggggcttcaagaccatgccattccggctgggcgccatggctgcctacggccctgcggctgcggacgagaggggagcgagtgagaggccggaccccgggcgcgcgcacccccccgggcctccgccccgaaccctccagactgggccgtccggccgcgcctagagcccgggcagcggccgaacgctgtctgcgaagaagaaggggcccatccactcccgcgttggctgaagcgccaggccgatggcgctggatgatgcccaaaggccaggacccagtctccctcacctcctgcgcaggaaaacagccgagcggaaaggaagcggccccgcaatgcactctgggatgatagcagggccggccaaccagaagcgccgggcgctctgaccaatcagagccccgaaaggaggaactgacgtcgccgcggctctcccggcagccctagggccgccgtcgcagacatgttgccgctgagaatgcggcggggcggccgtgattcctgggccctgagtaaccgacggccggacttgcttgacgtccgccgttactgccccggcgcttcagccgctgcgcgggccgcggccgagtcctgtcttgcgggctaacgcgcgcgagtccggtatctgggccgacggcgaacgggcgacgcccgaggaattctgtttgttcacatttgtgagacacgtttgcagcgcaaaggcagaaaaacttcagtgacatccgagtttgcgcaacctaaggccttcgtccttgtcgttccagcgtttattctcctcccatccatttagaacatttgtggtttttttttttgttttttttttttggagacggagtctcgctccgtcgcccaggctggagtgcaatggcgcgatctcggctcactgcagcctccgcgtcccaggttcaagcaattctgcctcagcctcccgagtagctgggattacaggcgcccgccgccacaccctgctaatttttggtattttagtagacggagttactgttggcctctgtcgctttcccttggcccaggattaggtgacttctctaaggtcaggggtacccgactgaaaatgtcacactctgacctgctgtgcctactgccttccttcacaaagaaaagcatcaacaaaaagccatctcttctctagtataagtctgtgaaggcaccatccatcttactgctacctggaaacctttaaatcccaataaccctctttcttccctaccctcacccaatcaccacgcttcctcctggtaaaacttattattattttttttttttgagacggagtctccctctgttgcccaggctggagttcagtggtgcgatctctgttcactgcaagttctgcctcccgggttcacgccattctcctgcctctgcctcccaagtagctgggactacaggcgcccaccatcacgcccagctgattttttgtatttttagtacagacggggtttcactgtgttagccaggatggtctcgatctcctgacctcgcgatccgcccgcctgggcctcccaaagtgctgggattacaggcgtgagccaccgtgcctggccaacgtaatccacattttaagaatttcacagttccagcactttgggaggctgaggtgggcggatcagccgaggtcaagagtttgagatcaccctggctaagatggtgaaaccctgtctctactaaaaatacaaaaaagctgggcgtggtggcgcatgcctgtaatcctagctacttaggaggctgagtcaccagaattgcttgaactggggaggcagaggttgcagtgagccaagatcacattactgcactctagcctgggcaacagagcaagactcagtctcaaaaagaaaaaaaagtatttcacaggccaggcacggtggctcatgcctgtaaatcccagcactttgggaggccgaggcgggtggatcacctgaggtcaggagttggagaccggcctagccaacatggcaaaatcccgcctctactaaaaatacaaaaattagccatgtgtggttgtgtacacctgtaatcctagctactccagagagtaggacaggggaatcacttgaacccaggaggcagaggttacagtgagtcgagactgcaccactgcactccagcctgggtgacagagttaagcctccgtctcaaaaatgaaaaatttaagagctgggcgtgctggctcacacctgtaatcccagcattttgggagcccaaggcaggcagatcacgaggtcaggagatcgagaccatcctggctaacatggtgaaaccccgactctactaaaaatacaaaaaattagccgggcgtggtggcaggcgcctgtggtcccacctact

SEQ ID NO: 1243311 - DNA, 4001 bp, Homo sapiens
agaaaaaccctccctgagctggacatggcggctcaagcctgtaaacccagcaattcaaaaccaatgtaagcagcatagagaaactctctttccaacaacaacaaaaaaacacaaaacaaacaaaaatacttcccaatgtatggcttcatggttgcaagaagtaaaaactaagaagaaatgttcctttccgcaaacctccacacccacaactgccactattaacgttcttaagcctgacccccatcacccgcatctcagatacccacgtgttcacccactgatctcgtctgaagcctggatttgagtaagtgttcacttacgttccggacgggcatgaccggtccggtcagctgggtggccagtttcagttcttcagcctgttggtgaatgagaagagttaagtggggttggccgcactgctgcaaggactccaccctcacctggccccaaactttcccctggggattccgtgttcaggaccagtgtctgagccttttctacaacacactttgtggccccaatgttaagaacagtccttattagttaggtgactatatcttactgagttgacgcaacacgcacgagacagttatctacctgtgaaccacgggcggggcagagaaaactgttccctaatttaactacccggaaacgtatacaatggactctttatcaaccttatcctacaaggtctttctagaaatattttggaatacgaagcattttagggagagcaacgtcaatggaaaaagctgcctccaagtcacacagccttgccatgtccattaaggttatctctgcggaaacgcacaggtgaaccttagcagtcccgcttagctcatcacccacaatgttttggttcttctcaccccagcaagacccagggaccggtgtcactgataaaggagccaagcctcactgtccccgcgcaccaggacggccagagagccgtgtactcacagaactgtctcccttcttgggggccgagggcttcctggggaagaggatgagtttggagcggtactccttcagccgctgcacgttggcctgcagggactccgtggacttgttccgcctcctcggatccacagaaatgccgatggtccgggccaccttcttgtgaatgccggccacctgccccagaaccagagagagatggagacaggcccgggctttctccagccccgaggcctggatgaaaagcctcagcaatcagatggaaaagggttcaaatgtgctttcatcaaggccgtacagcgattccggagaatgtcatcacgcgactgaggccaacagaggggacttcggggccttcctgacaccgcagcgctgccagtactcaccctgagctcctccaggctgaagccgcggccggcgcgcaccttcgtgtggtaccgaaccgtggggcagcgcacgatgggccggatgggacccgacgcggggcgcggggcgatgcggcgcgccttggcttgccgggccttacgtctggtggagagaagcgcagcggcggtcacccttgcctaaggccgccaggccagcgctccgcgacggttgcagacagcgccccccgccctggcatcggccacccgcaagccaaggcgcagccgcgggcacgagccccaggggcagccccgagcgcagggctcacctgcggatcttacgggccggctggttgaaccacgtggccacgcgccgctgccagtccttgtggaagtggggcttcaagaccatgccattccggctgggcgccatggctgcctacggccctgcggctgcggacgagaggggagcgagtgagaggccggaccccgggcgcgcgcacccccccgggcctccgccccgaaccctccagactgggccgtccggccgcgcctagagcccgggcagcggccgaacgctgtctgcgaagaagaaggggcccatccactcccgcgttggctgaagcgccaggccgatggcgctggatgatgcccaaaggccaggacccagtctccctcacctcctgcgcaggaaaacagccgagcggaaaggaagcggccccgcaatgcactctgggatgatagcagggccggccaaccagaagcgccgggcgctctgaccaatcagagccccgaaaggaggaactgacgtcgccgcggctctcccggcagccctagggccgccgtcgcagacatgttgccgctgagaatgcggcggggcggccgtgattcctgggccctgagtaaccgacggccggacttgcttgacgtccgccgttactgccccggcgcttcagccgctgcgcgggccgcggccgagtcctgtcttgcgggctaacgcgcgcgagtccggtatctgggccgacggcgaacgggcgacgcccgaggaattctgtttgttcacatttgtgagacacgtttgcagcgcaaaggcagaaaaacttcagtgacatccgagtttgcgcaacctaaggccttcgtccttgtcgttccagcgtttattctcctcccatccatttagaacatttgtggtttttttttttgttttttttttttggagacggagtctcgctccgtcgcccaggctggagtgcaatggcgcgatctcggctcactgcagcctccgcgtcccaggttcaagcaattctgcctcagcctcccgagtagctgggattacaggcgcccgccgccacaccctgctaatttttggtattttagtagacggagttactgttggcctctgtcgctttcccttggcccaggattaggtgacttctctaaggtcaggggtacccgactgaaaatgtcacactctgacctgctgtgcctactgccttccttcacaaagaaaagcatcaacaaaaagccatctcttctctagtataagtctgtgaaggcaccatccatcttactgctacctggaaacctttaaatcccaataaccctctttcttccctaccctcacccaatcaccacgcttcctcctggtaaaacttattattattttttttttttgagacggagtctccctctgttgcccaggctggagttcagtggtgcgatctctgttcactgcaagttctgcctcccgggttcacgccattctcctgcctctgcctcccaagtagctgggactacaggcgcccaccatcacgcccagctgattttttgtatttttagtacagacggggtttcactgtgttagccaggatggtctcgatctcctgacctcgcgatccgcccgcctgggcctcccaaagtgctgggattacaggcgtgagccaccgtgcctggccaacgtaatccacattttaagaatttcacagttccagcactttgggaggctgaggtgggcggatcagccgaggtcaagagtttgagatcaccctggctaagatggtgaaaccctgtctctactaaaaatacaaaaaagctgggcgtggtggcgcatgcctgtaatcctagctacttaggaggctgagtcaccagaattgcttgaactggggaggcagaggttgcagtgagccaagatcacattactgcactctagcctgggcaacagagcaagactcagtctcaaaaagaaaaaaaagtatttcacaggccaggcacggtggctcatgcctgtaaatcccagcactttgggaggccgaggcgggtggatcacctgaggtcaggagttggagaccggcctagccaacatggcaaaatcccgcctctactaaaaatacaaaaattagccatgtgtggttgtgtacacctgtaatcctagctactccagagagtaggacaggggaatcacttgaacccaggaggcagaggttacagtgagtcgagactgcaccactgcactccagcctgggtgacagagttaagcctccgtctcaaaaatgaaaaatttaagagctgggcgtgctggctcacacctgtaatcccagcattttgggagcccaaggcaggcagatcacgaggtcaggagatcgagaccatcctggctaacatggtgaaaccccgactctacta

SEQ ID NO: 1243312 - DNA, 4001 bp, Homo sapiens
tcatcttttattgaaatgaaggcaaccacacaacacacacacacacacacacagacactcctacctcccacagacggttgagacttcgcttcctactcacccacacctatcatttcagcaagagctagagcctcaggcacccaacttctgtggtcccagcagcccttggacggcccagccaagggcggtgctcaccagtccttgtagaatcggcgccggcactcatcactgaggtgttctgcaaagatggtcttgaagctccggagacctcgaggggtggccacgtagcccaccacgcccaccaccactaggggcggcgtttctacaattgtcaccgcctccacctcctcccgtttggaaatttctggatgagacacagggatggggcatgaagggggacctcctgaggcctgtgggggagggagtggagagccgcccacataggggcaggacaggagagtgtggggccagccaggacagcattccccagagggtggggctgagcccaaatgagcatttgttattctaatgattacaatggatttctttttctgtttttgagacagggtctcactctgtcacccaggctgcaatgcagtggtgcaatcatagctcactgcagccttgacttcccaagctcaagtgatcctcccacctcagcctcccaagtagctgcgactacaggcactcgccacaacgcccagctaatttttgtattttttgtagagatagggtttcacgatgccgtccaggttggtctgcaactcctggcctcaaatgatcctcctgcctcggcctcccaaagtgctgggattacaggcgtgagccaccatgcccggcctgcattatttcttacaactacttgtgaatctacgattaaaacaacaaaaactaactatatacataggcgtacatatgaaataatggtacatgaaatagacccgaaatggccaaaaagtgcagatgtcctggcaggtggtttgaaccgagggcttggggcgctggcctttgaatcctagctcctgcgcttaccgccccggtgactggaccaggttcctcactgctttgtgcctcaatgtcctcatctgcgagctggggccatgacagaacccgcccggaagccctgcctgtgctcagcgtccaccccaattcccgggggcgaggcctggtgctccctgggactgtggccctgtctggaccaaaagcgtgagttctggctccgagcatctggaaggttcagccctccccctcccccaagggtcccaactgtgactcactgagccccggccggtgcacctcccgcagggtgtgggtcatgcccgccttgtagcccaggaaggccgtgaggtgcacgggctggctggggtcatcccgcggccacgtcttcaccttgccccggtgccggtggctcctcttatggggcaggaagcccaggtgtccgtgccgaggggcggaaaacttccggtgggactggggggcaggaaggaaggaggtcagacctggggtgtccctggtggtagagctggatggtcccagaacccatacctggagaaatggactacaggcttcagactgaggcctgtgctcagcacctcccctgtctgcctacaggaggggagaggaaggttcaccaaggggcagcgtctttgggatggggtctccatagccacaggcttcctgcctctgtgggctcagcctggggcccaggagggtcgcacccatactgcagccaagggctcctggggcaggtggccgctgccatctgttcatctccagggccctcccaggcccaggagcccagccctcgtccccttgtttccccctccagcctcccatcccctcacaggctgggagactgtccctctgagggagcatccagaagcccagctgtcccacccccccagagttccagctccaaccccagcccaccctcaccctggtcccaccaaccatggtggccgatccctgaaggtcaggaaggggcctcgccgctagccgccagaggtcgagtggcagggccaggactcacagctgccagttcccagattagcccctggcacagtcagcagggtctccggtgccaggagcaggcaggggcggggcagtgttgggggcatcagatagacagcctgagtggggcacccggagccagggctggcactcctttcctcgatggccctggggctgggtcatgaccctcccaggacaggactggccaggcaaggtgggggccaaggtagccggtgggggccttctcccaggcagcggccaagaggaggggtctggagcagtttgccgacttggaggcagagggggttcctgtcctgagggctgggagacagctggataaacagcggggagcagggctggggacagggcagacgagggggagggctgactgcaccttgaggatcaccagagctgtgcttccagattgagatccctggctgagtgcagtggctcatgcctgtaatcccagcactttgggaggctgaggcaggaggatcacttgagcccaggatgtcaggccgcagtgaaccttgactgcactccagcctgcgtgactgagcgagacactgtcttaaaaacaaaaaaaaagccagcctggccaacatggtgaaaccccatctctactaaaaatataaaaattagccgggcgtggtggtgtgggcctgttaattccagctacttgggaggctgaggcaggagaatcacttgaacctgggaggcagaggttgcaggttgcagtgaggcgagatcgcgccgctgcactccagcctgggcaatagggtaagactccgtctcaaaaaaaaaaaaaaaatcaagatctgactcctgtcattcacaatcattgaaatacttttatgaatttatcttttttatttttttgagatggagtcgctctgttgcccaggctggagtgcagaggcgtgatctcggctcactgcaagctccccctcccgggttcacaccattctcctgcctcagcctcccaagtagctgggactacaggcgcctgccaccacacccggctacctttttgtatttttggtagagacgaggtttcactgtgttagccaggatgttctcgatctcctgaccttgtgatctgcctacctcagcctcccaaagtgctgggattacaggcatgagccaccgcgcctggccttatttaaagagacaatgtctcattccatggctcaggctggaatgcagcggtgtgatcatacctcacttgcagcctcaaccttttgggcttaagtggtccttctgcctcagcaggacctaatttttaaatgtgtcttgttgtagaggcgggcgtctcaccatgttgcctaggctggtctgaaactcctggcctcaagtgattctcctgcctcagcctctcaaagtgctgagattacaggtataagccacagcacctggccaaatttaaattttgaatttaagttttgaatgaagagggggttgaaatcttatttttttttctttttttttttttttttttgagacagggtttctctctggtgcccaggctaaaatgtagtggcacagtaatagctcactgcagcctcagtctcctgggttcaagcaatcctcctgccttcatccccctgagtagctgagaccacaggcacttaccaccatgcctcactaatttttgtattgtttatagagatggggatctcattatgttgcccaggctggtctcgaactcctgagctcaagcaatctgcctgccttggcctcctagagtgctaggattacagatgtgagccactgcgcccctcaaaatctttttcaattcaaagattctatggttgtaaagttttgttttttttgtttttgttttgagatggagtctcattctgttgcccaggctggagttcagtggcacaatctcggctcactgtaacctctgcttcctgggttcaagctatcctcctgcctcagccccactagtaactgggattacaggtgtgtgccaccatgcccagctg

SEQ ID NO: 1243313 - DNA, 4001 bp, Homo sapiens
ccaaaacaatccaccttgcaattctgaaagaaactattttccccttgacccttccttcactgcttcccattcccaaagactactttgtgccaaagaagtgcaataatccaatctttcctctcaaagagctctgagaagatctcaagagtcctttctttcttttttttttttttgagatggagtcttgcactgtcgcccaggctggagtgcagtggccgatctcggctcactgcaacctccacctgctgggttcaaacaattctccctgcctcagcctccaaagagctgggactacaggcgcctgccaccacgaccggctgatttttgtttttgttttttgtttttttagtagagacggggttttgccatgttggccaggctggtctcgaaatgagctcaggagtcctttcaatgacttagattcatttagctcccaaacacctagcagagctcctttttccagcagtcctactctaagtgactcttcagcagtttcagactatcccctcctccacagcccacaggtcaattgcattcgttctcaggtatgacagacatactttggtcccccataattaatttctacaggactgatttcttagagagtctcacatgaaaacataaaacacagcggcagcagacttaccatgcttcatcatcacagtgagaaaccggacgatgactttggagcacggcctaataagcacctggcgtttgcctctcttttcggcattgttgatactcttgagagcatctgccaggacattcatgcgcaccattgtggctgttcaaggaagacaaaacaggaggttttactggcattgccaacatcaacagacaccaaccattacactgcggaagtatcctttcctttctggccccaccttggcgaagttttctcaagtctaagcaggctgcttctccatttcccaccacccaggaaaattcctatttactacggttgttgaaaacaggttatcgggacgtcagcctgcacattttgaaactcattcattcactaaccactcttcttcgaatcgtgccacacaccaacgtctggagataataaaatgtgggacaaaatccacttgacacaagacaacgtgagaactggcagaaactgccagctaccggaaggaaaacatcgggtatagtcgatcagtgattcagaacagaagcagagtatcatcggcaacattttccaaattgctgaaaatcagcagattccatactattaacattgtactttaaatcagttcactctcacctacaatgaacacatctaactattaaacatccatcttcgtgccatttaaaattgcgtccaacagcaagagccacagtggcaaacagaaacattttacatgcttgtcagactggactctcttctaatgggcaagaaccgcacactacactgaagttttgaaagaccaaagtgccaatagtaaagagtagaacttaaattccttaagttcaaaagtgtctaaagaaaaactctgcggcccagaagatccaagttggcacccagcaaactgccaaccccggcacgatgcagcttttacctgctgggtggcctcagcctcccaagctcccagcgcggccgcagcagtgagaagctgcacggcccaccagccccgatgttgcccgccgcccggggccaaggcgctgcctcagcactaaagggagatccagacgctgcggcccgaaccggagctaccgcctagctgggcagtcgaaggctccggctcccgcccgcgctgcggcctgcaccccacggaccgggatcccctgagtgcacagtctggggcgcccagccatggctctcctctatgcctgtccaggaaccggcaaggccaggatcctcggccaaggtggggaccagcctcctcgcaggacaccgagaccgaaccttagattgcaggatggcgccgatggcagacggatgaaattggagctctcagagagtgctactcaccggcgcggaaagatggcggaaagaggacgggaggggagagcgcacggagttatgggaagcgggagagctatcgcgagactttcaaaggcccggcaaaaacaaggaccgcctaggagaaggacgagggtgagggaaaggcggagcctcctcaggggttggcagttgagagtcgatggaatcgacctcccccggtggggcctgggagaggcaaggtgagccgttcgttggaggttcgtctacattttttttttttttttgagacagtttcgctcttgtagcccagactggagtgcagtggcgtgatctcggctcactgcaacctgcgcctcccgggttcaagtgattctcctgcctcagcctcctgagtagctggaactacagagatgcgccaccacgcccggctaatttttgtatttttagtagagacgaggtttccccaagttggcgaagatgttcttgatctcctgaccttgcgatccgcccgcctcggcctccgaaagtgctgggattacaggcgggagccaccgcgcgggccttaatttttattttagtttacttttgataaggagtctcgctctgtcgcccaggctggagtccagtggcgcgatcttggcgcactgcagcctccgcctcccgggttcaagcggttctcctgccccagcctccagagtacctgggattacaggcgcccgccatcacacccggctaatttttgtatttttagtagagacggggtttcaccatgttggccaggctcgtctcaaacccctgacatcaagtgatctgcccacctcggcctcccaaagtgttgggattacaggcgtgagccaccacacccggctaaaaatttttttttaattaaaaagttaagttcagacaaaagtcacccaacagttgtttactgagcacccatgtaccagacgctagcaaggccctggggtacgaggtgcccacacaggcaccatttagccagttctgtccctgccggttcttccagcttcgtcctctctcacacgtcaatgcccctgctcattcgttgcatttcctcttccctctagcatggtacctggatatttgctaaataaaacttaaaccttttatttttgttcttttttaaaatttttcctagacagggtcctgctctgttgcccaggctagagtgcaggggtacactcagctcaatgcaacctcaaactcatggactccagtgaacctcctgcccaggtctcccaaagtggtgggattacaggtagggtaccttatagacatctaaggaccacacagggtacttcattaatcagattcataaatccaatcataaatattatattggctaagttataaagaaagtgagacatgaagattccagctttttttattttttccccttttacacaaaacaaagtagaagaaataatacaggattaaaactgcaaaagtagttaatcagtagaatatgtatgcacacaaaaaatccagataggaagacaggcttatttacaatgaaagtaaggtaaaattaacgtagttttcttatgaaataataaaaaaaaatcaaacatatgctacaatgggcaccactgttcacagcaatattaaagaggagaaaacaacacttatttaatagggacagatataccacaaggtacaacatcagtgcaataaattcacaaaactatattacagctagttaatcagtttaagaattgttcccgtcagtcacattttttggccctcagaagttcattcctaaagatttcaactactctaaatttctagctaccaagaagttaagaatgattataagaagctttccaaggagttatgaaatctttgtagaccagaggccaactatcatcacctcaagtctgctctcaccaacagcccttgtatttttcagggagaaatctctaggaaaaaagtcagacaccagtgtagtcactatctcccatgtcaaacctaggggactaaaatggtcagtattaccataaaatgataattttgaggtttaccttaaaaggcttat

SEQ ID NO: 1243314 - DNA, 4001 bp, Homo sapiens
ccacggatggcggtggccacctccttggagcacttaacacccagaccgacgtggccattgtagtccccgatagcaacaaatgcctgcgaaaagatgtgtgtgaggcagctggtggccctacacccaatcactgcccaccgcccagggcctgttgcacccctcaaggaaagagaggccacagtaaggcccatccgaggtcctgaggagatcttttctctctctccccgttacgaaagtcacacgggtgaagccaagtgcaactatgcagagccgagagagtcccggcaagcccagcgcagccccctccaggacagccgggtaccttgaacctggtgcgctggccggcacgggtctgcttctgcactggcataatcttcaaaacctcatccttgagagaggcccccaggaagaaatcaatgatctctgattcctgaaacaaacaagaaaattgtagggagagcattaaaaaaaaacttaataccattatgatattcaagaaccaaagtcacggccgggggcggtggctcaagcctgtaatcccagcactttgggagactgaggtgggcggatcacaaggtcaggagtccgataccagcctggccacatggtgaaaccccacctctattaaagacacaaaaaattagccgggcatggtggagtgcgcctgtaaccccagctattcaggaggctgaggcaggagaatcgcttgaacctgggaggtggaggttgcagtgagccgagatcacgccagcctaggcgatagggcgaaactgtgtaaccgcccaccccgcccaaaaaaaaccgaagaagtcatgaaccccctcacctggcttccccccgatctgtccccttcgtttcgtttttggaagcttgtatgtaaggttaccctatttctgcatctcaatcgtttcttcctatttgccctttttctcttgtttggtgagatgtggctttccactcagatttccttttgctttgtccagctttggcctagccatgaccaccgtaccttgctagggcgaacgctcacatgacaaatatgccattagcctttccccactgcacccgctggatgcagatgacagctgtcccgtacacgcggactatgacagtttgctaacccttacagtgtcctcccacaacctgaacttcatcatcctctcggatggcatgaaccaagcgctgcttctctttcagttctttcgaaatgaattcgctgcgaatgtgggaagatgcgctgaaatgccttttgtggctctggcttcgctcaggtatccatccaacctctaagtggaatcctctcctcagccagcccgcaacacaacctcaacctctcacgcgagacgctgggccctttaatgcgagtcaatggcagatgctaatcctccaaccccagcccaaatgactccggggtcgcacttgctcaacgccccaacgaccgacgcgtaccttaataggcagggagaagagatagatctcctccagggacttgatcttcatgtccttgaccaagcggcccaacttggtgacgggcatccactaaagggagaaaaggcgccagtgaccaggaccgctctccggcgccgcccaggggcccgaccccgagcgtggctgatacctacctccttatcctcggccttgcctccgcgagctccgcggcctcggccccggccccgtccacggccgcgaccccggccccggatgccactgccgaaacctccgcggaagccaccgcggttccccatcccagggccaccagggcccccgggcccccccgctgcaccggcgtcatccgccatttgctgggaaaagcgacaagaaggaactagtcagtgtggcctacgcatctggcagccccccgcgagacccagacaagggctcccgcccaggagcgcggactcgggagcctagacccgacccgatgtccgcggattcccgccgcccacgcagaggcccgctgcagcgaccaacaggactcacgtgttttgtcggaaaagaagaacgagacctactgggaagcagcttttatagcacgccaagcgccgcgagatctccgcagccccgccccaagcgggagcgggccgagctcctataagacaacctgtgattggctccgcggtgccccgccctcaccgggctctgagtgctcttgcccgtccggccccagccgcggcccgggaatctacgtcacccgaaaagcgactataaacgccggcgcctccgtccccagccgcggctcgggaatccacccgaagagtggctataaacgtccgcgcctccattgcgctctcctcttcacttaggtaggtcctgccgcgttgaccactggcgtctcgctggtggtcttcgagaccggcgttggttgaaaatcgcccccggctttggccgtggccgcgggtgagattcggcgcccagagcccccgggggcctcagctcaccgcgcgctgccccatgtgcggcggtgaaacccaggccccgacaggcgctgccgcctcccccccgggtgcggtcgctcgcgaggtctggcccctgactcctgaccccgactgcagacccctaaccttgttctttctccgcaggacactggtcctcccacgcctgacaccgacgtcgccaggaccgcggggttgggggaacttggctgtcccacgtctttcaaataaagctgttttgtctaactcactgcatgcgggtgttcttggggccccgactcgcctatcagcctggcggcaagtgcatatgttcacgctgtggcggggagaaccctagcgagatgcctcctcttctttcctggctttggacacaagggtaggatatgggaggttggcaggtgatgtgtaaggtccgacgcctcttaagtggaggagccagactacgaacagtcttgtggccatgcgcatctcaagtgaactacactggcaggtaaaatgccttggtccaaagggctccaggtggagccagcagagcactagcaaggatgggaagctcagaggcttccagtggcttccttgtgagaccaggtgagattctaaaggatttgaccaactaggcctagatgaactcagcgcccccgtggtgctaggctggagtggatcagacacctggtttgggaggctgggccccctgctctggggcggcaggttacccgggagtttagttgtcactgccgtggagctagcacctgagtatcagatcctaagtgaagacccccagtgagtcaatgcctaaaacccctaagccttaggatctccagccacctgggccgcagtattggagagaagagggtggcaatccctgtgatcccactgaagccctggcctgggggagacagctccatgaagcttggttctgacccagtgcttctggggaaacgctgtcagccactctcaagccccaggcgcttcatagacctatctcaggtcaagagctgctctcttttatttttattttattttatttatttttttgagacggagtctcgctgtcacccaggctggagtgcagtgacaccatctcagcttactacaacttccgcctcccgggttcaagcaattctgcctcagcctcccaagtagctgggactacaagcaactgccaccacacttggctaattttcttgtatttttagtagcgatggggtttcaccatgttggccaggctggttcgaactcctgaccttaagtgatctgcctgcctcggcctcccaaagtgttaggcttacaggcatgagccactgcagctagccgtatggctttttttttttttaagaggtggggtctcactgagttgcccaggctggtctcctgggctcaagtgatcctcctgccttggcctcccaaactgctgggattacaggtgtgagccaccgcgcctggctacctgtgatccttcagagaagggggcaagggctgggctgtacggggtctctgggtcctgaaccagggttgtgactggcttgagctggacaatgctattgtgatgtcagcccacacccactgtga

SEQ ID NO: 1243315 - DNA, 4001 bp, Homo sapiens
gatgagggcggtgccggatcaagctgggagcggggccgatccacacctatctccctgaccaggacccacctcccgtcatgaccccgctgcagtcttgaagcagcctcttggggtggaactctccctgtcccctgccatgagtgaggatgacagtatttaggacagaagattgtgttcaggtcaccactggtgaggacagggccagggtggtgctcggtcctggagaatctaggccagccagacccccaaggaatcagtcaggagccagcagggaccctgtgtcaggtgagaagctgagaggctgcagggcgtggagttaagaacgcaggagtgcttgttgccagctctgccctgatgctcagggtggcccaacataagcttcgtggccctgtgcctcagtttcccttctgtcaccaccaggacaccgcccaccccagacacacccgtgagcggcttcagcagcactttggagacaggatcgcctgcgtacagcccgtgttccagaaccacgagatctgtgaggcttggctttgggttctcacaacctggggcgcagaaggcaggtgtgaggttagtgggactgacccggggcccaggcccaccccaacgcacgatgcccgcccggtgggtccctgcctgcccaggcccaccccaacccacgatgcccgcccggtgggtccctgcctgccacaccctgcgagccctcgatgcacatggtgtgggcccggccctccgtgctgttcctgccaatggcatggctgatggttacccggctctcctggatgtgcccccgcagctgcaggagagggagaatcgcacgcagttcacggggcagcccagtgctgccggggagcccacctaacaccaagcaaccacgtagagcgtggtgggaggctctgagccagggctgcccaagtggggtgggaatcctgagtccccacgccccaccccaggactgaccaggtcttaccaatgccaggtaagccttggtcacgcgccgctccttgaagcacctgtacgcgctgccggcggctgccttgtttagggccacgcacagcgccccgctggtggagaaatccagctggtggcagaacctggagtgggacagagtccagagtctgagccactttcctccacagacgccaccgtggggctccggccgccccccctacctgaacccgtagcaggtgtcagggtcggccagctcgggaaagcggtaccgcagctgcttctgcagggtcagagtctcccgccacgccttgctgtcaatgcgaacgtcccagtgcttgttgaccaccaggaagtcgcggctccggtacacgatggacaggttctccacgctgcctggctccatggccggcctgccgagccacgcgtgggtgcgtgtgctgtgagcacgtggtgcgcccccagcccagcatacagaggtacccgcaccgccccacccgggctccggtgcgaagccaccgagccgggtccgcagccctactgtgcacctgcatcctcagtccccgagatcagtccccagggcgtcagctggggagtcaaggagtcagcctgctccgggctgacctgaagggccctgcctgacctaagcctggagaaagagcccgttccaaacctgccccacagatcctccccacagaccctcccctccaggggatgcacgtgaatgcctctgcccgacggtgggggcggggaggggctgcagcactaccaggcccggcagccaggtctgcccgcagcgcgggttagggctggggcctcctcgctccccgcagtccgcgcagacccgcgccccgcacaggcccggtgggcaggccgaccctggctccgagcccctcccgcgcccacgcccacgccaagaccaacctgctgccgggccgtgcagtccaggcccccgatgccgtgcccggcgccggctccagccgcgcgcccgcgcgctggcgacccagagaccctggaagctccgctccggacgcctggcagcgcttccgccctgcaccgctgcgcgcgcagccccgcccccccccccggcccgcccccggcccgcccccgccgcggaagggcggctgcggcggccaatggcgagctccccaggacaggacgcgggggctgcggagcaggaactcgccccgcccacccctcgcgcagccccgcctccgccacgccaaccaatggcgcgcgccgccgggcacgccggctgctgattggcggcgcccggcacgctcggggcgggcagtgcgcgacggcggcggcggcgcgggaggttcggagcgggagctcgggctcgcggacggtatggaggactacgagcaggagctgtgcggcgtcgaggatgatttccacaaccagttcgcggccgagctggaggtgctggcagagctggaaggtggggcgcggcccccggccgttggggaggagctgcgaaagccgggacagtggcgacctcggggagggcgtgccgggggccgaaggggcctccacgtcgccgctggcgggatctgctgtctcggggcggccgctgacaatctcctctcccagcaggggcgtcgactccgtcgccctccggggtccccctgttcaccgcgggccgacccccgcggacgttcgaggaggcccttgccagaggggacgcggcctccagtcccgccccagccgcatctgtgggcagcagccagggcggcgccaggaagaggcaggtggacgccgacctgcagccggccgggtccctgccccacggtaggttggcggcattgccccagggcctccggagtgggcgcgaggctgaggaggcctctggttccctgcatgtgtctcccccagcccccaggatcaaacggcctaggctgcaggtggtcaagaggctgaacttcagatcggaggagatggaggagccgccccctcccgactcctcgccgacggacatcaccccgccgccgagccctgaggacctcgcagagctttggggccacgggtgtgtggcttggacatgggcgtcccatcccatctgtccagtgggactcagatggagcccatcccgtgccctggatgaggcctggggggtggggagggttccatggctgagagcagtctcggacacccatatccaagggtgaccccacgcttgagtttctgccactgagccccggtctctctccagagtctcagaagctgctgccgacgtgggtctcacacgggcctcaccagctgcccgcaatcccgtcctgaggcggccccccatcttggaggactacgtccacgtgacatccacggagggcgtccgggcttatctggtgctgcgtgctgaccccatggccccgggggtgcaggtgcgtggctgtggccttcctgcacggtgggtgggccagtgctgctcaggaaagggtccttggagcccctcacccctgccatttgcttaaagcgggtcctgtgcagagccccaggggtgcagagggggaggctgcgtcatggggcgtagacttagaggacacagcctccccacagcaggttgctgtccagcctgtttgtatggcctcgggtggagagggcctccttgcttcccctcctgcttttgccctttcctcctttctcctaaagctgcccccaatttccctttgcagctgacccatctggatggcttcattcctttggcacccctgtccagtctcccacccctcactggccagcttactggggttgtcccacccgggtccctgagcactgatgggggctgacgtgaatcctgtgacctaggaggggcccagaggcaattgtcctcccttccccacagggctctctcctccacgtcccatggcgaggcggtggccagctggacctgctgggtgtgtccttagcctccctgaagaagcaggtcgacggcgaggtaggggctgcgggtttgctggggggcggtggcggggccgcctgagccctcctgattccagcctgttgtttgcacagcggcgggagcggctgcttcaggaggcccagaagctttc

SEQ ID NO: 1243316 - DNA, 4001 bp, Homo sapiens
agcgcaccaggtcgctcttgttgcccacgaggatgatgggcacatcatctgtttgccgtgcacgccgcagctggacccgcagttctgaggccttctcgaagctgcccttgtccgtcactgagtacacaatgacataggcatcccccatggccatgcagtggccgggcaaccagcggcccccgtcctggagaacacacaacacacatctgcccaacagtcctcatgcccccgacacgagcctggcactcccagacctctaacccaactcactcctccctcccctgccctgggtctctgcttgcaccctacctgctcccaaatgtcgtagaccatgagtgatgcctcttctccgtccactacaatggagcgatcataggtgtgccctaggcagaaggccagtagacaggttaccagctggttgtcaaagccgctgctgccaggtttcctgttctggccacaccctccaactcttccccagagccctccttaccctccactccacttgcagatgctggtatgtggcaacagcagtgccaggcagggaagtgggggctggagggcatggtgtgcctgacctccacccacatgccccccctggggaccttggccacctagggctcctctcttagaaatccctctggttagaaactctgacctgtccctgataggcagggagggatgtccagtcccatcccacagagtagccatatctatgccctggccttctactctgggcatttcttccctaccaaaggctggggggtgtcccttctcctttcctttccccatttatgaagtgggtaggtagaggcatgattctgaaagcgccaatagaattccacagtattggccaggtgcggtggctcacgcctgtaatcccagcactttgggaagccaaggtgggcggatcacgaggtcagaaattccagaccagcctggccaacatggtgaaaccccaactctactaaaaacacaaatattagccgggcgtggtagcaggcgcctgtaatcctagctactctggaggctgaggcaggagaatcccttgaaacctgaaggcggaggttgcagtgagcctagatcgaggccactgcactccagcctgggaaaaagagcgaaactctgtctcaaaataataataaaataataataataataataataacaacaacaacaactataattccacggtatttgcggctttgagtaccggtctcagcccctagtcctagccccgggatcgcccctcccctgaacagctgggtcccctcacctgctgcctctgcttcaggcccgtcctccacaccgccgaagatgcgcgccagggcgctcttgcccacgccgggcgcccccagcagcagcaccttgtaaacgctctcgtctgagtcgctgccccctgagctgagcgagtcctcggagtcctcgggccagtccagcctgggaccctgggtccccgtcccggccgcggccgccgtcagggcacccggggtcagcgccgcctgcaggtcgcgctcgtccaccggcatgctgcggcggtgcagcggcggggcggggccccagggtgtgctgccccgacggcgctcgcgctcctggcccccaccgcggctcccgcccgctccgctgccgccgccgttcagggtcatcgcgtccgggaccgtctaggggatcaggaacccgagtggccgtgtaagccgcgagggaggcgggacccggggcgcacctgcccaacccggagtcaggcgggatgctccggccgaggtcccgccgcagccctcccccagcccccaggtcgcggcgccctcacccgggacccctccggacctggcgcatccatctgcagccgccccgaccccgctccgccaggacactcacccactcgcacacagacacgctcaggactaggatccggattaggaggccacgcactcgtagtccggactcggactttagggtttccgccgccgctgctgctgcagccaccgccttctcagcccgcactgggctctggctccagagccgcctatttaagcctccacccgcccccgctcccgcccccggtccacgctgctgcgggggctgacgtgtctgtccacccccaccaggggaatcccccaccctcttcctcggaccttacatccccgacaccccgccctacccgccaggggagtagcggtagctgtctgggaatagaggggctgaccggtaggcgaggtccggagctgagggtgtgtgtgagaaggagagagagagcgaggttgcggggggagtacgtgatggggaggcaggcagcggggtaaacccaatcagccaaaagcagcaactgccctctggagaagaattcggtctggccccgtgagactgaattctccctttcctctccccaagtcccggctcgtccttttagcaagtaagctagttacaggctggacagagatcccccttctctgcccatgacacccactccccataggctcaggtctgagctagaatttagggggtgtcctaaattcacacaaaatcctttccactccccatcctggagttgaagattctccctaatgagcctaaccttcagtgtgagggttggtgtcaccccatgagcccctgggggccctgagagggctgttgggggtgggggcagctctgacagagttgcaggtggagatgcctgcttgaaccctggggaggataccccagcccagaagagggaagggattaaactcagtccccatcccacctcccagcacccaccaggcagctgccagcaactctgctaaaaataaataatctgccccagccctggccctggccgtggctctggttattctgctcctggactggaagttgcccagagttggggaaatccaggccaatgggtgttgaatgccagcaggagccagccacttcgagtcgtcaaggtctcccttcttccctctagctgtaggctgagccagccacccagggcacatccagggcctggaggttcaggcccccacccaaaaggggcataaacacagggtgtggtcaaggcatgaggagtgtcttagctccctgctcatctctcaggggtctgagggttgcaggtcaggctgtgaggtattttgtgacagggacctgctatcagactgtgacatctgattgtgacaagtgtggtgggggtgggagggcatccatttggggctcaggtgacatcacagatggatggaccctggtgggctgtggtaggttgtcatggagacctgggccaggctctttggctgctgcatcagtttccttggcaacgcctaagaaggccttggattgaggagggcctggctcggtaagattagggccctcttgtccttgaggtcttcaaagtaggcaaaagctgggctgaggggtggcctgcccatggtcctaggggatcttggaggcctgagcatccccatgctggttctggcttcctgaacgaactccagtgggaagaggaagttatgggcagagcctcccgttagcaggcaagtctaaagagccaccacacacttcccatgaggaatcctggctgggctgcctgtgccccctccaaccccatgactgtgccactggaaagagcctcctctgggtgtctggcagagggcgagggtggggggtagctgtggcccttcccagcagggggccatgcaaagaaggagggctgggtttcccctctggcaatctgagctcttgacctcagcagtgtttcttcattgccaagggaactgcaaccacaaagggccactcaagccccaggcattccagtggctgctccaacaggccagagacactcaccacaagctagatatggccaggggccccagggattaacaccaggacacaaccttgagacacccccactcccaccacctggttctcccagctctctgggctgagcatggctgcccaggaggaataaactgaggctagaaccactcctaggtccgcccgggcttcagatcccagctgtgctccttgctagctgtttc

SEQ ID NO: 1243317 - DNA, 4001 bp, Homo sapiens
aaaaaaggacactattactctaattttgcactgacggcatcatgctattattaaatatttgatttcaactggtatcttaattaatcttgctatttctattggtctttagtataacagcaatagttgtattctgacctaaccaaaagcaaacctcacacattatctccccttacctttttgtacttcagcaagacttctgtcacagttccaccaaaccgaacagtttttcttgggggagaattgaaaaagtcattctctaatgcacgcatatttgaaatcctgtggaaccaagattaacaagctattaagttcatgaaaataataaaaattataatagccaacatttattgaaccaacataattcagtggaactattgttaaggcctctttactggtctccctgcttccactcttaaccaacaatccttcctttgctcagcaaccaataactgtcttcccactgcacttacagtaaaaatccaaatctctcagtgtggtctttaagatcctacattaatctggcccctgcctacctctctcacctcatctccaacaacttgttttactacagccataacgtcttttctgctcttcaaacaagccaagctgtttttcatttcacttactgttcactctattggaaatactcttttcccaaatctctacgtggctggatttttttttttgagatggagtcttgctctgctgcccaggctggagtgcagtggtgtgatcttggcttaactgcaacctccatctcccgggttcaagcaattatcctgcctcagcctcctgagtagctgggattacaggcacctgccaccatgcccggctgatttttgtattttcagtagagacgaggtttcgcacgttggccaggctggtctccaactcctgacttcagatgatccgcccgcctcggcctcccaaagtgctgggattacaggcgtgagcaaccgcgcccggcctagatttttgtcttcattcaagtggaagctcaaatgacagatgtcttcccaatgagaaatctcaaaagctccttctctcccttctccctcccccattaccttgttgtataactgaaatcatcgtgttcgtttatttattggcctatgtactgcctttcccccctatgctgtaagctctgtagaaagcagggacattagtgtctttggataaaccactgtccccagtgtttaacacagtaagcaggagctcgataattattatgaatcatattacgctaattgttttacaaggtttgcttcacttacacgtagtaaattaatgaaaaaacatagcatcctaatgactctgaaagttaaacgccaagagtgctacgggggttagggattttaaaagtggagcaaaataaagactgcgaaacaaatacgtgtgtcgaaacaaattccaaacaaaaaagatgtaatattcaatttgccatgagtgacgacgttcggctgataacccacatagcccagggaaatcccttccaaatttggacgaagaagagggaaggaagaggggtcaaggcgcagaaggcagtacccaggcctgggaaatcacgaagagacacagtcgggaaagggggcctccagaacagagaacatagtcacttttccaggccccacccatgtctattacccagttaggaggaatgagctcatttctgtgaacgtgagatgaccctccaccccgtgctcctatcacacgccatgagctttgtcccacatcctttcaatccgctcctctaagcgccgtcctgagctttcgtcccagatacgcagaaggaagcggcctgaatcttacccagtcctcgacgcgcccagcttcttaactgcagaggacgaagcggccgcatctcccggcaaacgcgtgtgaagcagcggtgccgccattgggccgaactaacgcgaccgctgcgcctcaggccggatgcccagctccttccagccacagcctctgtcccggaagttgcgcgtgccagcgcaaccttcagccaatcagcggccccgcgtggggagggcgtatgctctcggcgggctagagcgccgctgaaacccgctcctcgttctacttggaggacttgttccagccagcgctagtgcgtgagtataaggagagacgggaaggaccggctccatccagccctgaggatcccgaagaaagggtggaaacaccctggatgtgctaagctgtggccgggtacactcaagtgttaattttttggagtcaaagcctccctcagtcaaatcgaagaaactgaagcacttgtgactgacccagatcttcacggaggaaaggggattcgaacccggctgacccaggagcctgggctctatactcagtgcagcagtctcacagacacccaagataacgttatcctcacggaaacgagctcgacgaagtgacctacctcagagcctcaaggctatggtgatgctggcatgagaaacaacaggagagttacgaagaggtgttacccccttgactttatttatttatttatttattttcttttgaggccgagtcttgcccttttgcccaggtggagtgcagtggtgtgatctcagctcactgcaacctccgcctccccagttccagcaattctcgtgcctcagcctcccaagtagctgggattacaggcgcatgccaccacacccggctaattttcgtatttttagtggagacggggttgcactgtgttggccaggctggtctcgaactcatgacctcaggtcatccgcccgcctcggcctcccaaagtgctgggattacaagcatgagccaccacgcccggccaaacttaaatttttaaaagaggaacaggagtcagccagaccaacaaaagagccactggcgttccaagcataggaaacggaggaaacagaggccaaaacctcgggactgtggaggatgtagagggagagcaggggctgcccctactctcagggaggggaaaaggttgcaactttggaaactgtacaggcctatcaaaaatacaaaaatatccagcctgggtgacacggtgaaactccatctctacaaaaaatttaaaaaataaaaataataaaaattatctgggtgtggtggcacacacctgtagtcccagctactcgggaggctgaggattgcttgagcctgggagatagcaccactgcactcctgcttgggcaacagagtgagaccctgtctcgaaataaataaataagtttttaaaaatgcatatgtatgggcccggcgcagtggctcacgcctgttatcccaacactttgggaggccgaggcaagtggatcacctgaggccagaagtttgagaccagcctggccaacatgacaaaaccctgtctctactaaaaatacaaaattagccaggcatggtggcagtgcctgtaatcccagctacttgggaggccgaggcaggagaatagtttgaacccaggaggcagaggttgcagtgagccaagatcgtgccattgcactccagcctgggtgacgagtgaaactgtgtctcaaaaaaaaaaaaggtgtgtgtgtgtgtgtgtgtgtgtgtgtgtgtttatatgtatctctctccaggagttcaagaccagcctgggcaacatatggtggtgcatacctgtagtcccagctacttgaaaactgaggacggaggatcacttgagccctggaggtcaaggctgcagtgagctgtgattgtacccctgcactccagcctggacaacacagcaagaccctatttcacaacataaaatacagcaatttggtttttttgttttttgttttttttttgagacagagtctcgctctgtcacccaggctggagtacagtgtcatgatcttggctcactgcatcctctgcttcccaggttcaagcgattcttgtgcctcagcctccccagtagctaggattacaggcatgcgccaccatgcccagctaatttttgtatttttagtagagacagggtttcaccatgttggccaggctggtctcaaactctt

SEQ ID NO: 1243318 - DNA, 4001 bp, Homo sapiens
attcactgcagtttttaatagtctctgtacaaaggaataaattgtagccccaaagaatttttgcttgacatggaaagataacagtttctaataaaaaaataaaataaaataaagctgtttaacttattccacctttattctttcgaacaccacgttttcgattcaacagacctgattacgttagctgtccaccaagctctaagaaaactggtgaaatttctagaaaattttagcacatctgaatttctacggttcttttattttttattattttttatttttttgagacagagtcttgctctgtcgcctaggctggagtgcaatggagacatctccgctcactgccactctcctgcctcagcctcccgagtagctgagattacaggcacccgccatcatgcctggctaatttttgtatttttggagagacagggttttaccatgttggccaggctggttttgaactcccgacctcaggtgatccgtccacctcggcctcccaaagtgctgggattacaggtgtgagccaccacatcaagcctctatggttcttttggacatagttgttttacttcacgtcagatttttattataagtttgcaaagtttccattagtaaccatgatgcaattgttcgagttacaaagaataaacacacagataaaaacagcaaaggtagaaaatcacaacttacaatctgaccctcagttctttacttggaattttccataataccaccattaaaaataaactttcattctcattcaaaagcaacccataattgtttttcctggacttgcaatgcgtcaagagagcgtccactgcctttctaacctgcaaagtggaaattagacaaataagtgaaatgttttcacaataacttacacaaataaatgaaatgttctcaatctaatttagcatttgccccctcccacaccttctattttttcccttccaacttctatttcaaggggtaacctccataaccgtatctattaggatcctgcagtttatattcacagaaatctaagaatccatcaaacatgcctaagtacccacttccagtactgtgtgcagaagggcacctcttctacttaaagagattgggctagagggaaacgtgcccctcctgccctcaatgatgaaagcagtaatcccaggaaaaacgcaaagcaaaatgcatttagcatttactgagaactcctggcaattctcctgcctcagcttcccgagtagctgagattacaggcgcccgccaccacgcccacctaatttttgtatttttagtagagacggggtttcaccatgttggccaggctggtatcgaactcctgacctcaggtgatccacccgcctcggcctccaaaagtgctgggattacaggcgtgagccaccgcgcccggcctactgagcaccttcttaccatgtaccaggccaaagcgctttacactcattacctctcccgatcctggataacggggagccgaagggcccactttaaataacgggtaacagacctgcaaaactaagcgattcggtcaagcgctaatgatagggaagctaagccaggtcgccaggtctatctcatctagctccacagcacacttgcaacccaattcactagcgccaggccgcaggaccagggaaagcaggcgcccacccacgtgtgtaaaggggagagacagctgaggcacacggcccgccagcgaccgtcccacagccccggggaagtccgccgagcacgcactcgggttccggcaccctgcgcctcacgaggtaaccgccacactgcttccaagccaccctccccaggaaccactcacctgttctttatccagctgcttccgtgctgtcggggccgctggagtcgaggtggaggttccagtagcggctgcagaagacagcgaggccgaggccgaatcctccatcttgtttccacctcgtgaagaggcgcgtgtgcaaccccactgctggcttctggtgcgcacgcgcgagcaagcccggccccggaagcgagggggcgggaaccgagcctctgtgcgtcatttccgggagagcgtggggtttcgctctccggggcagtggctgctgtcagaatcccttctttgaggaggcacctgctcttccgcttttctccagctttccatgagctgtggggagtagcttgggtgtcctctcactcttactagatagaaatcaagaaagcgccttgaggcgagagaagagtcccgtcaggaggcccagtggggtcctccacactccacggtccccgcctccgggaaggccgcgcgtggcatgggcagagcgcggaatcctggctccactgcccacctgcccgttgactttaggcgacgccaaccccaggctggtgaggagtccctgaaatataaggcacgggagccacccggagccacccgacctgccacgttaagcagcatgagggaccgaaagatgagtctgggccagtctcttaggagcttctggtctcgcagagaggcgggaggtaagatcctgtacaaataagcgtggctggtcgtgcgcgtggctggcgtctggaatcccagcgctctgggaggccgaggcggagggattccaggagttggagaccagtccgtgcatatacgagactccgtctctccaaaaattataaacattagccggcgtggtggtgcgcgcctgtagtcccggctacttgggaggcggaggatggaggatcttgaggaattcgaggctcggtgagttctgatccgcgccactgcactccagcgtaggcagtagagtgagaccttgtcgctaaacaaacaggttaggagtggaggctggataactgacaaatggaataccttagaacaggggagtccaatcttttggcttccgtgggccacactggaagaagaattgcctgggcccatatataaaactaatactaatgatagccgacgagctttaaaaaaaaaatctaaaaaaaatctcgtaatgctttaaggaagtttacgaattcgtgttgggctgtattcaaagcctggcctccagggccgcacgcggcccttgggtaggacaggtttgctttgtaatgtcttcctcccactccacccgcctccccagaggtacccttaccagtgtctcctggaaccttccagagatgttctaggcatgtttaggagatacttctcctttctcttgttggatgggtttaattaatttttttccttttttttttttttttttttgtaatggagtctcgctctgtcgcacaggctggagtgcagtggcacgatctgggctcactgtatccttcgcttcccgggttcaagcagttctctgcctcagcctcccgagtaactaggattacaggcacgcgccacaacgcccggctaatttttgtatttttagtaaagatggggtttcaccatcctggccaggctggtcttgaactcctggacttcatgatccacctgcctcggcctcccaaagtgctaggattataggcgtgaaccaccacggccaatttttttttaaagagggagtcttgccctgacgcccaggctggagtgcagtgatcttgtctcactgcagtctctccctttcgggttcaagcagttctcctgtctcagcctcccgagtagctgaaactacaggcggacgccaccatgcccggctacttttttttttttttttgagacagagtttcgctcttgttgcccaggctggagtgcaatggcgagatctcagcccaccgcaacctccgcctcctgagctcaagctattctcctgcctcagcctccccagtagctgagattacgggtatgcaccaccatgcctggctaattttttttttttttttttttgagacggagtcttgctctgtcgcccaggctggagtgcagtggcgcgatcttggctcactgcaagcttcgcctcctgggttcacgccattctcctgcctcagcctcccgagtagctgggactacaggcgcccgccaccacgcccggctaattttt

SEQ ID NO: 1243319 - DNA, 4001 bp, Homo sapiens
atatttggaaaaccatctctaacaagtacgacgaaccaaacactagtaaaatgtcatacagggacacaagtctcttacaatctcatagagggatctacaaagcaagataccatcccaggaaatgcaaagtccacataaggggaaaaataaagagaaccactgtgcaagagaaatttaaaagcaacttccaacatgcctcataatctatagtctagggctaccacaacaacgcatagtattcgtggaggaaaaaaggcagtctttacaaatcacaactgagggagaaagtatgatattcactgcctgtagacatccaaaagccatgcatatatatatgcaaaagggggaggaggtttacaatgttgagatcaaattacttagaggaaaatttcagctgttaggggaaaataattcctgaaggaaaagatattacagtggtaactcctgccagcaccataagaagttcaaagtaaatgaaaactctgagagcaaaagctggaaatcccaccatccccatctaagcagggtttgaaaccatgggtttagatcttaatatgacctaagaagctgtgaaccttgaagctttcagtacaatatggctcccagcactccgcaggtgacagacaacgactgtattaatcccaccccttacctctacatactactttacattttagaaagtgccttcacttttattcctcaacagcaacccgtttggtggtagaatcacactaacttacgttcacgcagcttgtaatttgtactttcacatactgcgctggttattttacagtagagacttaaggaggttaagtcactccactaagcaagaacagatggtaggtaaagggcctggaaaactgcgggattctactcagtcgataacagacacttctaacccttcaaagttcaaagtacaacactccagggggagcaacctctctcagagaactatacaagacaggacctcggagtctcagccgaccgcctcggtctcagtcggtttccctccccaaagacggggaaagtgaggcagcaggagagacaaatgcctaatttggactcacgcaaggggtgttggtgggatagactctccccaccccactcgggcaataagcccggaagcagttggatcctgtgtctgggacacctggtcgatctacagagagagggaataattcccgtttccctttcactactccccactctggctttcctgtggatggaggtgtcttcttcccatcaccgcccagaaatcccctctccccaaggtccttacccaattttcagctccggcttccgtagtaggacattccgctagttctagctcctgcttcctagccccattctctctctatcccaaggcgtttctaaatctccccggggaggtatgcctcatccgtgccacctagaccgtaaactccacaaaaagaaccctcctaaagcgtcccttcatctaccctttctatcccgggcacccctgagtaggtcaggaccccatcggtaccaggagccaccccaggagatagatagctgcctctcacctgggccctgttagccgcagcctcctcagaagggcgacccccaagaacctcttctggtgaggacccccgaaagagggaacaccctcttctaggaacctcttcagatccctcaagcgcgggcctcggtggaaaacctctcggctgtttctcaggttctgaccaacgccacctctctcccgggccctttccagagcctaccccggccccagtccggtccgcccgccccaggctcgagcggctgttcccctccctcacagacgtccccaaccctcagactccctcccgttccgcgtgcccagggctcagagcagcgcggtcgggctgtggcactgactttctctacctcccgggcccaccggagggagggggcggcggcggcggcgcgactcctttgtgacaggtccgagagaacggcaaagatggacgcgaggccacggcgctgccattacgcgcagagcccacccccgcttcgtaccgccccagccctccctcagtcccctaggaaacgccccttcctcggtggcaagccctctccttgacagccaatcacctttcaaaaatcgtgtcacgtgatcagcgggaccggcccgccctccaggcgcagactggccagtcctcatcctgaggcgtgaatggcccaatcaagtctctccggctcgttttcagggtaccggatttccatcgggctcccggggaggaagagctccgcggattgggttacgtcgccggaagtggggcgggactctattgtggcggtgaggaacaggaagccctgaagggtcaaaagaaatacaaaagcaaaggctattttctttttttttttctttctttcattcattccttcctctgtttctttctttcttcctttcatttttttttcttttttaagagcgagcggctctgcggtggcggtttggggtgggcgccgccgaggtgaggtcgtctcgcctcccgcgcgccggtaggtgagtgcggcctcggtcctggcctggcggcgacacctgggttccagcttccttacggaagagatgagctgcggctgctgttagggttagggccaggcctgttctcagtccgcgcacccgctccttgtccggagtagccgaagcctggggcttgcgggcccagcctgaggggagctgagggtgcccgcgggaaggcatctgggtcgcggcgaggaccctttcaggcgggcccaacactgccgggcgtttaatggggtttccccaattttctgctaggtagggccacccaggtttcaagtgagtagcaggctccgttccagaggtcttggaacaggtccaggttactcactcggatgtgcggcgtctggttggaaatggttgaatcccagaatggcagtgcaggatgggaagcacatttattgtgtgccatgtaccagttgctgtgccaagcgaattttctattacggaaaacaagccagctggcccgttttgcagaaaacttaagaaacaaagagagttgaagcgtcatgcttgagagttggtggtccttgtgactgtcagtccacacagaggaaagggggagacctgtttgttcgtagtcgtggttctttaatgttagtggaaaacaagatctcctggggcccttttaaaatgcagtttctcagactcccgcacgctcgggtagcccgactggttagttcaggagtgggacccaagaagccagatgcgagcctggtgatcggaattcccgatgacctcttgcctaccacctgtgacataagatttgtcgattcatcagttatttggtgtattcatgtgtccacagggacaccataaaatggaaggcacccttctgaaatatttgaagggaatcagtgggtagactcctttttgatacaaagtattgagccgacagcagcttttacagtcttttagttagatgacctgcgaacaatttgtaaggatctgaaagtagaggctgcccgattatctttctcaactgaagtcttcatgtccttaccctgtggggaagtgcttcatgatataagaaaggaataattgtgtcaaaaccatttagttgattatcagtcttcactttcatcttccaagaatggtgatgcttggttagaatcaagctgctgctttagctattgaaaaccacgtatgtggtaaatcaagtaacaagtgcgatgtacgtacagggtcagtcatagtgtaattatgcctttatggcagctaaattaagcattttcaacgtgttcaccattagtcaccttttgaacatactttgtcttcattcttaaatattatgtttcactctttactatagaatatgttgttaagattgttttgtctaaaatcaagtatcgacaagtttaaaaaaaagattgttttgtgtttggttttctgtatttccactatgctctatggaactatgggtttgtttttgttcaatttgtttggtatttattagacttcttgaatctgtgga

SEQ ID NO: 1243320 - DNA, 4001 bp, Homo sapiens
gattgctgaactcactgcagaaaaggtgacttttaaaaggtaaccttgagttatgtcatgaactttcaatgccatttatttcagaactactcccaaataaaagaactggagtatgttaggccctcctgtatgtccagcgttgggggaggattacttgtgtactaatattattacaacacactaaatcctgaaaccctattacaaaatctaccctctaggcaacttctcccaaacttattgttcaaccatgtaaaaacagtcataacctaaaaccattactactgaagaaaaagaggagggggtggggagaggtgaggaaagaaggctgggagggggtgtttcctagggagcccctaacagtttactgcttctttaggacaatgtaccagcttttgcgaagaaaaaagaaaggaaggaagagaaagaaatcaaaagaaggagagaaaagagaaagaaaggaaacttgattgagttacttaacttacctcaaagctcaaataaactaaattgaaaaaaatagtactaataaagaataatggtaagaggtagtgaactccttttatattattgctttatgagaagacttaactattaaaaattcctgatactgaaggcaaaaggcaaagatcttccacgcatcatttctcctcgaaggccgagactttttttttttaaatgtagaaaaccagtacaaatttacaaaacacactatataatgctctcttatctctagtttgcttttttgtgtacaaactgttaacctgaacagttttccggtgcaaaaggtctcaccagaaactttaggaaagatgagtgtgactgcgggaagcagaagaaactaagctgagaaaacccggaaaaatactcggcgcagctgctgcggccttgggtcatctcacctccatctaccccgcgtgctcgctttcgcttggggtggaaagcggggttcaggggctcttttcagcggactgagaaatcgcagaggccgtgggtaaggattcaagcttgaggaaacactgggggccgggaggagggctattgtaaagcatttcttaattaatttcaagtcctccatttttttacagggaccccaagtcaggattcccctttcccgacatcaggggtaaagggagcgggggtcccttcgcttcactgtgccccagctctaccgagaggcaggcctctgggaaacgagccggggacctgggggcccgggcggccgcagcttagtgggctgaggtgccgatcagggtcacgcttcggagctctgtcggggcccagctccctccttcacaccccaaaatgccgcctagggcgtgggcatcccgagtggcatccggagccgctgagaccccgccgagattgctccttgtgcgtcctcccacagccgagaggccagcatcgtgccgggacgacccggggacccgagtccgggcgccgctacaccgcctcgggcgctaggcctgggagctttgaggccggtaccgtgaaacacctttaggagcaaggagggattccaggtgtcctccctttgtaccccaactccctgcccggatctcttccactctctgccatagcccccacacacaaactttgttctggacttgttcagccccttcgggacccacagttgtcgcctccatcggagaaaacaagtgcccctgtttcaggggggattccactctggctggccacccgcaaacctggaaaactattctatgacttcttccctgacccccctggaagtagggagcaccacgatccgcagagggcgcataccgaccagaaagattttggggggcagagggtgcaagtgttgtgggaagagatgcggagataaattttgcgagccagaccccgacactttccccgtccgtttgcaccgtctccggaacaactggcggccagcagcactctccaccccggccgcaaccccagcgggtcaggcgctggcgccccgacaccagtccccatcttcttgcagctctgaacctccaaagacacccggttctgcctcgcaggccgagggggagtgtgcgtgggggcaggggggcgcagcgaactcccccacgctcggagttcagcccagcgcccgaagtaaacttccttaccgctggcagcaaggccgggcggcggaggccgggccgggtgccctggggccggcgccgggagcgctaggggccccgtgcggtcaggccggggcgacctccacccgcacccacgcctcatggggctcccgggtcttggccgcggctgggatccccggaaaagcagggacggagaagccaggccggcatgcccgccctccttcccccgggaggacccaacaactccggaaagatcctgccgggagatgtgctcgctttccccggggcagcgggggaaagcccagcaaaggcacattgaaaattaaaaagaaaaaaaaaattacgccgagtggaagaagcaatcggggccgcggcggcggtgaggtagggggcgcgggggccagccgcgtgtgagtgggtccgagtgtgcgtgagtgtgagtgcgtgtgtgtgtgtccacggcgcgggccggagcactcaccatctcgccgggggagcgaggccacttcggggtcggattggaaatgttgaggcttcgcttgcttcctccgcgacatgctggctcaaacatcagctggggcagaataaaaaattactaaaaaaaaatcttctcaaaattacggaaatcgagcggcggcggcggcggcggctccccccgcccgccggcccgcccgccccctccccggctccccggccccgggcgcagcgcgcatgtgtcctgctataattatgattatcaataatgcattgcgattaatcatagaggggctctttgaaaggcgattggcaccgggccagcgctattcaaacccgctcgccttaatcaattagttcgtgatttgctgcagacccctgtctctccgcgcgctggcccaataagccggccgcggggctggctctgcgcgccgcgccgcccgacactgggttaaccctctttgcgaccgcccgggactccgcggcccggccgccgggggccggcctcctctccactgcgggcccggcgccccggcaggcgccccccgctctctccctctcccctccctcttccctccctccttcgcccccccccacaatcccgggctgggccgacccaaattagcatgccctccccggaattgagccgccccgggtggggggtggggccgggcggcgagggctggggacccgggctgccggcgcgctgcgaacttcccaactcgggggcgaggcgcgccggcccgcggggggagggagtcccgcggcgggatcaggggggagggcgtcccgtttcgtgagtgtttcttcgtttctttaagagctaccagaaagcagcccacccccacccccattaaaaaaaaaaataagcgagtggggaagagccagccccacgccggtccgcctcccgcccacggctcggcctccctcccgcctggctcggcgctcctccgccccgagttctccatcccctggatcccgggctcgcgggggcgcggagaagaggatccaggaaaggtttgggaacctgatgggtttgtggctggggggaggggcagttctcccgccaccccatcccctccccgccaggggcactgatcctccagcttcttgcttgctccctcgctccctttctctacctcggacattcccaggacaattagggctgaagttttcgggagaagcagccccgagcccgtgggataagggggcggcccggctccgcccaggacccctcccggacctcccccccggctgccccggttggctgcagggcgcgtcactccgcggggaggcggcggcagcggtggcgccgcagagccccgggcgggcggagagcggggaccggcctgggctccgagttcagctccggccggggggaggggaggggctgcggctcacactgagcgcagcagcgagcaccggcctagggagacacag

SEQ ID NO: 1243321 - DNA, 4001 bp, Homo sapiens
atgtagaaaaccagtacaaatttacaaaacacactatataatgctctcttatctctagtttgcttttttgtgtacaaactgttaacctgaacagttttccggtgcaaaaggtctcaccagaaactttaggaaagatgagtgtgactgcgggaagcagaagaaactaagctgagaaaacccggaaaaatactcggcgcagctgctgcggccttgggtcatctcacctccatctaccccgcgtgctcgctttcgcttggggtggaaagcggggttcaggggctcttttcagcggactgagaaatcgcagaggccgtgggtaaggattcaagcttgaggaaacactgggggccgggaggagggctattgtaaagcatttcttaattaatttcaagtcctccatttttttacagggaccccaagtcaggattcccctttcccgacatcaggggtaaagggagcgggggtcccttcgcttcactgtgccccagctctaccgagaggcaggcctctgggaaacgagccggggacctgggggcccgggcggccgcagcttagtgggctgaggtgccgatcagggtcacgcttcggagctctgtcggggcccagctccctccttcacaccccaaaatgccgcctagggcgtgggcatcccgagtggcatccggagccgctgagaccccgccgagattgctccttgtgcgtcctcccacagccgagaggccagcatcgtgccgggacgacccggggacccgagtccgggcgccgctacaccgcctcgggcgctaggcctgggagctttgaggccggtaccgtgaaacacctttaggagcaaggagggattccaggtgtcctccctttgtaccccaactccctgcccggatctcttccactctctgccatagcccccacacacaaactttgttctggacttgttcagccccttcgggacccacagttgtcgcctccatcggagaaaacaagtgcccctgtttcaggggggattccactctggctggccacccgcaaacctggaaaactattctatgacttcttccctgacccccctggaagtagggagcaccacgatccgcagagggcgcataccgaccagaaagattttggggggcagagggtgcaagtgttgtgggaagagatgcggagataaattttgcgagccagaccccgacactttccccgtccgtttgcaccgtctccggaacaactggcggccagcagcactctccaccccggccgcaaccccagcgggtcaggcgctggcgccccgacaccagtccccatcttcttgcagctctgaacctccaaagacacccggttctgcctcgcaggccgagggggagtgtgcgtgggggcaggggggcgcagcgaactcccccacgctcggagttcagcccagcgcccgaagtaaacttccttaccgctggcagcaaggccgggcggcggaggccgggccgggtgccctggggccggcgccgggagcgctaggggccccgtgcggtcaggccggggcgacctccacccgcacccacgcctcatggggctcccgggtcttggccgcggctgggatccccggaaaagcagggacggagaagccaggccggcatgcccgccctccttcccccgggaggacccaacaactccggaaagatcctgccgggagatgtgctcgctttccccggggcagcgggggaaagcccagcaaaggcacattgaaaattaaaaagaaaaaaaaaattacgccgagtggaagaagcaatcggggccgcggcggcggtgaggtagggggcgcgggggccagccgcgtgtgagtgggtccgagtgtgcgtgagtgtgagtgcgtgtgtgtgtgtccacggcgcgggccggagcactcaccatctcgccgggggagcgaggccacttcggggtcggattggaaatgttgaggcttcgcttgcttcctccgcgacatgctggctcaaacatcagctggggcagaataaaaaattactaaaaaaaaatcttctcaaaattacggaaatcgagcggcggcggcggcggcggctccccccgcccgccggcccgcccgccccctccccggctccccggccccgggcgcagcgcgcatgtgtcctgctataattatgattatcaataatgcattgcgattaatcatagaggggctctttgaaaggcgattggcaccgggccagcgctattcaaacccgctcgccttaatcaattagttcgtgatttgctgcagacccctgtctctccgcgcgctggcccaataagccggccgcggggctggctctgcgcgccgcgccgcccgacactgggttaaccctctttgcgaccgcccgggactccgcggcccggccgccgggggccggcctcctctccactgcgggcccggcgccccggcaggcgccccccgctctctccctctcccctccctcttccctccctccttcgcccccccccacaatcccgggctgggccgacccaaattagcatgccctccccggaattgagccgccccgggtggggggtggggccgggcggcgagggctggggacccgggctgccggcgcgctgcgaacttcccaactcgggggcgaggcgcgccggcccgcggggggagggagtcccgcggcgggatcaggggggagggcgtcccgtttcgtgagtgtttcttcgtttctttaagagctaccagaaagcagcccacccccacccccattaaaaaaaaaaataagcgagtggggaagagccagccccacgccggtccgcctcccgcccacggctcggcctccctcccgcctggctcggcgctcctccgccccgagttctccatcccctggatcccgggctcgcgggggcgcggagaagaggatccaggaaaggtttgggaacctgatgggtttgtggctggggggaggggcagttctcccgccaccccatcccctccccgccaggggcactgatcctccagcttcttgcttgctccctcgctccctttctctacctcggacattcccaggacaattagggctgaagttttcgggagaagcagccccgagcccgtgggataagggggcggcccggctccgcccaggacccctcccggacctcccccccggctgccccggttggctgcagggcgcgtcactccgcggggaggcggcggcagcggtggcgccgcagagccccgggcgggcggagagcggggaccggcctgggctccgagttcagctccggccggggggaggggaggggctgcggctcacactgagcgcagcagcgagcaccggcctagggagacacagcccgggcggacccggcactggactgggccagtccctgggacccctgggcaccccgccctggggagggggccgcgccccagccttccgggacgaggtggcggcgcagagccggaaagcggggtggggggagggcggtggggaggtgttctgtccgaggctgcctggcggcgccgaagctcgcctccactttttgggcacttgccgagcgcggcgcccgaacttttcgctctatcaccatctccctcaagctgagatgcaacctccctaccctcgccccagagcccagagccaggagcccgatccctctgccgggctcaggcgcccgcgaacctgagactcggtacgcggctcagcctagctctttcccctcgcgcctcggggtctcctcgctccaaggttctcgaagtcttgcgcccgaaggactaaactaaactaaacttcggctgagtaatgggggaggaggggggtgcagatacacaatccctgccctatctcacgatcaggaaaggagagggctcataaggacgccccaattcgcgagcgcccttgagtctggccggtgccacggtcggttcgcgcgaagtgggcaccggtctcccgagccgacttcgtgtactccggacctgtactgcgctccggtagaggacccttccctttctcttagcttcttaaatc

SEQ ID NO: 1243322 - DNA, 4001 bp, Homo sapiens
aaaggaccctgactctagcgcatggtccatcacagacattggcgacaggtttgttgaatgaataagtgaaggagctactggcagggctagctgtatcctgggtcctgccttcccgagcctcagtttgtgcacctatcaaatgggtccagcatcactgcttgtctgcagaaggctcagagagaagagatgagaggaactcccagcagcccagagtgtgttctttccatgcagtccagccccttctcaggatctgattcaggatttcagggtacaatgtcccctagggtctctcggcttcctcatatgcggtagagcctggggttcaggacctcactgagggccaggctggggtacggccgtgtgtaccacctggaaagccacagtgagaccctggaattggcccttggttgtctgggacacattgagccaacccttggtttaacctgggtgttctccaggttaggaggggaagggaaagacttgggttgctgtccctgggacaaatgggaacagaacggtgccctgacctgaaatagcttcttcatctaggctacctctcctccccagaaactagcgcctcactttggggggtacttactccctccctgtcccacagggagtacaaagtatggtttaggtaaagaccgccagtgtggcctgggtcgggcagcagagtcacagggaagatgcgattcccattcatccgctcaaacacaccccttccccgcactctcacagacaaagacacacacccgaagccccagccatcacccagggccacataaggcagcccccctcacctgtgggcacccccaaattttcccctctcggggggacttcactagaagctcagcttggccgtgggggaggggtattcacactccaaggacctgggggccaacctccaggctcgcagcttttggggggggactctccgccctcttcccccctctccatggcacaacgggctccaccaccactcctccgtggggccggggagctgcgcccgagcctcaaggctagggagtggggtgggggaagggagaggaggagggggcggctcctccaagcgagacacaaagagacgtccttcagcctcggctccatggcgacgctggggaagggggagcgcgcaacccgatacttccttccccacctgcagggctatggggacctcggtggccactcacctgccgcccctcacctgggcccggcttacctgggctggggccgcggggacgccgcggcagggggcctgggcgccgtcgcggtcttcgtctgcccggccccgggggctcagggcgccacgaccatggaccggggtgcaagcggtgccgccaggggctcagtcgcccaagtcctggagctttaggggggggatccccgaggcttcttgctggtgagagtgtctcttgctgtccccggctgcctagatttgggatttctatgtaccggagttggggggaattgggatcccctgatctaggggcgttctgagctgggtcttcttgtcttgaggtgtggagttgtaatgaccggatcttgggagggggttctcgcaatcccggcctgggggcactgcgttctaggtcttggggcgggggcccagactgaggagggggagtccttgcggtgccgtagggggcttgctgtcttctaaataccgaggaagtctccgctttccccgcaggggagtcgctcggtgtcggatccgggagggccccccctcttccccgaggctcgccggatcctggatgtggaagggggctccccgcactcctcggctgcgggggctttagtgggtcccggccaccggcgggcgctggaagcccctcagccgctggggggctcggtcgccgccgctacgagcagcccggccctgcgctcccggcccccggcctggcccgggctccggctgcggctccagctcgcgctccgcctggcgctcgggccccggccccggcgcccgcccgggctgcgctccatcgcggcatcgcggctccgccctccagccagcgcgcacctgcccgcccggcccgcggctccgccctccggctcgcgcgccgccgcccgcccctttgtccgtcccgctcggcgcgcgccctcgcgcaagcgcgctcacccgccgcgcgcccgccctcccgccgcgcgccgcggagcgcagattctccccgcgcggcgcccccacccccttccggccgcgctgggtcctagcgccggtggctcccgagctggctcccaccccccaccccccacccaccccactccttttctaggtcagagcccacgagggggcgagaacgaggttacagaggactcgggggagtctgagagggtcacctggtccagctttctgggccctgcgggacgagactgccccagactgtcccggtctgtgctagtggggcggagcctgtgtgtgtttgaaggagggaaaacaaatccaggttctgcattcggatatgcatttcattcatccatgcgtccgcctgcctgcctgcgcttccatccatccatccatccgtccgtccatccatccatccatccatccatgcatcctatttccagcgagacgtcagagaactcacagtcttcttggggaagaggtcataaacttgggcctgggtggttgccctatccaactgaggtcgcctttgcgatccctgctgcaaataggcagtgactagtccaggagtgcagctgggaggaactgctcgccggatagaagggaagaaaggagattctaggcagaggtacagcaggtgtaagggatgttgcattgtctgtttgataaccggaaattggtggcctggatgaagtgggtggatggggacagagatgagatagggacagctcgtccttccaggccctgttctttctcctccctgcagctcactctttccctagtgagaaagccccaataggacgccttccctatttctttcttttttttttgtttttttagcttcaagcttcaaaagcatttctttttcattcttttttttaattattattatactttaagttttagggtacatatgcacaacatgcaggtttgttacgtatgtatacgtgtgccatgttggtgtgctgcacccattaactcgtcatttagcattaggtatatctcctaatgctatccctcccccttccccccaccccacaacagtccctggtgtgtgatgttccccttcctgtgtccatgtgttctctttgttcaattcccacctatgagtgagaacatgcggtgtttggttttttgtccttgcgatagtttgctgagaatgatggtttccagcttcatccatgtccctacaaaggacatgaactcatcattttttatgactgcccctatttcttctaagtttttgatcaggctgttttctcaacccagcgtaatcctcccagccactcccgactgtttccagagctttaggagccagggattgcaaacgcaagtacctacaggcgcagacatgagcgactggggtcgcatgtaaagtgatagagagggtggagaagaggggaactggagacatcgtgggctgtgcgtggctggatgatattcaaagagaagcaggacatccagaaatcttccaacttttaaatgtttgaaacgaattcccaaaattcggaaatattgaatgggccaaatgaaacacactttgcagacaaatctggcccccagaccataggttggcaacctctaccattgagaatattgtttcagttcttaacttgtcggcctcctgcctctgtctagattgtcttttttctcttttcttttcttctcttctcttctcctttctttctttttctctccccgcccttccttccttcctttcttctttccttccttcctgccttcctaccttccttctttttttgacagagtcttgctctgctgcccagcctggagtgcaatggcacgatcttgcctcaccgcaacctctgcctgcggggttcaagtgattctcctggctcagcctcctgagtagctg

SEQ ID NO: 1243323 - DNA, 4001 bp, Homo sapiens
gtgcatgtgtgtgtgtgcatgcattcatgggtccgtatgtgagcagtggaaaagagaggacctcatcccctaaattcagatcctgtgaagttagtttaggataaagaaaaataaattgaacttaacccagagataacaatttatagaagatgctgaaataaaaaccaacctgaaaatttttgtcacctaaattcccatcggtaggcattatccacggcgggaatccatgcagcagtttaaataaataagctgggtttatatgcagcagcatggataactggtgatgagagggctcaagttgcagaatgacataggtgggttgtaccatttctacttctagttctatttttctgaaacagagtcttgctctttcactcaggctagagtgcaatggtgccatctcagctcactgcaacctccacctcctgggttcaagcgatccacctgcgtcagcctcctgagtagctgggattacaggcacataccactatgcccggctaatttttttttttttttttgtagaaatggggtttcaccatgtaggctgggctggtctcaaactcctgacctcaagtgatccgccctcctcagcctcccaagggttgcatcatttctattaaatatccacctacaacattactacattactaagtattttacatattttctatggctctgtatatatgactgtgtaggtgggggaaagggtctagaaggaaacactccaaattatgaaggtgtttacctttggggagctgggagggcaggggtggaagattacagaggaagaagaatggatccctgtgttctgcatggaattacacagctcaatgggtaggcaggttgggtcactcacggatgctgggatctgagacaggggtgctcaggtctctgggagctttcagacccatccacccggctttgtgagagctgggctgccagggaccaaagccagtcttggttgttctgcccctactccctggtggaggtgagtgggaagatgtgccttttgtggactggaggtctctgctgcttcctccctaaactctgtgcctcattttccccctccacgctagagtgagaatgtccctgtactatatcccagaccctttccctccacagcacacctaagtcatatgacattgtccagacatcaacttagcacttgagaatcctcagcgcagacaactgcagggcgttcggatctggcctcctccaccacatcaccccaaatgaaacccacgttccccggacgccactgacagcccacgaggtaggctccagggtcggactgcctgggttcaaatctgagctcagcaacttgttcctgggacgtagggaagcttccccaccctctgaccctcagtttgcacctctgcaaaatggggacagcaagagaaccaccccacagggatgccctgtgagcgaagttaggtcgtttgagcaaggcgctctgctgagctgtgcccagcacgtagaaagcgctctcgagtttcattgttgtcacctcttgaacaacttcttgccccgcccactctatgccaggactttgccgccgtctctgaggtcccagacacgccggggaccctggccccgtctgccttctgcaccctgggggcttttcccagcctccagctctcccctccgcccccaacccgttcagtccccaggccgggtcccaggcgcctcagacaggcacccaagcgccctcccgtgggaaactgaggccgggacaggagctcgcgggccggggttgggcaggagaaggcgcgcgcgcagggactccgggcagcgcgcgggagaccgggtgcgagccagggttcgccgtcatacctgctcgggcggcggagcggggacacggaggatgcgcgctgtcggcggtggcggaggcggcggtgcgcgccaagctggcggcggcggccgagtgttggtgacactgggacacccggcgagcgcggcgagaccgactgggagggagcaggttcaggggcggggaagcacggggagcgcccgcgggtggagcttactgggcgctaccggcctggccacacgcacggtcccggctcccctggccacctccctcgcctcccaataagctccagcccccacacgccaggttcagggacactggacgccccccgcacgcacgcgctccgcattctccctccccacctcgggacaccagcgatacccacatgcgccacgaatatgtccacagacccctcatccgagtgtaccccacgtcccctcagtacatatcacaagccacatatatgaacactccatcccaccccacgcgtgtacctgtcccgttcacctaggcgaagcatcgcgctcaccagtacaggcgcgcccccatcacatccacacccctgcagacacagtgtcctctgggcaagttggtgactttagggggacatatgcagccacttttcccaggaacgttcttccctccgcctcttccacctccaccaaggtggagacctcccagatctcagtcatccccgataggtcctatctttgcattagaaattcaaacagcccaccccgagattgggaactctggccccctctggagtgcccactacacctgtgctctagcctcagggcactggcgggccttgcgcatttcctcgaatcttcccttccttttcttttctcttctcatcaagtcaaggtttcaggactatcatttcagccactttcttgccaatatccttaacacttagtttcctgtatatttctccatagattgtcttaatgcagtcattctcaaaatttttggtcttaggaatcttttgtatttttcttttcttttctttctttctctttcctttctttctctctctctctctccacctccctccctccctacctctctctttcttctttctttctttcttttttttttgacagagtctcactctgttgcccaggctggagtgcagtggtgtcatctcagctcactgtaacctccacttcccggaatcaagcaattctcctgcctcagcctccctagtagctgggattacaggcatgcaccaccatgcccggctaatttgtgttttttgtagagatgggttttcttcatattggccaggctggtctggaactcctggactcaagtgatccacccgcctcgggctcccaaagtgttgggattacaggtgtgagccaccatgcccagccaggaatcttctgtacttttaaaaattacagaatacctgagactttttgtttatgtggaatacacacacacacacacacacacacacacgtgtttttaacacatatatgttattttgtttatataatgatactttccatatgagaaactaaaactgatacctaaaaatatttattaatgcattacactataataaacccactacttgttgacataaataaaaggcttttttacaatttttttctttttttggtaaagagagacagggtctcaatttgttgcccaggctagagcgcagtggtgtgacccctgcagcctcaaactcttgggctcaagccatcttcctgccttagctgggactacaaggtgtgtgtgccactgcttccggctaattaaaaaaagtttatttttctggagacaaagtcttgctgtgttacccaagctggtctcaaatacctggcctcaagcaatcttcccacttcagcctcccaaagagctgagataacaggtgtgagccatcatgcctggctgaaaaatatttttcaaaaaaaaaaaatcagtgggaagggcactgtttagcatttttgcaaatctctttaatgcttggcttaataagagacagctggattctcgtattcagtcggctgcaatctgttgttttagttgaagtaaatgaagtaaattcagcttcatataacttgacccaccattgctttttttttcagtcttttttatttattattattatactttaagttctgggatacatgtgcagaacgtgcaggtttgttacacaggtatacacgtgccatgg

SEQ ID NO: 1243324 - DNA, 4001 bp, Homo sapiens
aaattggaagctggggcaaagctaggaggcttccaagcttatgatgctagtgggtttaaggcctcagatggaaaggaaatggagtgctgggcatggaggtgagatgtccagagcagacaaactgctctaaaccctccatagattgatatgattttgctgggatgaagaacaccatcaaaatgatgctagtagcctctgggcaagaggaatataatttatttttttatcacttaaaatattgcctatccttacctcctccctcactacaatccaaaaaaataaaaaatgaaataaagaagaaggaaagaaagaaaaaaattagcgagagtttgtttttaaaatctaggtccaggttcaattgcttgtcaaataaaactgcagccctcctctgtgaatgttcaacagaagctgtgattctggaagctcctatccccagctctcaggggtacctctgccccatcagccccttccccagaaccgaccttgaccccaatggatcagtcgacaatgtcagaggagcccccaagtgaaggaagggaactgatcttgctctttgcaaaacagataaaatattcatataaataatatttcaacttcaaagcaaaacaagactgtagctaccattagattatgcagcctgagccaatgtgatacccttggtggaagaattactagctgatacccagcacttactcttctaagtactttgcagctgtcacctcatttaattttcacgataatcgtctgaggtaggtatcacaaccacctccattgtacaaatgaaacagacgctgacaggttaagtagcttgcccaaggtcacactagaaagtggctgagctgggatttgcacctaggagtccctttaacgactaactaggctgctcttcaatcattaataataataacagcagcagggaaagcagcaataatggcagctatcacttattgatccctttctgtactcccaggcatcccactcagtccttttcacacactacctgatttaatcctcactacagttatatgaggtgctattacttggcccatttcacagagaaggaaactgaggcacagaggttaggtaatttgcccaagaccacacaggtagaaaggatttgaaggattctttagaattccagggccctggctcatcgcagcggctccgtgcaccccctcctcacctaccaccgactttgcctgtcccccatcccacagtgcaggaccccaaagcttggagagggatgagagatttgccccaagtctagcgttgggttcgctggaccggagagttcccgatcagtgcccgtcccgaagggcgagtcctgtgcagaaatcacttgaactcaacctcagggccctgacccgagctcctgccgagcgaccccgcagccctgccctccctgcgcggagcgagcgggcgctgtcctgtggcggaagccacgtctgccccgggggagcgccggctgaaggcgctggagcgaatccaaccagcccacttcaagtgtttgcttctttctgcaccaagtcaccccggagaaagcattccagagggtagaaggaacagtagcggacaggtccacgcgactcaccccggcagggaagggggctgaacaggcgctgggcggagaaaagaggccaggtgtggcccgggacccccagacccccggactctgagtggctctcgactggcttcgtgctccgggccacggcgtgggtagacccgggagagctggccgctaccgcccgggcaaggtgtcccagcatcccgggcaccgggaagccgccaccggctgatgctggctcggccacccaccgcgctgacggcgtccgacgccctggcgcccggcatccgctccagtgcccagaacccccgagctggtccgacccaacccggctgaactcacctttcggttccaaagggtccaaggctcgtgcgggtgcgctgctcctctgctcgctctcgggctagcatcccctggcagcgccaccgcgggctcttgtgggccggccaggccccgccccctagggacccgcctccccaggccccgcccccacctgcccaggtgctttccccaggccgccaggcacctgagaccgcccggagcgggccacgacttcacaacgccccctggcgccccgaagccgccctgcgccccagcccggccgcgctgcgtcttcctgggccaccgcgcagtgcctgctgccgccccgaggccgccctgccatcctgcattcccgctgggtctctgcggcacttaccccaaggcgcctcaaagcgcctgctgccccctattactgccccgcgacttccttccactcccgtccagatggcaggtgcctgccctagcaccagcagtaatcccacgcagcctcgctcctcggactccctccagacctgcagcttcagtgcccaccagcgtccggctgtaggcagcaggggctgttcagccaggccactcatcctttgaccttttcagctgcttctttctctttctttcgttatttcctccttccttcttctttcttttcctctttccttctttttttttttttttgacggagtctcgctctgtcgcccagtctggagtgcaatgacgctatctcagctcactacaacctccgcctcccgggttcaagcaattctcctgcctcagcctcccaagtagctggggttacaggcgcgcgccaccatgcccggattaatttttgtgtttttagtagagacgcggtttcaccatgttggccaggctggtctcaaactactgacctcaggtgatccacgcgtcttggcctcccaaagtgctgggattacaggtgtgagccaccgcgcctggcctgtccttctttctctttctctctttctttcctttctttcctccttccttccttgcctgcctgcctgccttcccgcccgcccaccttccttccttccttccttccttccttccttccttccttccttccttccttcctttctctttcttgcttgcttgccttccttccttccttcctccctctttcttctttctctctctcccttccttccttcctccctccctccctcctttttctttcttcctttctttctttctttctttctttttctttctttctttcctctatttctctctttctttttttaacagggtctgcctctgtcaccttggctggagtgcagtgctgcaatcatagctcactgtagctgccaactactgggctcaagcgagcctcccacttcagcgtctcaaatagctggaattacagaggtaagccacctttcctagcttcagctgcctttttatagggactcagataactacaagaaacgagattagaaaactgcaattgggagggaccatagagacacagcccctttgtgccggggagaaactgaagcccagagagaggaaaggatctgttcttacctagagcttctcagatttgaatgtggttacaatcacctatggatgttgttaaaatgcagattctgactcgataggggtggagtgggtcttaagagtccgaatttccaaattcctaggagatgccttggttgctggtccaagggcggtttgcccaggtggatggaaacaggtccagcattattggagagaaatttaaagaaaatcctctaaaaaatctcagctgcttcttctaacaatatatgctcattgcaaagaattaaaacaataaactgtgcccccccctccccaaataagcatggctaacagtttggttattatttggtgtgtgtgtatgtgtgtgtgtccacacacacatattagttttatatatatacacatacatatataatgggattttgaaacacacactgttcaaattctatgtttgttttgaatgacaatacacagttatattctcactgcaaaataaagccagctttttcttctttttgtcttttaaattatttatttatttatttattttgagacagggtcttgctctgtcacccaggctggaatgtagtggcatgatcat

SEQ ID NO: 1243325 - DNA, 4001 bp, Homo sapiens
gtcattttggagtttcaagatgtgactgccccgctggattttagacttgcatggggcctgtagccccttcgttgtggccaatttctcctttttggaatgagtatacttacccaatacctgtacccccattgtatctaggaagtaactaacttgcttttgattttacaggcttataggtggaaggggcttgccttgcctcagatgagactttggagtgtggacttttgagttaatgctaaaatgagttaagactttgtgggactgttgggaaggcatgattggttttgaaatgtgagggcatgagatttgggaggggccaggggcggaatgatatggtttggctgtgtctccacccaaatctcaccttgaattgtagatcccataattaccacgtgtcctgggagggacccagtgggaggtaactgaatcacaggggtgggtttttcccatgccgttctcttgatagtgaataagtctcaaaagatctgatggttttataaaggggagttcccctacacaagctctcttgcctgccaccatataagacgtaagatgtgactttgctcctcttttgccttctggcatgattatgaggcttccccagccatgtggaactgtgagtccatcaaacctcttaactttataaattacccagtcttgggtatgtttttattagcagcatgagaatggattaatacaggtagtttaaaggtttagcatttaagcctcaggacaatcttccgaagttgttactagtattatcatcagctttcagaaatgaggaaaatagatcagaggttaggaaccttgcccacaaattatgcaggtcataaggggttgggcagggttcaggacttgaagccgggtctgtatgactcttaaccactacatgtaatgccgcacaataaggctgggacaatacagattcgcttaggtcattatcttatcactgtgaaaggaaaataaatcttggggtcccaagatcactaagctaaagggaaaagtcaagctgagaactgcttagggcaaacctgcctcccattctattcatgtatctctgctcactaaaataaaggcatatctgattgcttcctttggagaggctaatcaaactcaaaataatgcaaccatttgtctcttacctacctatgacctggaagccccctccccgtttcgagttgtcccgcctttccagaccgaaaaacatgttcatcttacatctgttcttgtctcatgtctccctaaaatgtagaaaacgaaactgggctctgaccacattaagaatacatcgtcaggaccgcctgaggctgtgtcatgggtacatgtcttcaaccttggcaaaataaactttctaaatgaactgagacccgtctcagattttcagggctcactccacctccacaatttctgtcacatctgattcatctggtattatgactagcctataaggttttgtttaaacctacttaccttttcccaacaaatacatgcagtttaaatgggaacctgtcactgccacttttaagtggcaaaccagaaccaagtgataaagaggaggtaatcgttctcccaaagtgtgcagaaaatcaaagacaggaatcaagtatagccagccacctgtggaaagttcggagcttggggccccgatgtccttaaaaacaaaaaatgcggagggccagtgtttgaggccttggcgacattctagaaagccaagctgcgcccggtcccctgggatcaggaagacatctgaaaggggatactccttcccgccaccctgctcagtcattcaccaccgtcccccacccccgggaccgccacctgtcgcgttccaggccgaggcggtccagggtccccgcggaagggcggcggccccccaaccccagcccaggcccactcacagctgcaggaacaagggcgcggcagacggctacagcaggcagagaggcccaggcctcctagctacccatcaccacagctggggcgccgaagccgtcggacctgcctcctggagccacttccgggcctctctaggaagcctggaggtctcggagtctctatgacgcgcaggtgtctccttcaccttcaccggcgttgaggtagcaggaggttcgcttcatgaattcccccacgttctctggctgtgcgttccgccgtggcgggaacccttttagggtcacgtcttcccccacgtcccctgtctgtgcgttccgccgtggtgggaaccctgttagggccacgtcaactgctcttcccacctccagtgtctgcttttagactttcacctccatctttgtttatccccaaggccaagaccagtgcctgataaataggcactcaggtcagcattgcttgggtggatggatgatggaaaaggctctatagggaggcagaatattcactctccatgtatctctttaagtttctattatctctgagtttccatatctatgtgtgcccataggttttcctgtgtccctaattttccttatttctctttgttctggtcgccaagcaggcagtgatgccaagactaatctttgttgctgaaggaaccaaggaatgcagaaaggaaagttggcatcctcactcagaggtctccttttgaggcccatcttttgtctcctcatcatgagtgtggttctgtggatggttgcagactgtacacgtgtatggacatgcatcctggaatggacccctggctggggaggatttcattttagtgtcttggaggatggaagttttgacttcatgtggtgctcttgccgatagatctggtaccaaaggcagactcagagaggttcatatcaattgcctgatttactgctcagttttcactaagcacacacagtcacaaggacaaagctcaagtcctaggatataaaaattaatgaagcccaggtgaagaaatcaagaagtgccagtccctggcactggcctctctcataggatgctctggctttcctgcctgtcttgtcctcacctattaggcaggcataagtcacaggagacttcttgtgctaagcagtcttaaagaacagctttgcagtggctgcttaggatacataaaaattagaagagaagaggaagggtattcagggggctgagagaccagctatatgctcttgaggccagcagctaaggaagaaaagacccactgaggatgcagtaaagaagacagacttcctttggggaattacaggatcctctgagggatacccagatttagagtgtgtggataaacatgagaaatggtgaatttaaatgttagtattcttgtgccaccgaggactcttttaaaatataatcaggcgtgttttaaaggaaaattacaaactctataattgcttccttagcttccatcataatttagtgagttgattttataaaggtctgaccaagagatctaagacagaaatgactggagaaagaaattaacttcaatgtgagtttgtatatcagtgtttgtttagtattgtcttcccccaataatatgtccaggcagtggatgcatctcagaaagatcagtttgctgtcacaattactcacaggtgtgcagtattttatttctcactccgatcacagtccaattcagtctgcagggaaggggaagagtgctgtgctccacataatcactcagggacccaggcttcccccatttgttatgccatcatgttcaactcttggctgccaaggtcactacagaagaggaagtaagagcttggctttccccaacactttcacttaaagtctcctgcatccccttgaaattcttcaatctcttcacagcacttagctcatctgaaattatcttgcatgttgctataatgaaagctccgtgagtgcagagacctgcttgattgattggtgtatctccactacctactatagtgtctggcatagagacagaattttttttttttttttttttttttttttactggtgaatgaatcagcaaatgaatatatgtcacatttctggttgtccctgttcaaaatcccag

SEQ ID NO: 1243326 - DNA, 4001 bp, Homo sapiens
acagcatattttgtgagctcctactgtgtgcccggcacacagcaaggagcaccaagaactatctcatttactcctccccgcaaccttgtagcattgtccccatgttactgagcagggaagtgaagtgctcagaggcagagggatgcagccaagaaggaattccacatccacctatgtccagcttctgcccccagggtgaaaagaccagtgatcctgggggccaaggatctggcagccaattctaggcctccaactgacttgctgcacaacacagagtacatcacaaagcaaacctacccactcattctctctctcgtcccagtgtcagcttccttaaaggggagggaagggggtctgtgagcagaaggagggctctgtggtcaaatgtgaggttctagagtctcctttgtggggatctcagccccgactccacctctgcgtagatacagaacttagtgtcatcccttcacctgtcaaagcctcagtttcatggaggttacatgggaaaataacagctatcgggaattggaagaaacatcatctgttaagacagtgctgtaaacattcaataaacagctgttgtcattatcaccaccattccatttatcactgtgatatgccattatatgaaatgacagcagtggcttggcccctgatacctttgttttctatcaggagagtctaaagtaagggagcaggtcagcttcaacaaggagaaggaagaaagactttgtgttttggtcactgggccgaggataggatggttggacagagaggtcactggatagaagttaaacccaccaggtcagctgagtaactcactaattccttctgatctgggagtctaaggagctccgtcttcctaccgccatagctgatctcaagcccctccaactgtcacatgggggcccaagaatcaggagtcactcaccgccatgaccagctcaaacgggtacttgtagactcggacaggagactggtatctttgcaccatgttcacgctggagcaccaatggaggtcaccaggcaggggtgtgcacagagcctggggcgaggagtgactggtgaggttgcagctcccacctcgggaagcagggacaccacccaccaagtgtaaggggcagcccctggccccacccacacagctccccagccttcaaattgagaaggctgatattccccccaaattactccaggccaagccccaacagcttccctgtcattagccatggccccagaccacgctcagccttccaagagcagtcagcacccccaaactttcctctacccccaccccttcacactgagggcccccagaagccttacggccacccacacagacacacacacatttgcaattcttacactcccacggttctattcacgcatgcaccccgcagcttgccacagacttgctggcctacagcccacccccgagtctccttgcacctgccctcccattttcctcccagacaccctgacatacacacacagccttcaccacatttcacaggcactgtctctatcacacacatgtacacacgcaggtttccctcccacacgggactgcttttgcacacgcctccaactttgcacacacaccctgaaacacgcacctgcccagctccacgcacgcaattcccctggtgtgcacagacgtgcacacacgcacacacacccgtgcgcacatgcacacacacgtacacacacgtagaggcaatcgcacacgcatgcacacacaggtccccgcagctttgctcaccctcgccctcgggagcctttgggaatgcagcctaggggaagtgccctggaagcccgcctggctcgggagctgagcgcttacccgcgcccgcctggcctggagcgcagtacctgaggcggggcccgatcgcggatctctagcctggtgtgtcccgccttgaacaccctgcggccaggacagctgtggaaggccggaggggcgggagcgaaacctgccgggccgagagagctccaggacccgggacagcggagatcctggcctggccccgcccctgacctggtcccgcccacgtccccggccatggccccgcccaggttggccctgccccctaactggtcccgccccactctggccccgccccaggcgaactccccctggttctagccccgccccttatttttagatgtcgcttgtttgaccacgccctcagcccagtcctttctctagattggtcacacctcaggaagtcccctcccccttcactggccccgccctccaaggccctcagcctcggggaatggtaggccacaggacgaccccgccctaatctagctctgcctccaagcagaccctgagtccgggccgacccgccccggaccctgcgtctggccgacagtactgtttacatttgtagataagcagaatttacgcttttcttgctcagattaacctcgccctcgtcccgctgcacttgggtctgactggctcctccacctgtccccgccccacggcccgcgcatgcaccttcgcccactctgcacaccttcacagagcgcctgctgggggtcagccctgtccaggcgctggagagccgccggtgagccacacgcacgaatccctgccctcgtggagtttatactacggtggggagacagacactcaataaataaggcaaatatatgatgtgtgaggtagtgaaaaactctaacgagagaaaaataagcaggaaaggggctcaaggagccagcggagagaaaggacaatttaaaacaggtaagaggccgggcgccatgtctcacgcctgtaatccaaacactttaggaggcggaagcgggaggaccgcttgaacccaggagttggagaccaccctgggtaacatagcaagaacctatctctacaaaaaaatttttttttagtttaggcagggcgcggtggctcacgcctgtaatcccagcacactgagaggccaaggcaggcagatcagctgaggtcaggagttcgagaacagcatggccaatatgaggaaaccccgtctctactaaaatacaaaattagccgggcatggtggcgtatacctgtaatctcagctactcgggaggctgaggcaggagaatcgcttgaatcaaggaggcggaggttgcagtgagccgagactgcgccactgcactccagcctgggcaagaagaacaaagctccgtcgcaaaaaaaaaaaaaaaaaattagccaggcgtgttggcacgtgcctgtggtcccagctactcaagaggctgaggcaggaggatcccttgagcccagaagttcaaagctgcagtgagctgttacctggccactgcactccagcctgggcaacaaagcaagactcggtctcaaaataaataagtaaataaataaataaaacagggagtaagggggcctcccttgggagagtgacatttgtccatcactctcattttaactcacacttaacccctttcagccctcccaggactcccaggggaccaaccttgctcccagaagtcctgccttgccactcctcatctgtttagcctacaagacccaagaaattggctctggacagtgctgtcatccatgtattcactcattcaacatttactgagcacctactacgtgccaccgtggggtgaattcaccccttcaagcaggggaagtcagaggtggccagggagatggacaacccctgatatatttcaagtatgtcactgcaccctgtgaaaatcacctctcttcccttcctagcctgcatcacattctaatattgcatttattcgttttatatatctgtgggttcctggaggtctctctcaggagactgtgagctccctgagggcaggggcagtggctgccttattcagctgcccgcatgttgggaaggatcttactggggacctggcaggcaggcagcaggtgcccagcagactcttggcttaggtaatcaagggcggaaatgggacacaaagttcccatccctgtcgcaaggtggcagcaaatgatagcccat

SEQ ID NO: 1243327 - DNA, 4001 bp, Homo sapiens
tccaaaactcatttgcttctaatttttttcattttgcaatttactttgtgtgtgtgttactttaataatctcactccctgtgcagaaattaatcaaccccgtgcaaagaaaaatccctcaacctggaatagcttcatcttactttggcaagagaaaacagaggtatttttgctcctcttctacccaagtgatgaacaaatatccccccaaagttcaaaatgttactctggcctcggaatgcatataaagactgctttagatgggctgattccaatcacctagaaagggcagccggaaccactatgcaggcagccttctttggaaatttcttacaatcaactcttgagaaccatccgtgattgtggacaatggctctaaggtccaaacaacttctgttctttcatctcacgagctaggctcagaggaggcatttgaactgtcaggagcaagaacagcagctgtggccccacgaggcaggacttcaataactcgcggcttgtcaatgatccgggccgttcggtttcccttttccacaatgccaacgatccacgcttggtgaccctctccgtacttggaggatttgatttcagaacaaaagcgagccgcctgttctcttggcagacaaatcagtaatcccccagaggtttcagctgaggttccttgaagaagcccaaaccgtccactggccttgctgacggcagccatcttggcaattattggcagattatgaataacaaaggacacttcatttctttgttgttttgcaaggttctgggagtgtcctagaatgccaaagcctgtgatatctgtggccgcatgggcattaaatgtgtgcattaaacctgcagcagttctgttgagggtagccatattgaacatggcttcctgataggccagctccacctcttctctggagaccaccatctttactttattccatctttcaggattatccagccattggtgggcattgacagcaacctgggttcctaacggtttggttaacaccagcacgtccccaacgacggcgctgtccggcattatgaactcatttggttggcatactacagtggcaactccaccgattataatccaagggttgaccaccgtttgcccaccggtcactgccgtccctccttcctcagccgcatcccgaaagcctttgaccatgagtggcgttaccttttcgcgttcctcctcactcatactctggctgacgctgagtaacatcaacatgttgtcacactcagtaatccccatggcgtagaggtcactcagcacgttggcacaagctatgcgccccatcatgtagggatcttctaccaaggggtaaaagaagtccgtggtctgcaccagtgacaggcccccgtgcctcagggggatgacgcaggagtccatcccgatgcccagggctggaaaggtggggctggggcccgctcctgccggcaggccggcttcctgggacgcctcttcctggccacccaccaggccccggcccagcgggggccgcacgtccggccgcgtcagtcccgccaggagtttgagcagcgcctcctgcgggaccttgcagcctcagcccttcatgccggagaagcccgtcagccgccagctcgggctgaggcccaacgcctggggctcgaagggccggtagttcgagaagctccggcccagagtcaagcccgccgggcccgaggagccttccgccgctgccatcgcctctccgcaggcgcccgtcgccgaggcttccgccatggcgcctgcccggcagggaagcgagaggagaagagggcccttttattttccactcagattaatatgaagcaaaagtcaaatattacctgcagggattctccctagcgctactcaagccgtcagacccacggcatgcacaatcttcctgatagaggagccgccggactcccttatttatagccctggcgattgacagccgcaacatccaatgacgactccgccaccgagaggcgggcttcctagactctaaaaggtgcaacaacctccggcttgcaaaaccgcttgcaacgggattgcagaacgtcacgtgctttccttcgctctcttagtaatttaaatggtttcttggcagtggctgacggaactctgctcccttccagtcacttttccaagtccagcaaattgtagacgagggaagattggtcactcggcaaacctcatgatcggcaggattgtcccaaaggtcacttgacagcgcacatgatcgatccaggatggcaaaatagcccaagggaaaaaacagaaagcatgagaaattagaaattaaactactaccattaagttagcaaactgcaggcagcatcaatataatgaaatgttaacaggaacttcaagaactctaggactcaggaggtcgaggctgcagtgagctgcgtccgcgccactgcactctagtctgggcgacagagcaagaacctgtctctaaaacaaacaacaataacaaacaaacaaacaccccccccacacacacagacacacacaaaaagagagatttaggactggaagtccagacacctgcatggattctaatggtgtttcccaccagctttgtgtggagtcactctccgcgtcggttgactcatccatctgtggaacagagtgggttacataggactggtctattctaaaattcctatatctctgtaaataaatatatatatatatcttatatagccatgaagggcagtttgccaatatctattaaaaactccacctcccaggttcaagtgattctcctgcttcagcctcctgaatagctgggattacaggtgtgcgccaccacacccggcttatttttgcgtttttagtacagacgggatttcaccacgttggccaggctggtctcaaactcctgacctcaagtgatctgctggcctcggcctcccaaagtgctgggattacaggcataagccaccacacccagccaataaaaacttttttaaaagacaagaaaatgaatagaagactcagcataggggctatgtctagggagggctacatagggagcttctgggctatgtttaattctgttcattgggctggtggtgggtacgtggtacatggttgttctttaaactgtacatagatattttcggggccgggcacagtggctcacacctgtaatcccagtactttgggaggccgaggcgggtggatcacgaggttgggagatcgaggccagcttgatctatatggtgaaaccccgtttctactaaaaatacaaaaattagccgggcatggtggtgagcgcctataatcccagctactcgggaggctgaggcaggagaattgcttgaacttgggaggcagaggttgcagtgagccaagactgcaccactgcactccagcctgggtgaaagagcgagactctgtctcaaaaaaaaaaaaaaaaaaaactgcacatagatattttcccacactatttttgtaggtatgctatatttcagaatttaaaaaacatgcaaaaagaaagcatgatggagtgggaaaatacagtgaaagcaaaagaccttgtatgatgtctgcattgctgtcagtgagctggctgaccttgaggaagtgatctagcctctctgcaccttagtcttctcttctgttaaaccagggtcacaatctctgcttaggatctagtggaagggccataggaaacctcagctgaaaagtgttttgcaaaatgttaagcctattgtacagggaaaggatcctcatatctctaagggaaagaggaaaacattgtattatgtctgtaatcacctcacctgagttaaaaagtgactaggtcaggtggtgctggttatacattctcttagttctttggacttctccctctctgcacttagtacaatttgcaattcttttttttgtttgtttgttttttgaaatggagtctcgcactgtcacccgggctggaatgcagtggtgcgatctcggctcactgcaacctccacctcccgggttcaagcagttct

SEQ ID NO: 1243328 - DNA, 4001 bp, Homo sapiens
ggccagagggaagtcactatgttctcatgtctatgctcctgccctcaaataggcctcagccaggcatctagcccgggggctgcatatgtagcctattttgagccttcagagacatggctatgctggcggcttaccacccgccttcctcagaagcttctcctacaatctagcctgatgcaccatgctccagaaaggccacttcaagatcaaagaagtctaagctgaaatcaggtttggcttcacatggggtcaaaggtcagaggtcatcactcacaccttctgcttgagggcctgggtttcctggggcatcagagcatccgctttgccaatgactgggatgatgttgactttctcgtgtactgcccggaggaaggccacatctaggggccggagcctgcacccagggattggtcattgcccagcctcagggggcagagaccccccagccctccctaaatgcgccagcccccaggatccccccaccagacccccggccgaagggtgagatgaagtagaggcagcagtggactcgggagtcctggatgttcttccggttcaggccactctcatccctaaggtactgctcaaattgctcctcgatgaatttcaccaccggaagccagctgggtgtggggagaggatgtgaggtcagagatcaaaggccagagggcagggggcaaggctagccaggactgtgggagtagaatgtcatttctttggctccctccaaagacattaaggggaactggtgggggcctaggtgagtcatcaagaagcacagggacccagtggccctctgaaacagacaccaccttttgagatagggagccagcacaaaccagtcctgtaactctccagggagtcgccactgtgaaaggctgagcctctgtcccctttcctcttcctcaccagtcagagcagtccactgagtccccaaagccaggtgtgtccacaagggtcagcttcactttcacacccccttcctcaatctctacgccccggcgctcaatggccagggtctgtgtcaagcgagctgtgggatgggggagaggtcagggatccggggaggctctgaggcagaattaatttcctttgtcaatatcacagttgcctgcacccatttcccaggggaggaaagtctcagaaaaaaagcagtcaactacctgagtccccagatggaaaagactagggtgtaacctggggacaggggctactgcctcaagagggtggggagggtcttaccactggcctctggcacctggcgatcctcatagaggttggtgaggaagaggctgttgatgagggtggatttccctaggcctgactcccctgtggacagaacaggcccaactggtcaggggaggggacagccagggcctcctaaggacatcccctccgcagttccctctccaaaacccccagacctgccaccattagcgtgaagtcaaaccccttcttgacagacttgcggtgcagctggttggggagggcagcaaaacccacgtactccttgtcctatggatgggggtggacaatatgaggctgctggcaatggcaggcagggtccccaggatcacttgagttcctgggctaggaagagtcagtggggtctggggaccccaggcatgggggctgggggccgagatgcccaggtttctgggtgtaaggactcaccatgactccgccagccatcactgcacctgccgtctctccccacttcctctggtggggcaggaagctgagtgcggctaacaagggggcgggcagaagaggcagctgagatgctcaaactggcccagtcccagagaggtggggaaggccaaggccaagaacacttggggttgccacctcctggacccctttgcccatcacctgtctacgtaccttcaaccctccatccttcacacatctggattccaagtcccactgtagctccatcatcgtggtgagacatggggtatgtgcagagaggaaggaagtggctccctttgttagcaggggagatgaaggttttgatgagctgattagaaaacagttcccaggacgggcaaggtggctctcgcctgtaatctcagcactttgggaggcggaggagggaggacagcttgagccaaggagttccagaccagcctgggcaacagagggacgtgcccctctaccatctctacaaaacattaaaaaattagccaggcatgttggtacaatcctgtagtcccagctactggggaggctgaggtgggaggattgcatgagcccagaagatcaagactgcagtgagctgtgatcacaccactacactccagcctgagcaacacagcaaaaccctgtttctttttctttctttctttctttttttgagacggagtctcgctctgttgcccaggctggagtgtagtggcgccatctcggctcactgcaagctccacctcccgggttcccgccattctcctgcctcagcctcccgagtagctgggactacaggcacctgctaccgcgcctggctaatttttttgtgtttttagtagagacgagatttcaccgtgttagccaggatggtttcgatctcctgacctcgtgatctgcccgcctcggcctcccaaactgctgggattacgggcgtgagccaccatgccaggccaacgctgtttcaaaaaaagaaaaagaaaaaagtggaccagaagccatgatgggattgggagtgggtgaagccatacattttccagctcagacaatggattcataaaaggactccaggtctttggacaccactgcccgagagattttccttcagaatcctggccaaagaactccactgctcaaaatccttcaggaactccccagtaactcagagtcaagtctgaattctggcctgactgccaaagcctccctcagctggcctcatcaccccatctctcactcttccaaacgtccttggctctctacccacattgagcttttcctttttctgaatcagttaaactcttcctcatccttcaagtgtttctttccaagggctctgcctctatgcaatctctccacctaccctaggcagggtcattgtccctccttcagattcccagcacctggctggcgtggtggctcacacctgtaatcccagcactttgggaggccgaggcgggtggatcacttgaggccaggagttcaagaccagcctggccaacatggcgagaccctgtctagcaaaaatacaaaaattagccaggcatggtggtgcgtacctataattccagctacttgggaatctgaggcaagagaattgcttgagcccaggaggtggaggttgcagtgagccgagattgcaccgctacactccatcctgggcaacagagcaagaccctatctcaaacaaacaaacaaacaaacaaatctacctcaggaccgctgcggtggctcacacctgtaatcccagcactttgggaggctgagtcgggcagatcacgaggtcaagagattgagaccatcctggccaacatggtgaaaccccatctctactaaaaatacaaaaaattagctgggcatggtggcattgcctgtagtcccagctactcaggaggctaaagcagaattgcttgaacccaggaggtggaggttgcagcgagccaagatcgtgccactgcactccagcctggtgacagagcaagactccgtctcaaaaaacaaaaaacaaacaaacaaaaatgctacttaataccatctagggactgttaagaatctggaaaggggggctgggtgcggtggctcatgcctgtaattccagcattttgggaggacagggcagtcggatcacttgaggccaggagttcgagaccagcctggccaacatggtgaaacccccgtctctactaagaatacaaaaattagccaggcatggtggtgcacgcctgtaatcacagctactagggaggctgaggcaggagaattgctagaacctgagaggcgtaggttgcagtgagccaagatcctgccactgcactccagcc

SEQ ID NO: 1243329 - DNA, 4001 bp, Homo sapiens
tttttttgtatttttagtagagacggggtttcaccatgttagccaggatggtcttgatttcctgacctcatgatccgcctgcctcagcctcccaaagtgctgggattacaggcgtgagccaccacacccggccttgcactgttttttaatttttaagacagggtctcaatctgtcacccagactcaagtgatcgcagctcactgcaacctccaccctcaggttcaaacgatcctcccacctcagccccccaagtagctgggattcaggtgcatgtcaccatgcctggctaatttttaaattttttttgtagagatggggtcttgctgtgttgcctaggctggtcatgaactcctggcctccagggatccttctgcttcagtcttgctctgtcacccaggctggagtacagtggcgcaatctcggctcactacaacatctgcctcccaggttcaagcaattctcctgccttagcctcctaagtagctcctaagtacaggcgcccaccaccacgcctggcaaatttttgtatttttagtagagacggagtttccccatgttggccaggctgttttcgaactcctgacctcaagtgaccctcctgccttggcctttcaaagtgctggaattacaggcttgagccaccatgcccggcctcatttttgtactttttgtagacattaggttttgctagtctcaaactcctgagctcaagtgatccacccacctcagtctcccaaaaccctggattataggtgtgagccaccgctccaggcacatttttgtcttttaatgactcagcatttctcaaattttcaatgacaacatccctgtgaggtgctattatcaggcccacctaagagatggggaggggcgacaggctgccaaaggtgaggccacacgcccaggcacgcgtagcactgtgggtctgtcctgccgtgggccctacctctcactcacccaccaccatgatgttgaactcaaaccccatcttcatagccttgatcttcagctggtccagcacagcctcaatgcccacaggaccaagcatctcgcagggtggggtgctggggctggagggctgcgaggacaggcagggagagggggagcgcctcagggggtccatgggggccaagggttcgagatgcctgtcaccaggtgggtggggagaagggggtcactggggctcagaggagcccacattgacctctcctatctgaacccctatttgagcttggccgttggccaaccccctccacacttcatgcctctggtgtaccctaagtgcctgtagtcccaggggtgtggcaagggtgcctgtggggagctgtttctgcagggtgcctcaacacccatccagagaggctccgctgcccaagggtctgccctgtccccacctacagcccaggcaggggcctctcaggtcgcttcccccagcagagcctggagggccaggcaaagtccaggatgggtgtttgcagccaggctggagtcctggaggggcttcagggagtgtgtatggggtgaagtggctcccgtcccagcaggaaacttgggcagggggctcaggaggaggtgcccccactttccccagggggacacacagcagagttgatagagagcgagaaagacggcacaggcatgaaggtgacggagacagagagagagagaccaaggtcaggcagggaagatggctgggagggagcggtgcgaagagcccacggggggcagagagagagagaagcagcctgctgtgacacctggtggacgtgggtcctggtggagcttccaggagctgccttgtcctggcagggcctggtgtgtgtgatgggggaggggagagggtgacagttaaccgaagaatctgagctccatctgcacttgctgtgacccccacctggaggcttctctgcagcaggagcaggagctgttacccttctaatccccacaatgaccccagcctaataatacaataatccccaagtagaaccaggggcccaaggccccctcgtcagctgggctcccacctccaagctgacgccctcaaccactctgctggggtgagcaaacccaggccccacagctggctagcgggatatccgtgtccacgattggcgccatgtgttttaagttgcagcgtcaaaaacatgaagagattgctttagcaaatatttacccagtcctgactctgcacatggcatcgttctaggagcccaaagatgttaacttgtttaataatcaagccctgtgaagtaagtgctgttactaccccaagctgatagataagagagggtcaggtgaggaggtggcagagtctctgccgctctgagtctgtgtgctcaccctctactgcctttttctggtttacagaaacatctagatttccggtgtatcttagaggttatcaccctgacttgagatgccctctttaaataggccatgtgctttccagactgtggtcctcacccctgccttactgtctctctgataagctgtttctttttttgttgtttgtttttgagacagcctcgctctgttgcccttgctggaatgcagtggcgcgatctcggctcactgcaacctccgcctcctgggttcaagcaattctcttgcctcagcctcccaagtagctggattaccggtgtgcaccaccacgctaattttgtatttttagtagagaaggggtttcaccacattggtcaggctagtcacaagcttctgacctcaagtgatccaccaaccctggtctcccaaagtgttgggattagtgagccaccatgcctggcctttttttttcttttttcctttttttctttttttttttgagacggagtctcgctctgtcacccaggctggagtttagtggcatgatctcggctcactgtaagctctgcctcccgggttcacgccgctctcctgcctcagcctcccgagtagctgggactacaggcgcctgccaccacgcccggctaattttttcctatttttagtagagactggttttccctgtgttagccaggatggtctcgatctcctgatctcgtgatctgccctcctcggcctcccaaagtgctgggattacaggcgttagcccctgcgcccagccctttttaaaatttttttgagacacggtctcactatgttgcccatgctggtctcaaactcctgggttctagtgatcctctcacctcagcctccctaaatgctgagattacagacgtgaaccaccatgcccagcctgataagctgtttcttataccaagtccatctcacacagttaattctttcttgtttcctggtacttgacttcacaaggcttaggcattcctgtgtccttgctattggcaaatgttttctctttcttttttctttcttttctcctttcttttctttcttttttttttttcttttttgggacagggtctcactttgtcacccaagttggagtgcagaggcacaatgacagctcactgcagcctcgacttcctgggttcaagtgatcctcctgccccagcctccctagtagctgggacttcaggtacgtagaccatgctgggctaatttttttactttttgtagagatgaggtctccctatgttgcccaagattgtcttgaactcctggggtcaaggggtccagctgcctcagcctcccaaagcgccaccacactcaggctggcaagtgttttctgtaaagggccagatggtccctattttaggctttgctggtcctaagttctctgttgcaactactatgcaacttttcattgcagtgagaaagtcgccacagacaataggtaaacagatgggcgtggctgtgtctaagtaaaaccgtattcacagaagaaaggtggccgtggttccagctttcctgagccccaggccgacttctgccctttgctgtccactaccttctgccagttcttccttctggggaactcccgctccttcctggaggcttaaccttaaaggcttagaggctaggggtcagccaggtgcgttga

SEQ ID NO: 1243330 - DNA, 4001 bp, Homo sapiens
tctggctgagatcctttcattggaaacccttttattcagctatagtgccaagacgcatcctccacaccctcttaggactaccacaccaggagcccagcagacacttaccttaaacttagggactgggagggaaaagtctctgtttttggacctgacatggcaacgggggtcttggaggtcttcgactggtatatactttgagtcctaggaaggaaagcagcagcagaaagagagctcagggtgaatccaggctagggagctccaagcagcccatctggacacacacatgcagaagagctgggtccaactgcccactttcaagaaggcaggctaccgttctaggtgctgaacagaatcacagaggacgggcgcctggagctccccggatggcaaccaaagacccgggcactcacgttgacactgaagtggactccatcatagcggtacaccttctgagaaggcctgcgcagggcagggtccaaggcaggatccacgatgagcttgtagttccgccactggaagctcggggccttctgcccatctcccccaccttcctgatccatctttgctcatttacactgttaggggaagagggacacgcaagaaggatcaggacttggggcctgactcccctgcctttcctcattggctagccccgattccaggttctcccatcactccagtttccaaccctcaccctgacccggggctcccccggattctcccccaagtaccctctgtttcgccacaacaacccagcctctttccacctcccaactctactgtcaggcccccaggcccgtctcgagcccccttaccttcccgctctccctagcgcgcgccccacttggcctcggagcaagacccctcccccgccccctgcaggccccgccccctcccgcctcctcaccggccagcggcccgggccgagcccggccacggctcccacacacccgctctcctccccgcgccccgatcctccggccgaaaggtggcacctcttcggggcgttggaaacaccgcgagaccgagcccgagacccggcttcgaccccgaatccgggcgggggggtggggggaacgtgcaccgctgccctctcctcccgccccggcgcgttctgcaccccccccagcaggtctccgcgcacgcgcgccgcgcggccccactcacccgctcccggcgagcggctccccctccccccacctcgcgcggcacctcagcggcgcgaggcggcggcagcggcagcgcgagacccggccccgcagcggtggcggcggcggcgcccccccaccaccacctccccggcgcgcgcaccaaacaccactgccacctgcgcgaggcccagcgggcacagggtctgcattcgcactttcgccacaggcgctgccgggggacccacggggccgagggtagcggcttcgcctcggccggcgccctgggaggctcggaagttgcggcccagggagcttggagattggccgcatcccccggagagtcggcttcgccacgacgatctagatgctgcggcccgggaccttgacgaatcggcggcgacgaaagctgcgactagtccctgaggaaaaggggcggggcggaggggaggaggccagccagcgctggggaaccttcagtggcgcgttctgcagacgcagattcaccgggcgggcggggcgaatcgctggacaggatgcgcgccgctttgcttctcttccccgtcccttccttgcactgccaaattctgagaggctgcagattcgccactgttcccggcctcagccgtagcctccccttcatccgccttggtggagtcaagaaaataacggcccgttagccaatccctgctggcagagtcgacaactttttttggatttttcttactggcccaagtgagagaatagcccgcttctgtccctggggaaaatgcctccagcccagcgctcctctcagagtccgatgagaattttcagccgagtatcgagggacccgaggaattctgaggatccgacctggcgaatctgcggattccgctgtgggcggggccgagtcaaggggcggggccagggcgtgcagagcctgggactagggggcgcctccgggaggacccacgaggactcacccggatgggagggacggccgggaggtggaaaaacacaaccgtgagcggtgactcaggcggtttgccccgcctcgcacataaatgcagggtacctttccttcccgttattgcccttgggtgtctggctgcttaggatgcccatttgccagatggggagagtgaggcctgtagaaggtgccctactttgccgtactcaaacccaccattagtggttaaatccagggaccgcctcaaggttttctgatgagcctagtggggcctaagtgcccttaaatgggccttgtaataataaacgaggtcctacaggaacgggactggactggtgtgtcctcctggcgtcatggtcccactgcccgcttctttggctatggcgccctatgctcacgggatgcctccgcacaagggcagcagcggcccaggcctacccctggaactcgggctgaggtttctgaaggctgggcaccgttttgatcccgtgtgggcgcaggcactcccaggaggtcccttttcctgagctgaggatgccccaagctcctgatatgtgtacatcaggccctcgctatatggccttgggcaagtcattgacctaagtttcagagtcttcctttaaacttggatgtcaatttgtacacatccgaacagtgcagaaaagacccttagagcctggtttatgcaaattcaccattttaagtaataggaaaaggtggaagggagacttatccaaggtctcacaccacaagatagaagaagattaggactctacaattttgagggaaataaggctgaaaaaaataatttacgtggaggcataggtgttgagatcagattcctttctgttccagttgaaaggcactggttccttttctcaaatcaaagagagattcccgtgtgaggggtagatagtccaagttcagtttcatggactagctgtgtggttttgggcaagatcttcagccttcttgggcctgtttccttatctctgaaatgaaaatgataaagacttaacgcttaaggtgttgtgagagttaaataagataacctatgaaagtcccctagtatgtggtagttgctcaagaaagaaacttgaggccaggtgcagtggctaacacttgtaatctcagcactttgggaggccaaggtgggaggatcacttgagcccaggagttcaagaccagcctggacaacatagtgagaccctcctctctacaaaaaaaaaaaaaaattaattagctgggttggtgggacgtcctgtggtgccagctatttgggaggctgaggtgggaggctcatgagcctgggaggtcaaagctgcagtgagccaagattgcacagctgcactccagcctgggcaaaagagtgagactgtctcggctgggcgcgatggctcacacctgtaatcccagcactttgggaggccaaggcagggggatcactaggtcaggagatcaagaccatcctggctaacacggtgaaaccccatctctactaaaaatacaaaaacaaaattagccgagcgtggtggtgggcacctgtaatcccagctacttgggaggctgaggcaggagaatggcgtgaacccaggaggcggcgcttgcagtgagccgagatcatgccactgtactccagcctgggcgacagtgcaagacagagcgagactcggtctcaaaaaaaaaaaaaaaaaaagagtgcttatactaaacactcagggagggctgggtgtggtggctcatgcctgtaatcccagcacttcgggaggccagacaggtggatcacctgaggtcagaagtttgagaccagcttggccaacatggcgaaaccccgtctctaataaaaatataaaaattagccgggtgtggcggcacacacttgtaatcccagctactct

SEQ ID NO: 1243331 - DNA, 4001 bp, Homo sapiens
atggaactttcgcagatcaaagtgggaaaggaaaatggaggcaaggattaagaaataaccatacttactaatttctgatcctataaatgtgccatcttttcaggctactttttatatagaatagagctggtataaacacagctttatatcagttctaggatcgtcttagacctttggcctgtgaatgtcctcatccctccaaaacacggagactatcactgttccaggctgctatccacagagccacacacagtctgggctcactgatgtgatcagccagaaaggaatgaaacatggctatgcagaccactcaatgtctagcactaaataaatgatggtagtatagtttatcagaggattaaccacaacttactttgaggactttaaaatgtttcgcattcaaatgattctacagtaatatgcatactaaaaggacatacaggaggagctgatttcacctactcattttgtagcactagtaagagaatggagcctaagacacaatggcttgaatcatgctcaatcagtgcaccaagagaaactccactcaccgcagagtattctagattggcgttgtgattggctaagtggtttagtatgtctgcagcaggcaccatcacgggggagttgggctccttttcatcctcttcttcctccagtggttcctgaaagctgccattgacagaacctggctaaggccctgtcttgggtgagggactgggggtggatttcactgtttttccacttttgtccctctatagagttgtaaagaaaagggttccgtcctcagaggccccacccactgacctataggccatcacaagggccaccagctggtggtagagttctagggagcgaaccctgaggctgaagagatcggggtgggcttccatgaagggcagcacgatggactggtactcgctgcggatgttggccaaatccttctccacggcctcaggtacgcctgtgccctggagcaggcaccggcgctcctcctctggcctgcagggacacccacacccaggttcccttcattccttcacacactttactgggtaggactggtgcaggggcggggaaacttcttgcagcaggctacggtgcaggcgctccccaacccctcccaaggctctcaccagaacatcgggtgctccaagcggcccagctcgggccagagcgcaaagtagggcctccagcgtgaggccggggcctgcagctcgtggagcagcgccagcagcagtggcacccagcccgactggctctgcagcgcaactcgctctgaggaagacacaggtgtgagcgccccggcgcggcctcgcgggccgggcccgccccgccccgccccgccccgccccagggccctagcccgccgccgtgcccacctcgctccagcaggccgccgatggagcaggtgtgctgcgacaggagcgcggcccgcggcaccacgaacaacagctctccggcctgcacgctctcccgggccaccatgccgtagccggccaccgtgccctgccggctgaccgccacctgagcaggagggctggtcagggcagcccgcgccccgccgcgggtcctccgcccgccggctcgctcgctcaccttgggactcagctccagccccacccgccggcaccagctcaggaagcaggccacaggatccaggtcgccgccgtccacgggccccgccacctgagataagtgcgcgcagtgaccaggtccgacccccagagaggccgctgggaactgcaggagaccgcggcgcgagcgcagaacgggctttgggtggaggaggggacgagcggagaggggcgcgggacccgcgggagggagcggagggggcgcaggcggacggttctgcgaacggagaaggggtgaggcgcggaggaaaaggctggaccccgcgcccgccactcacccgtggacgcttcgcctgggtcgccatggtctaagagcgcgtttcctcgcgggccggcgcaccgcgcggtcacttccggcgtctctggccccgccccggcgccggaaccacgtggtgcctgttttgtcgtccacgctgcagactggccggagttaccgcgggctggaatcgttcctcatgaaaacatcttgagtccaggatctccaattgcactcacgcgctgcgagtgcagaaggagagtcccgtgccgcttggcgcctggttctgagccaggtacagccctggccttcggtctgtccccgagggctgaggcttcttgcggtctgggtgcaagaacaaaatacggtttctggatcggaagccgagggtctggtggccggccggtggtgagcgacgcaactgggcggcgagcgacctcctgatctcgaccccttgttgccgatggccatggaacccttttactggtggtattcgttcagagcagttttcgtgtgtgtttcagagtggcgtggcctagagggctcctggatctagaatagatcctctctgcccttatttgccagtacatcctcgtttttaatctgctgcatagcacgtggtgggttttattagctgacatagtagggactcaatatctacctattgggtaaataaatgaataaaacaaatggtggttaaacctggggaagtagcatgctgttaaatgtaagaaaatgaggctgtgaatatagaggttacaggaatgggttttgaagccaagcaacgccgcagctcaacactcagttttttttttttttccttttttttttttttttttttggcgcgttggggagacgggagtctcgcccaggctggagtgcagtggtgcgatctcggctcactgcaacctccacctcccgggttcaagcaattcccctgcctcagcctcccaagtagctgggactacaggcgtacgctgccatgcccagctaattttttgtgtttatttttagtagagtcggggtttcaccgcgttgcccaggctggtctcgaactcctgagctcaggcaatccccccgcctcggcctcccagagtgctaggattacaggcgtgagccaccgcgcgcggcctggtctgttactcaggcaaatcctttttcctgaaccttagtctcctcacctgcgaaactaagataatacctactctgtagaattaatgtaaggattggtatgttgactaaagaaaaaatattaagcttttaaataattaaaattagttttatttagaagccttattgaggactatagactgaggcctgtagcccaggagtaatcttgtgaggctcctctaacacggtattttagtttaggttatacataggtgaagatttagtatgtgtaaaatcatatcaaagtttagggataagtatatctggttatagattgcagagtataatcattaaccctgtcagacatgatcgtatgtttaggagaaggcaaagagtaggtcatttatctttgaaggaatgtagtgactcaggcaagagatttggagggcaggggtgttttgttttgtctttaaggcatttttttctggagagctgtattttgtttttttgttttattttgaggcagagtcttgctctgtcatccaggctggagtgcagtggcacgatctccactcactaccacctctgcctcctaggttcaagcgattctcctgcctcagcctcccgagtagctggtattacaggcacgcgccaccatgctcagctaatttttgtatttttagtagagacggggtttcaccatgttgcccaggctggtctcgaactgctggcctcaagtgatctgcccgcctcagcctcccaaagtgctgagattacaggcttgagccaccgtgcctggctgaggagagctgtattttgtcacagagtcaggggagaaatgagcacataagcagaaatgagcacataaggcttttaatgtttgtgacattctcatctcaccggtaaaataatgtgacgtgtactggaaatagaaagatgggtggagaccatcctctcctagcaccctcaacccaaaacccaagcagcaccagcagccc

SEQ ID NO: 1243332 - DNA, 4001 bp, Homo sapiens
tccccaccccagcccctacctcctcccaaggcttccacagcctgagtcccccctctttctcttctggtcccttctctccacccagccccttccaccctgatactcctctccctgagcctctctctctgcctcctcactcagatcacgttctctctctggttatctcctctctcctctgtctcattctctctcgaactctttatttccccatttccctgtttagtattctgattgcactctgatttcatgattcgagatccactagtttttgtgtttcattctctctgtctctgtcttccaccatttctctgagtctggttctctgaatttccatctctgtttctatgtgtctgtttttctgtctgactgtcacctaatcattctgtctctgtctctctggttctgtctgtgcccaggtttgactttctctgacagtctcgttctgtgttccctgaatctcacaggaatgcaggctctttcctctgcagtctctctctgcctgctcttctctagcctggctccccatctccctgagcccatatccctccctctgcctctaggccactcctgccactctgggggcctcacctggcaggtagcccatctctgggcccctcctcagcagggccccatgaagcagttcagccagggcctcagaggccaccgtgggggtctcacttccaggctctggcaatatctcctcctccttcaggggcagacctaggaggtgaagttgtgtgagcttctccacttccccacaccccttccttctccagagagatattttctagaactcttcctccctcctccatcagctgggcctgcaggggctcagatggtcccaggctcgactgagggccaagatcggaggaggggctcccagctgccctcatactcccactcccacacctcttctctcccctcccctctcccttctccctgggctgtgtgggccttcattgaacaccttagctcttatggaccctggacagcgccagcaaggcagaggggtcgccggtgctgccttccctttcacctcagtggtgatctccccccaaccctggggctctgcagaggatctggccgcacctcccagcccttgcttccgcagtgcctggctttctctctgggtttctgtctctgcagtgtggctgtcttttctctctctctctctctctctctcccccccaccctctctctctctggtcctctgcagtctctgcctccttccctggagtctggctgggggtcagagtgggggactgaaaatctggtctttgagccctgcctctgctcatctgtctttgtccattcatccaagaacagttgtgtgtacagcgcctggcatctctctcagcacctccatctcccacccaggtccctccatgcttctgccgcctccgcagacatccccccaactttcccagccctccttcttggatctagcccctgagacactgctaaaagcttctctcattcatttctctgccttctcaatattgagggttaaggggcttcgggttcaagcctgaaagctctggcttgccccttccccatcagctgtgcctctcccctcccccatgtgctcggaagacccaggatattaagagaaaggagggtggaggaccccgctggacgccttcctggggcccacccccacagtctcatgtccttaccctggatccagggacagctcagcagaattaggaacagcagctggggaggcggcgggtgctgggccctgggagtccccatggcgactcaccccgatctctctcctctgtgcctctctaagtaatctggctgccacctttcctccgtctccgtttatctttccctttaattgttttttttttttttttttttttcctcgtaggagtcagcaaagaaagacaatttctctgccccttgggatggaggggcagaattgggctaggggtcgcctggagcccacccccctttgctcagtctcctctgtcctcttctcgcggctctgtggtggagggggcgcggctccggctgcagggggtggggccgagagggccgaaggggccgggtggcctgggttaccctcctgctcaggcgcctgggtccactgggctgtctggaccccaagctaggggactggggaggagaaagacagcttctgggggtttagggtggggtcgaggatcgagggggtctccactgggctctagcggggcttgtcggggaggggaaggggtgggttggggaactgggagagccgaagctcgggcactggagctgcgggagggagaagctgagaaaggtatcgagcccacgtcagatcctggggacgggcggagggaggggcctgggatttatttgacggggagggaggaggaggaagtgcagatggaggagggagggatcatacgagccagggccgtaatcctcactcccgcggcccctaggggaggcaaaggaaactctctggtcccagcagtaattagccccctccgcctgccattccagcacatctggaatctgaatctcctcttcccagggtgccgaggggctgcatagcttggttcgcgcctgctaggcccccaattatgccccctgttcacattcagacctcccaaggggcttcccttccccttttacagtagctcgggtggaatgggctctccctcctccaggggaatagagagcttccacgattgtgacaagtctcgtgggtgacgggccggggtttggggaggagagacagacccctcctcttccataaaccctgaccccggccagctaacaggcggcctcggctctgattttccctccggagcgcccttttcagcaccagcggcgcgcggacagctcccctcgccccgccggggcgggcccggcccgacgccgcccgcgattggctgaggccgctttcggtgtttgccaggctcgcgggctcccgggctgcctagggccagcgggagtcacaggccgaccgaccgacggaccagccgcccgacggactggcctcagcatccttgcccgcagtcccgggcgcctgcccagccgtcagtccgcgctcgccccgcccctcaggccccgcccctcaggccccgcccgatacgacccgccccttctttcgcattgcgggacggctggaggctggcaccgtggcccctgcgccccacgtggcgccctttccgggcggggggggtggggaggcacctccagcgacaactctcccccctcccccggcacccggctgatttgctgtgccactgggagggttcgggggtggctgagctgagagggctccgggaaggagtgacgtcagggtgagtgggagcccaggaaggagcgagtaggagagagggagcgagagccaggcaggaccgcagggtcggggctagtgaggagcgagggcaaggagagagcagtgaggccggagagaaagaagctgccgcggaggaagacaggctgcgggttcccgggactgcaggtccaggcagggtaggaaccgctgcccaggggagctaggaggaagcggggagagagagcgagcgaaaagcgggggtggggaggaaagggggagattgaggtgggagagagaagcagagcgagagagaggaggctgctggaaggagaaagaagagggtgaggaggcgacagagggagaggaggaagaagaggtagaaggagagagaaaggggagagaaaggagagaggagggttggaggtgcatgaaggaggggagagggagcttcagcgtggagagaggaccgcggaaggagagagagacagcccagagtggaatgtggaagggaaacagtccagcggggagccagggggcagccatggaagggacaggtggggagctggggggacaggggaactggggtccggaggacgccccaggcctcttggccagggcctccctgatcatgctcccgtggccactacccctggcctcctcggccctcaccttgctcttcggggccctcacttccctgttcctctggtactgctaccgcctg

SEQ ID NO: 1243333 - DNA, 4001 bp, Homo sapiens
tcaccatgttagccaggatggtctcgatctcctgacttcgtgatccgcccgcctccgcctcccaaagtgctaggattacaggcgttgagccaccgcgcccagcccatagactaaggtatatgtttaacgttctaggaccacagtaaaacatgaacgaaaaggaccgatgttgaaagaccagggagtggagaaacaacaaaaaaagcaaaagagaggaagctaggagctgcttctgaatccctgaacagctccccgcaagttacttttcatattttgtagctgatcaaaacagtctactttcccctttccttataactgatacaatccattacaaacctttggaattcattttttcccaaatctagttggattcaggttctccagcgacaccttaactttggatcgtggaggaaggtgcatttcggaggatcagtccagtactagaaaaactatatacgaggccaggcgcagtggtggctcacgcctgtaatcccagcactttgggaggccgaggcaaatgggtcacttgaggtcaggaattgagaccagcctggccaacacagtgaaaacccctctactaaaaatgcaaaaactagccgggcgcggtggcacacgcctttaatctcagctactcgggaagctgaggcgtgagaatagctagaaccaaggaggaggaggctgcagtaagccgagatcaagccgctgcgctccagcctgggcgacagcgagacttcgtctcaaaaacaaaacaaacaaacaaaaaatacataccagataaatttggtaagctttaaaacttcccccacgtctgggccgggcgcggtgtctcacacctgtaatcccaacactttgggaggccaaggcgggtggatcaaggtcaggagatcgagaccatcctggctaacacagtgaaaccccgtctctactaaaaatacaaaaaattagctgggcgcggtggcgggcgcctgtagttccagctactcgtgaggctgaggcaggagaatggcgtgaacccggaaagcggagcttgcagtgagcagagatcgcgccactgcactccagcctgggcgacaaagcgagacaccgtctcaaaaaaagaaaaattagccgggcgtggtggcacgcgcccgtaatcccagctagtctactcgggaggctgaggtaagagaatcgctggaacccgggaggcagagatggcagtgagccgagatcgcgccactgctctccagtctgggcgacagactgtgactccgtcacaaaaacaaaacaaaacaaaacaaaaaaaacttcccccacgtctgtttaccattattacaaaaagcttgtatgattgctcactgcatcttctccatcctccaaggaaacatcatcgcatttaaactctgtcctccattacgcaaacgagaaaatagaggttcagaggaggagacaagttgcccaactaccaaaatacaaattcaaaccggagtcttggctctaaagactgtttccgttatttacgcttttaacacgctccatctttctatcttcccctcggtgtaccatttactctacccagagggagacatccatgcctcccgctgcttgtcacacctcccccgtctcagagtccccagaagttaaaagcaatctccacgagccctattttgagatagaatatgttcccacactgtggatggaagcgagagataactgcaggaagccgttttggcgcctcaaccatccctcggtacctcctcctggtccccagcctctcgggcctagactgcccgtgacccccgccaaagtctcgggtcccccttccatatggccggtctccgcctccccgggcccggggaagtctccaggctgtttttttaccctgcagcgagaaggatggtgtggatatccaacggatgctacctcccttcaaaacttaagccaccaccaactccaacatactggcgtccgccattagacctcaagacagggacattctggtggcgcgcggcggaaaaaggcacccaatccgcgcctgaagaatatatataatttttaaaaaatgcttccgtcttgcttccacacggcattacaaattatttaaacatgctttattgctttgctttttccaggagaatagaaaattaatacgtttttagaagtagactttaaaaaaaaaaaaccattagagttcattgggcacttctgtgggcagccccaaataggcgccaacgaagagggggcctcgcgggaccggaagtgccgaatggggaccaagatggcggaccttgattcgcctccgaagctgtcaggggtgcagcagccgtctgagggggtgggaggtggccgctgctccgaaatctccgctgagctcattcgctccctgacagagctgcaggagctggaggctgtatacgaacggctctgcggcgaggaggtgcggggtcgagcctcttctttttcatggaggatctagggagagtgggagccttcagtcgggaaatccgggctgtgggaaactctccttgctgggggatacaaaaaagcgggaaaacaaagaagcggaagctagtcgggtatatgagtagtcctgtcaactcttttcacgctgtcggacgcgccgagcttgtcttccctgatacctgggcgatctgcagcctctcctccctagacccccgttgatttccctgatccatgatcaccagtttctccacgggagtaaagttagtctgagagtatttgccaaattgcttggttctcaaaataataagcgcccttttgcattggcttaatttacaaattatgaaacgctctcatcctgttatttaagagggaagcctttgcagattaacttcttgaagcgttttaagacttcctcttgtggggagtgatttgggggtgtgattttagcgttttggtcaaatgcacatctttgtagaggtttagcttttaagactcagacacaattctctaatcttggacaagtcacttcatctctggtacccttgatattttatcaaatgaggggtgtggactattctccaattcctttcagttcataacgttctatttcctgcctcctttaattttcagtggcaactcgatgctgtcaattcactttcgaatgtcagttgggttccttgctagtcaaaagagatctaagctctaagcttgtcagctgtttcccagaccaaacttctagcaaagttgagcacaaaaggcagtttcagcctgagggagaggtgatcgttgatatctttgagtattttcaagtataaacttgcactaactctagcagtttctgatacgtttttcagcaagatgtgtgtggtgttttttgttttgttttgttatttttagaaacagggccgctctctgttgcgcaggctggagtgctgttgtgctgcaatcagaatggatgaaaccagaggcgcacaccaccgtgcctggctagtttagtgtgtggggctttttttgtctggcctcagcaagatgtgttttaaaatttagtatcttgcggggcgcggtggctcacgcctgccatcccagcactttgggaggccaagacgggaggatcacctgagtcaggagttcgagaccagcatgaccaaaatggtgaaaaccatcactactaaaaatacaaaactagccgggtgtggtgacgcatgcctgtaatcccagctactcgggaggctgaggcaggagaattgcttgaacctgggaggcggaggttgcagtgaaccaagatagcgccattacactctagcctgggcaacaagagcaaaattgtgtctcttaaaaaaaaaaaaagcctggcgcggtggctcactcctgtaaccccagcactttgggaggctgaggcagatggatcacgaggtcaggaaatcgagaccatcctggctaacacagtgaaaccccgtctctactaaaaatacaaaaaattagccgggcgtggtggcgggcgcctgtagtcccagctactcgggaggctgaggcaggagaatggcgtgaaccagggagaa

SEQ ID NO: 1243334 - DNA, 4001 bp, Homo sapiens
tagagggctttggagcaccttccccctaaaaaagggaacttttccagatcaccccccctctacatcggatcctccaatattcatgtcacacttcccatgagccattctagaggctcccacttggttatcttacctttccctgagaggtttcaaagacctctcgaacagatgaggaaaccgaagctcagaaaagtttcagaactccaagtctactgttttccccacttcatagtccctgtccccagggcccggctgggccagcctcagccatagcacctcaccgccccagctcgcagggggctagagaggagctgggattctagaccttagagagcctgcctcacgcatcttagggtccaactctttggagggggccgattcattaatgaggatggatgcatgatggaccaaaacagtaattgtcttgaaagctgaccccagagtccagcacccacgcactgcgtgaaggagatgtgaaatagctacagcccacttctttggtatcccttcagtctggggccagaggccgcaggggccccagaggagaaactgggttggctcaggtcaagtctttgctggcctcacgtaaacaaaacatcacagggagagctggggccctaggatttttcaccttcctcttctcccactggggagtatgccctaaaggcaggttagccttctggttaaggccatggacttgagtcagaccagggctcaaaccaccttatgagcacccagtccagccaccttatgagcgatgttatcttgaacaaattccacgtcctctctgagcctccgtttttctatctgttaaacaaagctaatgatccctcccctcgaaatgttgagagaattacatggaatggggtatgtcagcgctgaacgcaaagtaagcatccgctgaacgactgccattgttactatcttcatgtgggagaagaatattattgttccaattttctaaaatagaaattagagaaaggaggagccctctcaaggtcttacaactagaaagtggcagagctgggtgtggaatttacaacccttggctcttgttagcgctcctcccgccacgcaatactggaaggtgacagccccaggactggggccagagcagctcaggaaagcctccccaaaccctcagcgacctcagactcctgttcaaacctacagccaggctgtaagtcggtgaaccctccccttcctcctgggcctcgaccctacaagctcagatggctccaaccgcagggacaactccaaaccaacgagaaacaatcaggagatgcaggagtcatggagcacgggggaacccagccaagaagtgcaaaccaatctccagccagcggccacctcggctcacacaggcccacccaatcctccgcaccgcagacagacccagcccccttcaggcccgctgaccctgcgactcctaagctggtgactcagtttctcttctgccaagcaggactcagacacattttcccggtgcacctgcctcctggctcagttctgatatttcccgaagggcgggaggtggagggtgcaggctccgctctcggctcggaccctccgggcccggtggtccatatactccgatccgaccctactccctggacaccccccagccgcccattttccggggccgcatccacctcgggaccagccctgtctgctgcactctccggggccgagtgcctctccagcccccggccctccacgcccacccccacccaggaatcctctcgggcgccagggccgggtcgcggagagggaaaaggtacttgaagaggggggttccggttccggtcccacctgcatctcggtccccgaggttagctccggcggcggcggcggcggcggcggctcccgctccctgcgcccccacccactacgcgacgagcgcccagcccggttccgcgcaggcgtcaggaccccctttcccgtcgctgaaggaagagaccatagagaacagcggcgggagggaagggcaccttcatacttacttccgccatcctcccactcggcgccgaccccaggagaccgaagacggtgtgaatctcgtagggcttcagtgccttctccagttgcacctaaaagcgaccacagacgcagcgggggaagtgcttggatcccaccagagcgtcctcccggaggaaattcgggacaaaggggcgatgtcgaccatagagaaccggccttaggggatagagtcccagggcccggctgagggctagagtagccgccgagcaccggaaaccagcgagatgatgaggctgtgtgaacggcccgctgcagcctagagcgccggccccgctgtggaggggcacgcggacaacgccaccaaggagctgagcgaggaaagaagcgggtgaccttggggaggccctgcggggaggcggagcctgaacttacgaccttggtttatctgaggaaaggggcaggcggtccaggagtttgcatctctgaggctggagatgaagatggtggtagtggtgggggagggggtgggtagaaataatgaggtcagggccgggcgcagtggctcatgcctgtaatcccagcacttcggaaggccgaggcaggtggatcacctgaggtcaggagttcgagaccagcctggccaacatggtgaaaccccgtctctactaaaaatacaaaaattagccgggcatggtggcgcgcgcctgtagtcccagtccctccggaggcagaggcaagagaatagcttgaatccggaaggcagagattgcggtgagccgagatggcgccacggcactccagcccaggcaacagaactagaatccctattttaaaaatagaaaaaaaaaaaatgaggtcagggccgggagcgctggctcacgcctgtaatcccagccctttgggaggccgaggcgggcggatggcttgaggtcaggagtttgagaccagcctgaccaacatggtgaaaccccgtctgtactaaaaatacaaaaaatttagccgggcgtggtggcaggcgcctgtaatcccagccccttgggagaccgaggcaggagaacagcttgaacccgggaggcagaggttgcggtgagccgagatggcgccacggcactccagcgcgggcaacagagctagactccctatcaaaaaaaaaaaaaaaaaaaaagaattgaggtcaaggccggacgcagtggctcacgcctgtaatcccagcactttgggaggccgaggcgggcggatcacttgaggtcaggagtttgagaccagcctgaccaacatggtgaaaccccatctgcaataaaaatacaaaaattttagccgggcttggtggcaggcgcctgtactcccagctacttgagaggaggctgaggcagaagaatcacttgaaccccagagtcggaagttgcagtgagccaagactgcgccactgcaatccagcctgggcaaaagagcgagactccatctcaaaaataataacaataataataatgaggtcaattccagacgtgcttttgggacgtctgtgggcatatagtctggagctaagaagagacatcaaggccagttagagaaatcgagaacaattaaagtacggagggtagttgaaagcatgagcacagtgagatcctccacccatccagtgtctgattgacccggctccagctggcctaaacagtaaaggaagctatggcccaagtaatcgaaaagtccagagcggacagattcagacaggtgaacacaggggccagaagatatcaggaacctgtggctcaccatctctggttctgccttccctatgcatttggcttcaccctcaggcaggctctcctctcttagtggcaaaatagcttcttgtagctccaagcttaaaccctaatagcttagcaactctcctagaaggagcatgcctcttttctgagattcccaatgaaatttccagaactgagtagctgattggatcaagtgcccatcctggaactcgaagacaaataaataacccaagaggggaagacggataaatc

SEQ ID NO: 1243335 - DNA, 4001 bp, Homo sapiens
tgctgagggcgcaccggaggctgcatcccacccccagccagagacgtccgaccctacttcagactccgcagagagcaatggggaagggagcccaacacctcccttccctctcccagatcctggcaccctgcaggccccagccaactggctccccagcgtctaacctgccccgagcctgccacatttgcccccactttccttagctttggatccagcagtagagggctttggagcaccttccccctaaaaaagggaacttttccagatcaccccccctctacatcggatcctccaatattcatgtcacacttcccatgagccattctagaggctcccacttggttatcttacctttccctgagaggtttcaaagacctctcgaacagatgaggaaaccgaagctcagaaaagtttcagaactccaagtctactgttttccccacttcatagtccctgtccccagggcccggctgggccagcctcagccatagcacctcaccgccccagctcgcagggggctagagaggagctgggattctagaccttagagagcctgcctcacgcatcttagggtccaactctttggagggggccgattcattaatgaggatggatgcatgatggaccaaaacagtaattgtcttgaaagctgaccccagagtccagcacccacgcactgcgtgaaggagatgtgaaatagctacagcccacttctttggtatcccttcagtctggggccagaggccgcaggggccccagaggagaaactgggttggctcaggtcaagtctttgctggcctcacgtaaacaaaacatcacagggagagctggggccctaggatttttcaccttcctcttctcccactggggagtatgccctaaaggcaggttagccttctggttaaggccatggacttgagtcagaccagggctcaaaccaccttatgagcacccagtccagccaccttatgagcgatgttatcttgaacaaattccacgtcctctctgagcctccgtttttctatctgttaaacaaagctaatgatccctcccctcgaaatgttgagagaattacatggaatggggtatgtcagcgctgaacgcaaagtaagcatccgctgaacgactgccattgttactatcttcatgtgggagaagaatattattgttccaattttctaaaatagaaattagagaaaggaggagccctctcaaggtcttacaactagaaagtggcagagctgggtgtggaatttacaacccttggctcttgttagcgctcctcccgccacgcaatactggaaggtgacagccccaggactggggccagagcagctcaggaaagcctccccaaaccctcagcgacctcagactcctgttcaaacctacagccaggctgtaagtcggtgaaccctccccttcctcctgggcctcgaccctacaagctcagatggctccaaccgcagggacaactccaaaccaacgagaaacaatcaggagatgcaggagtcatggagcacgggggaacccagccaagaagtgcaaaccaatctccagccagcggccacctcggctcacacaggcccacccaatcctccgcaccgcagacagacccagcccccttcaggcccgctgaccctgcgactcctaagctggtgactcagtttctcttctgccaagcaggactcagacacattttcccggtgcacctgcctcctggctcagttctgatatttcccgaagggcgggaggtggagggtgcaggctccgctctcggctcggaccctccgggcccggtggtccatatactccgatccgaccctactccctggacaccccccagccgcccattttccggggccgcatccacctcgggaccagccctgtctgctgcactctccggggccgagtgcctctccagcccccggccctccacgcccacccccacccaggaatcctctcgggcgccagggccgggtcgcggagagggaaaaggtacttgaagaggggggttccggttccggtcccacctgcatctcggtccccgaggttagctccggcggcggcggcggcggcggcggctcccgctccctgcgcccccacccactacgcgacgagcgcccagcccggttccgcgcaggcgtcaggaccccctttcccgtcgctgaaggaagagaccatagagaacagcggcgggagggaagggcaccttcatacttacttccgccatcctcccactcggcgccgaccccaggagaccgaagacggtgtgaatctcgtagggcttcagtgccttctccagttgcacctaaaagcgaccacagacgcagcgggggaagtgcttggatcccaccagagcgtcctcccggaggaaattcgggacaaaggggcgatgtcgaccatagagaaccggccttaggggatagagtcccagggcccggctgagggctagagtagccgccgagcaccggaaaccagcgagatgatgaggctgtgtgaacggcccgctgcagcctagagcgccggccccgctgtggaggggcacgcggacaacgccaccaaggagctgagcgaggaaagaagcgggtgaccttggggaggccctgcggggaggcggagcctgaacttacgaccttggtttatctgaggaaaggggcaggcggtccaggagtttgcatctctgaggctggagatgaagatggtggtagtggtgggggagggggtgggtagaaataatgaggtcagggccgggcgcagtggctcatgcctgtaatcccagcacttcggaaggccgaggcaggtggatcacctgaggtcaggagttcgagaccagcctggccaacatggtgaaaccccgtctctactaaaaatacaaaaattagccgggcatggtggcgcgcgcctgtagtcccagtccctccggaggcagaggcaagagaatagcttgaatccggaaggcagagattgcggtgagccgagatggcgccacggcactccagcccaggcaacagaactagaatccctattttaaaaatagaaaaaaaaaaaatgaggtcagggccgggagcgctggctcacgcctgtaatcccagccctttgggaggccgaggcgggcggatggcttgaggtcaggagtttgagaccagcctgaccaacatggtgaaaccccgtctgtactaaaaatacaaaaaatttagccgggcgtggtggcaggcgcctgtaatcccagccccttgggagaccgaggcaggagaacagcttgaacccgggaggcagaggttgcggtgagccgagatggcgccacggcactccagcgcgggcaacagagctagactccctatcaaaaaaaaaaaaaaaaaaaaagaattgaggtcaaggccggacgcagtggctcacgcctgtaatcccagcactttgggaggccgaggcgggcggatcacttgaggtcaggagtttgagaccagcctgaccaacatggtgaaaccccatctgcaataaaaatacaaaaattttagccgggcttggtggcaggcgcctgtactcccagctacttgagaggaggctgaggcagaagaatcacttgaaccccagagtcggaagttgcagtgagccaagactgcgccactgcaatccagcctgggcaaaagagcgagactccatctcaaaaataataacaataataataatgaggtcaattccagacgtgcttttgggacgtctgtgggcatatagtctggagctaagaagagacatcaaggccagttagagaaatcgagaacaattaaagtacggagggtagttgaaagcatgagcacagtgagatcctccacccatccagtgtctgattgacccggctccagctggcctaaacagtaaaggaagctatggcccaagtaatcgaaaagtccagagcggacagattcagacaggtgaacacaggggccagaagatatcaggaacctgtggctcaccatctctggttctgccttccctatgcattt

SEQ ID NO: 1243336 - DNA, 4001 bp, Homo sapiens
ggcacacacgagggtcactgctgagggcgcaccggaggctgcatcccacccccagccagagacgtccgaccctacttcagactccgcagagagcaatggggaagggagcccaacacctcccttccctctcccagatcctggcaccctgcaggccccagccaactggctccccagcgtctaacctgccccgagcctgccacatttgcccccactttccttagctttggatccagcagtagagggctttggagcaccttccccctaaaaaagggaacttttccagatcaccccccctctacatcggatcctccaatattcatgtcacacttcccatgagccattctagaggctcccacttggttatcttacctttccctgagaggtttcaaagacctctcgaacagatgaggaaaccgaagctcagaaaagtttcagaactccaagtctactgttttccccacttcatagtccctgtccccagggcccggctgggccagcctcagccatagcacctcaccgccccagctcgcagggggctagagaggagctgggattctagaccttagagagcctgcctcacgcatcttagggtccaactctttggagggggccgattcattaatgaggatggatgcatgatggaccaaaacagtaattgtcttgaaagctgaccccagagtccagcacccacgcactgcgtgaaggagatgtgaaatagctacagcccacttctttggtatcccttcagtctggggccagaggccgcaggggccccagaggagaaactgggttggctcaggtcaagtctttgctggcctcacgtaaacaaaacatcacagggagagctggggccctaggatttttcaccttcctcttctcccactggggagtatgccctaaaggcaggttagccttctggttaaggccatggacttgagtcagaccagggctcaaaccaccttatgagcacccagtccagccaccttatgagcgatgttatcttgaacaaattccacgtcctctctgagcctccgtttttctatctgttaaacaaagctaatgatccctcccctcgaaatgttgagagaattacatggaatggggtatgtcagcgctgaacgcaaagtaagcatccgctgaacgactgccattgttactatcttcatgtgggagaagaatattattgttccaattttctaaaatagaaattagagaaaggaggagccctctcaaggtcttacaactagaaagtggcagagctgggtgtggaatttacaacccttggctcttgttagcgctcctcccgccacgcaatactggaaggtgacagccccaggactggggccagagcagctcaggaaagcctccccaaaccctcagcgacctcagactcctgttcaaacctacagccaggctgtaagtcggtgaaccctccccttcctcctgggcctcgaccctacaagctcagatggctccaaccgcagggacaactccaaaccaacgagaaacaatcaggagatgcaggagtcatggagcacgggggaacccagccaagaagtgcaaaccaatctccagccagcggccacctcggctcacacaggcccacccaatcctccgcaccgcagacagacccagcccccttcaggcccgctgaccctgcgactcctaagctggtgactcagtttctcttctgccaagcaggactcagacacattttcccggtgcacctgcctcctggctcagttctgatatttcccgaagggcgggaggtggagggtgcaggctccgctctcggctcggaccctccgggcccggtggtccatatactccgatccgaccctactccctggacaccccccagccgcccattttccggggccgcatccacctcgggaccagccctgtctgctgcactctccggggccgagtgcctctccagcccccggccctccacgcccacccccacccaggaatcctctcgggcgccagggccgggtcgcggagagggaaaaggtacttgaagaggggggttccggttccggtcccacctgcatctcggtccccgaggttagctccggcggcggcggcggcggcggcggctcccgctccctgcgcccccacccactacgcgacgagcgcccagcccggttccgcgcaggcgtcaggaccccctttcccgtcgctgaaggaagagaccatagagaacagcggcgggagggaagggcaccttcatacttacttccgccatcctcccactcggcgccgaccccaggagaccgaagacggtgtgaatctcgtagggcttcagtgccttctccagttgcacctaaaagcgaccacagacgcagcgggggaagtgcttggatcccaccagagcgtcctcccggaggaaattcgggacaaaggggcgatgtcgaccatagagaaccggccttaggggatagagtcccagggcccggctgagggctagagtagccgccgagcaccggaaaccagcgagatgatgaggctgtgtgaacggcccgctgcagcctagagcgccggccccgctgtggaggggcacgcggacaacgccaccaaggagctgagcgaggaaagaagcgggtgaccttggggaggccctgcggggaggcggagcctgaacttacgaccttggtttatctgaggaaaggggcaggcggtccaggagtttgcatctctgaggctggagatgaagatggtggtagtggtgggggagggggtgggtagaaataatgaggtcagggccgggcgcagtggctcatgcctgtaatcccagcacttcggaaggccgaggcaggtggatcacctgaggtcaggagttcgagaccagcctggccaacatggtgaaaccccgtctctactaaaaatacaaaaattagccgggcatggtggcgcgcgcctgtagtcccagtccctccggaggcagaggcaagagaatagcttgaatccggaaggcagagattgcggtgagccgagatggcgccacggcactccagcccaggcaacagaactagaatccctattttaaaaatagaaaaaaaaaaaatgaggtcagggccgggagcgctggctcacgcctgtaatcccagccctttgggaggccgaggcgggcggatggcttgaggtcaggagtttgagaccagcctgaccaacatggtgaaaccccgtctgtactaaaaatacaaaaaatttagccgggcgtggtggcaggcgcctgtaatcccagccccttgggagaccgaggcaggagaacagcttgaacccgggaggcagaggttgcggtgagccgagatggcgccacggcactccagcgcgggcaacagagctagactccctatcaaaaaaaaaaaaaaaaaaaaagaattgaggtcaaggccggacgcagtggctcacgcctgtaatcccagcactttgggaggccgaggcgggcggatcacttgaggtcaggagtttgagaccagcctgaccaacatggtgaaaccccatctgcaataaaaatacaaaaattttagccgggcttggtggcaggcgcctgtactcccagctacttgagaggaggctgaggcagaagaatcacttgaaccccagagtcggaagttgcagtgagccaagactgcgccactgcaatccagcctgggcaaaagagcgagactccatctcaaaaataataacaataataataatgaggtcaattccagacgtgcttttgggacgtctgtgggcatatagtctggagctaagaagagacatcaaggccagttagagaaatcgagaacaattaaagtacggagggtagttgaaagcatgagcacagtgagatcctccacccatccagtgtctgattgacccggctccagctggcctaaacagtaaaggaagctatggcccaagtaatcgaaaagtccagagcggacagattcagacaggtgaacacaggggccagaagatatcaggaacctgtggctcaccatctctggttc

SEQ ID NO: 1243337 - DNA, 4001 bp, Homo sapiens
cctgttcaggccaccagaagtacttgacccacagatgaccaaagtgtactcaagggtctactgctcacaaacactgatgcacatgaaccttagaaggcatcagtaccttactggttatgtgacaatgcctcagcttcctcacctataaagggaagataatagtacatccacttcaattaagaagattaattgttaataatttacaacagtgcctattacataatgtatatgtttgttaaagaaatagtagtacttcagcaccattctttttttttccagcaccattctttatagctttatggaggtataattaacatatagaagttatatacatttaaagtgtataacctgatggccaggcacggtggctcacacctgtaatctcagcactttgggaggccgagatgggcggatcacctgaggttaggagctcgacaccagcctggccaacagggtgaaaccccgtctctactaaaaatacaaaaattagctgggtgtggtggcgggcgcctataatcccagctacttgggaggctgaggcaggagaatcatttgaacccgggaggcagaggttgcagtgagctgacattgtgtgccactgcactccagcctgggcaacagagtgagactctgcctcaaaaaaaataaaataaaataaaaaataaagtgtgtaacatgatgttttgatatacctatacattatgaaatgattaccacagtaaagtgaattaatatttccatcacctcgcatagttaccttttgtgtgtgtgtggtgtgaacacttatgatctactctgttagcaaatttcaagtacaaaatttgtgtcgcattgcaccatcacgtcattgcctattaatactgtaataataatacagtattattaactatagtcaccatgctgtatgtacatcagatccccagaactattcacactgcataactgaaactttggaccctttgcccagcatctccccattcccccaacccactggcaactaccactctactctctttctgaaacttcctcttttttagattcccaatataagcgatgccatgcagtatttatttttgcagccactttaaaaactttatttcacttcaacttcaccacaagtacaaccattggcatagtcttccagatgggaaaactgaagccaagtgacttttgccagttggataggtgggttaatagtggaattgtcacacttatgttttctcactttgttgggactctctgctacacaatacaaccgaaagtgttaacgtaaaaacatgaaccagcttaaaatatcagaaaaaaaaaatagtaatgaaactctatgaggaggaagaaagggcagagaactagaagaccccggttctatttctggactccggcccaagttggcgctcctcactttggacacgtcactaccctccgtgcacaggacagccatctaagccaagggttcaagcttttctcttcttcggaaaagggaagtgtggttcgtgatctcctttgagatgcagatgaaaaaatggccccttgagcaacagtaaatgcacagttcccgcaaaacccatccagatagggaattcctggcccaatccagctccctccaacctcggggcgggcggaggccagagagtgcagggagagtgggagatgcggatagggaagagagggagtcccccacccctgggtaccgcccgactttgaggtcccgtcactgggtcccggccgcgcaccgccgttcccgccaccctggacagacgggtccggaaggcccgcgacccaggcgccctcctagggtcccgacgccccaggcctccgctcagaggcggctcctcggccccggcatggagagctcacctttctccagagacgccagctcctgctccaccgcccagcccatgcgctccggcgccatggccgctgcctccagaccgccgcccgtcagcgacccgtcagccatttcaaatttccgcggacggcagcccaggcaacgacgtgatgacgcaggctctgctgatttgatagtcgggccgaggccgtggaccaattagagtccggccccgctccagcccccaccaacactgccccctcgccccaggctgacagctgttcttgttcaagtgcccggcctttgcttttctgggatgaacttgaagaaagtcgaattggaatataatttggaatgattttcgaaaaaaacgaaccagcaatgcctggaaatgagatatagtggaaaagtcactgggttgagagtcaaaaaacatagtatttaaacttacctgggctattcctagtggtattgccttgggcaagtcatttcacctcccacaagcacaacttcaactgaaaaggatgctggcctacgtgggcccaaaactttcaccaccaaacaccagtctctctctgtctttcaatacacacacacacacacacacacacacagagagagagagagagagagagagcatattttcaaagaatgtcaaattaaatttagtaagtaaatttgttaatttgcattaatcaaagacaactataatctccatcataatggctaacatttactgcatattgtgtgcaagataccctcctgcatgcgttacctggattgttctgtttaatcttcacaatgatcctatgagacgggagctattactatacccattttacaaatgagcaaatggagtcactaagaagttaagtcacttctccaatctaacccagcaaagccaggatgtgaaaccagccagactccatgaagaagccttttaatgtctctgccaggccatcactactagaatgatgaggtcagcccaagatagcccaggtaaccaggacaccaagtgggatgcgtccacaggggaccaagagcctggtcatgacagttcgtctgtgcagtcttaatgtggggaaacatttccacttattgctttgaagaaacaccttgggctaaagtctctcggatcccttacagctgaaataaaatggagccaggaggggtgactggaaagctgcacttaattgggctaacttttccaggaagtaagatttctttgacttttgtttgcagaatctgaccttacatttatttgctcactgaacaaatacatattgagcaccatgaggtaaaaacacagaaaacaataatcaagactatcaacaggccttgaggatgacgctagctttttcattattctcttcttcaaccttgccgcccacaaacctcacaaatggcagcatttctcctcacccatttgcagcatcactggagacaacacagttctcttctcatccaattatcaaatatttcatcaaccatcaagatattactcaaaccaggctaggcatagtggctcatgcctgtaatcccaccactttaggagaccgaggcaggcggatcacttgagtccaagagtttgagaccagcctaggcaacatggtgaaaccccatctctacaaaattttttttttttttttgttatagaaatctgtttaatggtttaggaatgtgtacactctggctctgccaagtttccataaaggcaacttttccatgttttaaaaaatagatttggtataaagatttgtatattcataaataggtggcatgaaaaattaccaaatgcaaatggaatacttgcgctgactgaagccctgttcaccccaagtccaggccctgcaggggtccgagggtctctgctggaggaggccccaactccggcagcctcttagggaagagaaactgaattaaatgtgtattaggaacccctccagctccttaagccagcgtcgcactggccccaccgaggcctcagcccacctccctctgcttccccccgccacctccaccattgccccctcccctgcactctggcccctgaccccacctgctcccactctttggcaatttatcaacaaaggaagagatgacactgttctccttccgccccagagcccgggctgccgggagagcttagcctgccaaggggaggaaacaagcc

SEQ ID NO: 1243338 - DNA, 4001 bp, Homo sapiens
cctctcccgcggccgggggcttagtgctcctagtggctgcgtcctccgcctccaaagttacggagtttgcgaatcgatttagacacttaaaataaaaaaaatttaaaaaaagcaaaaggcaaatagctccattaatcccccaaagccttctcccatctgctggaactagctggtgctggggcttgcataatgaacaaggcaaacccgaaagttgacgaaatcagggtgcttggaagtgagggcgcgcgaggagggggctcgggcccccggagtccacgccagccagggcaaggggctcaatctgcagcgatggccacggccccgggcagggagaagtggtggccagagaaagggatgaggtgggtaaaggggcgggggcagctgaggtcccaaatccagggacggcgaagctctgggaaagcgaggcggccgctccaagcaaggcttttgttctcgccctcccctcactccacctccctcgtctccttttcgcgagtcgtacgagttgcaggcggcactcactctgaccctccctccttcacacacgcgcgctcgggctcacacacgcccccctcccctttcgggctcgcctgcccctgtttaccaaaaagctagcacctggaatccgaggggtgccatggaccctctccccaaacccgaagatttcggggccacgggctcccaggctacgtgtctcaagtccgcctcagtcaccagcgggaggaggcggccagagggtgagggagcagagtcacacacacacacacacacgctcacacacacacgaacacgctcagacccacacctgtgctgagcccagcgccccttctccgtgttccaagccgaagttggcttcccggtgacatcccccagcggagaggctgggatgcggggagcggggaccgtggggagcgccattgcctgggggaaggtggggaggagagagcagggagagcgaagccccgaggggagggcgaaggggaggcagcccacctggacatgtgctccctttggggccggtgcgctttctccagccccagcttggtgaagatgcccacgagcaccatgacggccaccaccccgcagatgatgtagacgatcaggttggtcttgtccttggtggggtcgtgcaaggggtcgtccttgcgggcggggggcttgccggtgttgagccagagcggcgtgtcgtagttggtgcaggtgctttggttcagtcgccgcttcttaaacgtgcagcagaaccggaagccacaagtcccgcagcagaagatgaagtcgcccgagctgcagttgaacggcgggtcccactggcccatgacatcgaagtagccccggcagaagtccggcgtgggcgcccgggtcgggggcgcgtccgatgcctcagcgccctcgctggcctctccggaggcggccccggagcggttgccccccgccagcagcaacacgccgcccagttgcgccagctgcccgtgtcccgctcgctcctgcgcccggcacacgcgggcgcacagctcggtgaggaagcaaccgaggagcagccgaaggacgcggcgcatggtgtctcccagcccgggctcggccgctcggccgccgctggagcctctgcggccgcctctcgaggcgcggccgaagctgccgaggctgctgccgggagctgcgagccgccgcgggccgcacatgcagggagcggcgcggggcgctcggtggtcggcggccactgcgctcggctcagcccgcgttcgcctcagcccgcgttcgcctccagcgcgccgcgcgccgaggggccggccggggaggagcgcgcccggccgggcggggggaggatgagcggggtcaagcgcggggtgcaggtccggccggccactgggtgaggcgggggtggagagcagaggagaatcgggctggcagcgcctagccttggccggcagccccggactggccgcccctagccctctcgcagtatccctctcacctcaccagctcgccaagtgcgctgaagagagcgaagcgacacttgtggaatgaagggagggcaggagggaagggggagggggaggagggcgggcagaggaggcgcgggtgggggggggcgggcgcgagctctagaggggcgggggcgcggggaagaggtgactagagcgggagctagctggggggcgtgcagagctgagccaggcgagcggacggggaggagcgagctcggcagcagccgaggctagaggagccgctcggatttccaggcaggtggaaaaccgcggcaggacctcccgcgccctctctgggtaggaggcgcggctcagccctgtccagagcgcagaggcggctcagctcgtagctttttcaccggtgcgtgtgcaggagcggcggccgaaatctgtgcatcaggggaaggatgactcggagaggatggggacagactaaatggctttcactccaagacagactgggtgcagtctggtcaggatcgcccctcccaggcgtgcggggcctccttgcccttcccggctgcgccctccagccctgagcgcaacccgcatggctcaactctctgggcccaagcaaggacccaggcggagctgggaaggacaggtggcaagcccctgagccagggataagcaccctccgggggagaggggctcgggatgaacgaatcaaagaaggtcgggggtaagaggggacagccgaacaaggccgaggctatggcgtgtcctggaaggtctttccttggaagtcccccagcctctcgaacctgccgctttctgtccctcttcgcccccgcagcgttttctgcgctccacaggagggaacaccgcggcgccgcctctgcgctcccggatctggcgcagcgcaaggcctgggcacccagcctcagccaccctcccggacctggagcccgcgcatcggtctctggagctggctggcccctgtccccacggatccccccggaaatcctcaccgggggctgcagagctctgccttgcttcctcagcttccagcctcccgtctcctctgtgtttccaaatctgccctctctctcctagcgaattccagctccccggaggccctctctcatttctcccacctctttctctcctctgcttgaatttgactccagtagccccaaaacaggatttgcaccaaagctgctacaccaaatttagatctccccacgccccggcgttttgttttttaattgcattaactaagtatacactttgcaggctgctaggcgatttgcaaggagataatgtttccacaaccctcctctccacttggctgcagtcaagggcttctcagggcatcttcagagaacgaaaagttgggcgacatgtaaaatggtttactagggtcccctgaattgagaaagggtgggaggatttattgggactctgttgcaagttttctccaaatgagaagtttggctaatcgccccttctctttgaaaaaaaaagtcacattttgatgtttcaaaaaagatttgcaaacacacagcaagacattgacagggcatacccaggagtattatattccaaacccatctggggaaggtatgaacacgtttaatccagattcaccagattcattataatagaatccccaaaataggagagtatggaaagtctgtcatgactggcaacccacgcccaccaccaccttgtgagtcctacaaacacaagcactggtgtgtgagagctaatgagagctgacatttattcagtgcctgcaacatactcactaagcttgctttttctaaaagcagctcctcaagaaagcttagagcagtgcccagcgtatagcagacagtctggaaatatttgctgaaccaccgagtgactggtttcatgtaactctctctcccttaggtaatagtaccaggcccacacaacagagggagagaatgagccccaaagcagttaaaccagttgcccaagtagctctgccaaatgagtgccagaattgacatttgacccaagaaatttgagtccagaaactgccctcca

SEQ ID NO: 1243339 - DNA, 4001 bp, Homo sapiens
ggggtgaaaaaaaagatcagtcaatgtcctaagactgcactcctagtaactctactaagccataatcttttttttttttttttttttttttttttgagatggagttttgctcgttgcccaggctggagtgcaatggcgcgatctcggctcactgcaacctctgcctcccaggttcaagcaattctcctgcctcagcctcccaagtagctgggattacaggggcccgccaccatgcccgactaatttttgtatttttagtagagacggggtttcaccatggctggtctcgaactcctgacctcgtgatccacccgcctcggcctcccaaagtgctgggattacaggcatgagccactgcgcccggccactaatccatattacaaaattaaagcctcaaaattaatgttttatctcaattatagtcattctgttgcaaggaacttttaagaagcaatgttggttaccaatgtgaccaaataaatgcaacttaggtttagattacccaagtggttaccaactgatagcttaaatgagggctgagggtgacggaaaaaataaagattaattccacgtcactaaacgggtattttaaagttccagaggcaacaaaagtgacaattccatcgtaatgtgtctcatcatatggactcagaacatgaatcaactctcaatctgaagcccagtgtgacccaggtattctgtcccctgacaaaggactataagggagctctcctgtaatccagtttccctctcagtagattctttgtacatatgacatccattttatgtcacttgtaaaacagtgggctcagcattgccaaaacaccctggctgtatgctgtatgcctactgcatggtccagtttacttcagtaagcagcgtaacaattacaaagtggttccttgggcaaaaaacagtctagtcaaccaatgcctttcaaattactaaatcaaaccaaagaatcacatccaagggcagtaaactcagtttatatttaacacaatatagctacggaccaagcaaaacactgttgttcacaatttcttgacctagcaatagttatacatttatcaacaacagttcgggctcacattacaatatatctttgccattttccaaacactacagaaagcacattttaactcctattcaaagtgtgaaaaagaagcgaaatgtgaacggtatttcttgggaacggaggtattacaggacagcaactgctaaagcctctcaaagctccaagggtggaacccagctccatcttgaaacagaaaaggaatcccaaccacacaggcgccctgcagtaggaaccaaggacagccctgcagaagtcatgacgtaacctgaagtttgatttaaacagaaaaaagaacagcagcccaaatgaaacatgactgagaacctcggaaacgtctcgattctgctgcagccattccctaagccaggcaggttccactgactaatagcgttcaagtttcacagcctcagcaaaccatcctcttaatgtcaataccttttctcttccttgtcctggccgctggtaaacatgtgaacaagactcccctccaggagtacagagaaggtggagtagcctttcccgtcatgagaagtcaggccacgcattgcgtttcccccaagaagtaaaggaacaggcccctcctgggctctttctgctcctaagcacagaagacccaaattcgcgtctgaggtcaggatccaaataccatttacttctcagaagcaccagttacagaggtggagaaaggaagcctttccatccccaggaggcaaccacacctccctgtgagctcaaattcgactgcatctccaaaaatgggagccacagctgcgctgtcctccaatgtgccctaagctttcgtctgtctcccaagtttgttttctccagattcactgggtagggtcctgcccagctccagtggaggccacggatgcagggggcgacgcgctggctgagaaggaagtgcgctccctgagccagctcaagagttactgcaggagcctgcctgccgggagagccatttggagcctcggccggggctgggcctgcgttgggaacgcctactccaacccggggcgccagggccagttcagggcgcgcggcgcacagggcgatgcccgtcttgctcgcgcaagggtggggccgtgcccgcaagccccgccccccagccaaaggccgggggcgtgggggagcccccgccaccccgccgttgaccccatcccaccccagcgacatcgaaccttcctcagcatttccaccagtttaaaattaggtggaaccacgctattttcggtaggtcagaacagtcgaatatcggcagtttcttatggtttcgatctaagagctacagcgtatctgggaaatgcgtggccacactggcgctacgctccaggtttatcgtgcgaactctaaatttttagagtgaaaacattctccctaattcattcaacggctatttaccgggcatcaactaccatatttcctcaattctagctcacttcatttctactcctatcagcactatattttaaactctccttacccactgtgaaaagactttgcaggaaaagtagtaagcacacttctgccacattaaactcctacttaaacctcctaagagattatactctcttcccactctgggaaagccatcttaaatggcctcattaaacgcagagtagcttgttttgtttttaaacaagcactacccttgccccaataaagtcctgcgcctcagatttgcattgcatcagctagtgcgtgcagaggtttaacctgtcattacatcatgcttagggcagcctcaaaatgcagcaagagttggcagtgaggagtgaacccaatgcaaggaattgcagattacccactttcagcaggaaattttaactctaaccacttcctcactctattaagtgtgttcaatcacctcaacctcgttttacaatacaggctacacaaaacagcattaggaaaagaaatataattgaaaatagacacagtcagccccacaactactttttttccttttttttgagacagggtctcactctgttgcccaggtctgagtgcagtggcacaatctccactcaccgcagcctcggtcttctgggctcgagcaatcctcccacctcaatctccccagtagctaagaccacaggctggcaccaccactctcgttaattttctttgtaaagatagggagtccccatgttgcccaggctggtctcgaactcctgggctaaagccatcagcctgccttggcctcccaaagtgctgagccactgtgcccagtctatatttttattttctaatattttttcattcgacaggtcttaaatttccctagagaagaaaatttcatatagagaaactcttccaaacagaaccaaaatgtatacaacaaaaagatgactgattatttctcaagcaaaagatatttcactgtttaccaaactccaaaagatctgtacagagccttacagcacactctgaaaaccactgatctatggacaggcccctctacttaattaagtcagaaaagtggaagcattctagagtcatctacacttggattcagaccccggctccaccagttgttgagctgtaaaactggactgtttccagcctcaactggcttttgtctagattgagatgggtaatttatgtgtatcatggatggtacatattccagaatatttaagttttcagctgagacctgatttaattgccaagtcatcaattagtcacagactcagaatttgtagattccaagaaacacactccaaaagatgccttaaccttgcaaaggtgatcaaacatgtctgccaagaatcaaccaccatttaatttttagcacaataaaccttaattctcaactaggtagaatatttacactagttttacaaaaagctgaaaagttcacagaagtaccttaagacaagcccatagaatccaaaactggcaaaaatccaaaacttagcaa

SEQ ID NO: 1243340 - DNA, 4001 bp, Homo sapiens
taaattttcagaatgaaacactacacaaccaatttgtgtaatctactttgagtctcaagatctaccagtctaaagtcctcctaacaactaattaaaatcctctccaccataatttgagccaacaactcccagataaaattaccagaccattacatttgccaccacactacattctgctcttcagtaacttctaaaagtgatggtaacaccatagatacacactcaagtattcactgtcccacttttctaagttggttaactcaagtccttgaaagtgaactgatcaataaatctaaactagctaagagaagacctcattttaatcaatttgattttttttaatcacaaagatatagccattcaaatccccggccacagcaatttccaaaatgccaccatctcagaaagtctgttaatttatcatacaaatctccttgtcctttttaacaacaaaatgcattgaaagaaaaaacccagcactaaagatctgtgacctgatttcacaaattctggtctatgcactttcatcataccaacacatcatgccaagaaaacctcgtaagtttagctattaaactacagtcttaacagtaagcatttgttgagaacttagtatggggctgccactgctttcagtccacctattgtcatctcatcaattctcaacagggcttgaggtagatactgtcgttacacccattttgcagataaggaaagcgaagcacagagaagtatctgcccaaggtcacaaaccagtggagcaggatttgacccaaagcagacagtcggacttcacagcccgtgctctcaacatccaactgctgaagagttaacaatttacccttgacagccgctataagcaaaggtaaatgctcaactgctaggaagggacagtcagaacaccgtcccatatccagtatccatgtctctctgtttgtttatggcctctatgactttggcaaaagaagtacacacaatctgattttccgaacacccaagctggacttttctgaatgtccgagcaaacaaattatgtatctttccaggaacgggcagacagcgaaaacgaacctacgcatcggagtggcccaggttattcactttaagttataaatttgggagagttaagaaaggaccccaaactacccggcaaatgaaccctaggaaatgccaggtttataataagctagagcttccccggcacgccgttcacgcgctctcctctctaacgacataaacaagggaggaggctgcattcttcccactgcacaatgaagcctccggccgaagcggcaggaagagcgcagccccgtcccggacggctccagccgggggtcgggggcagagagcggaggccgaggcccgccgagcggcgcggtgcggcccgggcctccgggcgccgcggggaggagggggagggagggcagggccccggcagctgcccgcactcagctgacctccgccatgttggccgcacaccccgggaccctccacaacaaaggccggcacgagggcgcggggcgcgccgggcgccacccccggccgggcccgcctcccgggcgcgcgggggccgggccgccgccgaggcccttcccccgccctcggcccggccgcgcggggccgacccccgccgccaccccgccgggcccggggctccaggggcgggggcgagccggcttgcgaaggctgaaggcaggggaggggcggggggcggcgctcgaccgggcggcccgactccggccgagacaaaggcgccgccgcgccgactactgcccgcgccccggccgggccgcccttcccgccctccgccattaccgggcctgggcgcccgcctgtcggagagcccctcgccgccggctcctccctcaggccgggccccacttacctgtgggcggagagcgcgcctcggaccccggtcctggcaccaacgcgctccgtcgccaacccccgccaccgcgggcagcgccaccgcctcttcccggcgccgagaccgacgggacaccctgggccgccgccgcctctcgagagcgcgccccgcaacggccgccccggctcccccctggccgccgccgccgccgccgtttcgcgcgtcctcgagcccgccgcgcgcccccgctaaataccacacactgcggcggcggccatgaggaggcgcggccccgcgcgctgggagcctgggggggcggggctttcgcgggcgcgcaggcgcacaggcgttggcgcggccggcggcggcctccgcgggcgtagctgtgcgggtctccaaaggcggcagtaggtgcgggggctactcggctaccgttgctgcgcccgtgcaccgcgcattcaacggatcctggcacgtggcgctctggcccgcgagaagctagcgcttgcccgtcggctcagggcagctcctcccgcggcgctttgttccggggccgcgtgacccccccggctccggccggaggggtcgcccagcgggatgcgagccccaggctggccgccgccgcggccttgtgccctcccccttgttttgtctgctgatttagcccagcgcctccacggatccttcccaactccactcagtcccaaagaaaaagcggctgccctgcccgccgaccgggaccccacccctaaagagagtcccagcctctcccgaggttgagccgctcctcagcaacagcgggacgagcttcaaaagcttgtttcagctgaaaagtgggtaatggggaagcacgcgttttcctgtgtccatgctcatctggaaagtccctaattagggactctgcattccacttcttgaaataataaaaggaaaacatcacttgcaattctttgatgggtgctatgagcagaagcaagcatctgagacatttacaagccctaactggaattccatgtaagatctattaaaatggtattccgtccggacgcggtggctcacgcctgtaatcccagcacttagggaggccgaggccgatggattacctgaggtcaggagttcgagagtagcctggccaacatggtgaaaccctatctctactaaaaatacaaaaattagccgggcgtggtggtgcacgcctgtagtcccagctactcggaggctgaggcaggagaatcgcttgaacccgggaggcagaggttgcagtgaggcagagatcaggccattgcactccagcctggacaacagagcgagactctgtctcaaaaaaataaaaataaaaatagaaaaatcccataccgggcacgtatgtacaaattcccagtgtatgataaagtttatatgtgcaaaacactagtttacagtattcctaattacatgatttaaactgcaattttactttcacatttttggggagaagttatagctcctcagtacacgggaaggtcaatagagttcggttcacttcagtttagaggtaaattttccatttttacagactatgtgcttggcatagccatgtggccttgacctggtcgtgaagggcagaggagttctgtcctgggcgaggagcagctctggggtgagatgtgtttctcgcccccagaacccctgggccgctctgcaagcagtgaaatggatacggactaagagagaacttgccaacgtggcgattaaagttctaaacacccggctttgccaaagtcagattttgtcctccttatcccgcatcccttcctctacccaacagcatttgtccatctgaaaataacagtctgtctctggcccactgctgacagtcgaggacttaccttataaactagtggattctcttaaactgcaggggtgcccaggacacagtgtcccctgaggatgccgcacaccagtcttgaagtgctggatcgttgacgtcaggcacccagaagcaacttctgcctctggaattctcaaacgtgcttttcttggcttagtttgtgcctgctctcctctagaagagtccaagttacttcttactttccccacttcccttttatacaaaacaaatttaatcgggttaattccatctctgagaattcct

SEQ ID NO: 1243341 - DNA, 4001 bp, Homo sapiens
cttgacccagccgaagcgcactggctcctcggggttcttctcgctgctggtgcctgcctcgccctccaccagcccatcagtcatctcgtggctgggccggctgtcaaaggccagggcatgcaggtgtctgccttcctgctggcagcccagagaccacaagtcaggcaggtaggggtgctagggacggcgtctctgcatccagcccactgacctgcaccactgcgccccataccgagcaccccccgacccctcagcccactgggtgttgagctgcttgaggggcttttaaaatgctccctaggccaggagcagtggctcacgcctgtagtaaaagcactttgggaggccaaggtgggtggattgcttgagcttaggagttcaagaccagcctgggcaacaaggtaaaaccctgtctctactaagaaatacaaaaattagctgggcatggtggtgtgcacctgtggtcccagctactcaggaggctgacataggaggatctcttgaagccaggaggtggaggttgcagtgatccaagatcagatgccatgggagactgggagtcctgggcgctcctgctcataacacctcctccccctaggagagcagtggccttagaagtgattaggcagttgcctagccttgtaatgggcgacaggattattatcaccctggagaggtgaaagcttgtccaaggccacatagttggtccctggagggctgggtcttgaaaccaggcctctacctctggggcactgggaggtctcctagtttgtgccccaagtgactgacgccctcctctggggctttcttcctggcacttcatctcagtatggagccaagggccatgtcttggtttgctctggggtggagaaaaggcctgcgaatttagtaagtcttagcctcagaatcaagaacaattctgggctgggcgtggtggctcatgcctgtaattccagcacgttgggaggccaaggtgggtggatcctttgaggtcaggagttcaagaccagcctggccaatatggcaaaaccccatccctactaaaaatacaaaaattagctgggtgtggtggtgcgctcctgtaatcccagctactcgggaggctgaggcaggagaatcacttgaacccaggaggcagaggttgcagtgagccgagatcacaccactgcactccagcctgggcgacagagccagactccgtctcaaaaaaaaaaaagaaaagaaaagaaaagaaaagaaaaaagaacaattcagcccaattgtcatatgggaaaagtgaggccagacaggggtcatgacaatccaccttccagccctccactcttcacagtccagcctcccgggcagcaaacccggcgagccctctctctgaggtgaaccttcccaggcccttcttgccctgtctctttcaggggtgtgcaacctgcttgcatgcttctactcactggaagctcattacctctctaggcctcccactctagctttgggttgctagtgattggctaatatacattccaacatgtgcccagatttctgcagctccactatttcactggggcctctcaacccaggaagaagacgctcctccatccccatggcacagatgacagaactgaggctcagagaggttaggtagctgggtcgaggtcacacagcagggaagtggccagtcttctgagacagcacttaccttgaggaaggagtgcaggtcagccagtgtgggccggaccttccggggctcaccaggctgggtgctgttggcatagtgctcatatgtgggcaccacatcgatcgtgttgtagccaaaggtgcgcatgcagaaggtgctgctgtgggtcaggtggctggggtggctgctgtcataggcagctggtggagagggctcatcactgctcagcagtgtgctgatggtgaagcgcccgctgcacaaagtggcgtccccaggcgtctctgttgtgggcagttctgccattgtcgcctgggtgtccagggaggggccaggatccgcaaggacacacagggtggttttataggctgcgtctgcactggggaggaggcagggaggttggcctaaaccgcccgtggctggtgagcagggtccccggacagggccggaggcagaacaccatttgattgtggagataggggacccgccttggatctggagggctgggctggcccaaagccagccactccctgagtcctggagtggctcttctgagtctgggggcagcagagatcttcagccaggacccaagaaggagttgtcagagaggaccctgaggggccccataagggatcctagagatagcctggtggctttgtagcaggacgagctgcagtcaaaactcctcaaacaccgacttaaagaaggaaggggtttattcggccggggggcatcggcaagactcctgtctcaagagccgagctcccagagtgagcaattcctgtcccttttcagggctcacaactctaagggggtgcatgtgagagggtcgtgattgattgagcaagcagggggtacgtgactgggggctgcatgcaccgatcattagattggaacaaaacaggacagggattttcaaagtgcatttctataaaatgtctgtaatctatagattacataaccgattaggtcagggctcgatctttaactaccaggcccagggtgtggcgccgggctgtctgcttgtggatttcatttctgccttttaatttttactttttctttctttggaagcagaaactgggcataagacaatatgaggggtggtgtcctcccttagcctgaggacacactctgggtcctactctatgagagttcaaaaacctctcatattagtatttggatttaaaaaatttatttaatattgggaggctgaggtggatggatcaccagcctggccaacatggtgaaaccctgtctctattaaaaatacaaaaattagctgggcatggtggtgggcacctgtagtcccagctacttgggaggctgaggcaggagaattgcttgaacccaggaggcagaggttgcagtgagtccagatcgcaccatcgtactccagcctgggcgacagagcaagactctgtctcgaaaaaaaaaaaaaattatttagtagttttgaatagatgaattatataattttttttttttttttgagacaggttctggctctgtcacccaggctggagtgcagtggcacaatcgcagctcactgaagcctcaaccaccagacttcaagaatcctcccacctcagcctcccaagtagctggggccacaggcatacaccatcatgtttggctaatttgtttttactttttgtagagatggggtctcaagtcaccccaaccacctgaccctggatgcccaggctggtctcaaactcctggactcaagtgagtctcctacctcagcctcccacctcccaaagtgttgggattgcaggcgtgagccactgcgcttagctggtataatatttaaaaagatgtgtatatatacacacacacacacacacactctcacacacacacacacattagtctctctagctccaacctgtctcccaatgtctatgtgtacctccagagacatctacaagtaactccaaaccagagctcagcaggtcagaattgtaatccatatccaccaatagactgacaagccctggggcctgggaccaggcggtggcctccagggcccctaggcatcacccaaagtgtgggccatgtttccctgggccctgcctgcagggccattgggttataaagcttggggagccagcgcctttcctggctcctgaagccatcccagacagggcaccccagctcccataggagcagtcaccctaccagtgctggagcagatcaggacccgattttgccagcactctgaggccacaccttgcatgcaggtggcatgggagcagcactcttgttaccagaggtgcctaagccattgcagggaggcagtggtggaaatttgagctgtcaggggatgaaa

SEQ ID NO: 1243342 - DNA, 4001 bp, Homo sapiens
actgtgctttgtgccctctgaccctttgcagtccccaccaaggatcaaaatcactcaccggggctcagggtgtcccccatcctgtagacagccaaggtctggctggaaaggagtaagaggaggagaaagaggaagggaggcagtgggaggagctggcctagcttgcggggatctagcaggactcagccaatgtagctccaggtccctccagtcaccctgtaggggccaaggcgtggccaaggtggggccagcagctaggctcagctctgcctgcccactggtccaggctgatcctggggatgcagcccagtctaccctctggggagagaggtcctcccagggttagggaagcaggaatgctggcttttgctttgaccacttgaatcaagctaggggcagacaagggcatggaggctggggcactcacacagctgtcaagcctgtaaaacctctgcaatgtccagcagcccatgccactgtcctgtgctacctctgcacatggcagtcaagtgatacacacacatagccatcattcacattgggcatggatcatctcagtcgtgtcaccatcacagatggatcagaggtccagacaacgtcacctgacacgtgtcaaccacacacttcctacatatctccatcatgatcggtcacagatatcacaggcatttatcatcagtcaaatcaccatcctcatcactgtcaaccctgcaggaaacaggggctgtgagaatgccctgacctgaaccagccttcaccctgtgatacccacagctacacacttgtacaagcacaattacacatgcatatgccactacgtacacagacacatgtcctcagccgtgttcgtgctccgagggtgggccttaacaagaacagccctctggggggcctcctggggtaggagatagagaaagggctgtggagagacgcgggcacctgggaggaaggaggagggagatggggcttacctctcggccctggcacctaagttaaagagttaaggtgctggaatctcaaacccaggcttgactgcccctgggcaagttatataaccgccacccctcccttcactgcttcctaatgagagtaacagtacttatcccaagggtgatgctggaggattaaacgagttaactcacttcaagtgcctagacacgtccggctccatgtgagtgcttcactgaggcccactgtccctacagatctacaccggcgcactcacgggcagttacccatagaccccccagtaggcacactctggccagagtgcaggtaggcgcagagaggcacacggaggggtttgggcagttggggagcggatcgtctcaaaggcaaagacgctgaatctcaaatgaggaaccgaggcgagaaaaggatgtgggattcaccgaagttgaagggccgggaagggcctgagatggggtctcggccctgtccccaagccgggcggcccggccggctggcctccctgggcggccacgtctgcagcccccgcccggggcccacaggggaggagctggggtggagaaagcggccgggcgcgggcgccgggggccgaggaaaatcgtgtctgcgcgcgcagggcggggagccagtggcagcggcgcggtccaaaaaaagttgagtccgcaccgacgtgtgcgcgcaaggtcccgggataggtgcgggcgcgggcccgggatggcggccccgggtggcaggccccgctgccccgccacggcccctcagaacgcgccctcaccgtccgagtcatccagctcggcgcgctccccgtagtccacccaactgagcccctcgaggttgtcatagtcgccgcgcctcggcccgtccactggcaccacggtgaagtgaggcatcgtgcgggctcggccccgccgcacccgccgtcccagccgcccgccgctgtccccgccgctgtccccgccgccccgggccgacacgccccgcccgctcgcattcctccccgctgcgctcacttcctccgcccgccccccgggccgcccctcgggggcggagagcgggaggggctcggccggctcctcccagagcgggggccctggtggcgggaagacccctgggcgggagcactcctagtggctccacggcctgggggcgggcccgattcctgtgtgacctcgggtgagaggccgccctctctgagccccagatgcaacatttgtaaaatgggggaaacacacttccacctcggggttgttttagggctccgtgagatgggtcgcggagtgtcctggctctgcgccctgggcttacgaagcgctctgttacttagggacggggcagggtaggccggaccggcccaggactgcagaagccacctgcccagggcctcccaccaaccccgtatacctccttcccatttccagcgtctgcatcccatttctccgcgaccctgggaaccagacccccgcgaaggtcccgtcccagccctgggccctctagctgcagcctctcctgttggaggcagctggggattctcggtccctccccaggggctgctgcgtcctccgcaggaagaacacgcacacccacccttccccgccccgcttgcctcgcttgcctttttgggacagtgcactgggtgctgtagccaagtcccttcattttaactttctctatctcgcctcctgggtgttcctctatccaagccgtttacttatttgcttttaacgtttctttcactttcttctccactgcttcagattacttatctagctggctttactatttttttctctatcagaaaaccccagagcccatcttacttgtctatctccactcttctccctcgcgtggctcgggtggcgtcctctgactacgcctactgccagcctccagcccttggggtggggggtacggaatcagagccgctgggccccgcaagacgacccccgagcttaccaccctctgacccctcccccagggcccccgcagcgggcccgccgacctgacccccccgcccctcacgccaccttcggccgcccacagtagcggccttcctactggactccctgccctcgcccctgctcacgtagagccgcctcttctgaaggaaaatcctactagctccgggcccataaggccctgcccaatgcggccggaccccgacctctgcaggcgcatccctcgccacccacctcgcagcctcagcccttcaaatctctctctctcacctgagacctatagtttctgggcatcacccactgttcactctgggggacatctacctagcctctgtccctaccctcacttatcaaattcctgatccaggcctggcgcggtggctcacgccggtaatcccaacactttgggaggctgaggcgggaggatcacctgaggtcaggagtttgagaccagcgtggtcaaatagtgaaaccccgtctctactaaaaatacaaaaaaattagctgggcgtggtggcgggtgcttgtaatcccagctagttgggaggctgaggcaggagaatcacttgaacccgggaggcagaggtttcagtgaaccgagatggcgccattgcactccagcaagagcgaaacactgtctcaaacagacaaaaaacctccaaggccggcctggtggctcaagcctgtaatcccagaactttgggaggccaaggcgggtggatcgcctgaggctgggagttcgagaccagcctggccagcatggtgaaaccccgtctctaataaaaatacaaaaattagctgggtgtggtggcaggtgcctgtaatcccagctactcgggaggctgaggcaggagaatcacttgaaccacggaggcagaggttgcagtgagccgagatagtgccattgcactccagcctgggcaacagagcaagactctatctcaaaaacaaacaaacaaacaaaaaacctcctgatccaggaggtcttggtggggagcaccacctcccctcagatttctcagacacatgccctgccaccccaccccacccctcatctggactgggctgccctgagcc

SEQ ID NO: 1243343 - DNA, 4001 bp, Homo sapiens
tatggctgcacctctaggactcacgcctaccctccccacaaaaaagccactctagtcacctcagggaaccaaagagggcaaaagagtgatgtctgggacaagtgaagtctcccttgtctgcccaaaccctgatctccctggatggtcttcccctgaccccagtcctgcaagtacccacatcaatcgcggagatgggatcctgatcctccagcccatcctcaggcggggctgggccaaggccttcaccgcagaaccttgctgctttcccaggtcaggaggcctcccagagctcaggtcccccagccccaccggggtctaggcgatgatccctgctcctgcagccttctcgaggctgtgcttctacctgcctcctgcccacatttagcttttccctctctgtcagctcctttctgacctacacacagggagaagttgctttggtgtgagaaaggaagacgagggcccttgggggcatgtggagattaaggagcctcggccagatgtggtggctcacagcagtaattccagcactttgagaggctgagcaggaggatcactagaagtcaggagttcaagaccagcctggccaacacggtgaaaccccgtctctaaaaacacaaaaattagccaggcatgtggtgggcacctgtaatcccagctactcgggaggctgaggcaggagaatcgctgagcttggaaggcagaggttgcaatgagctgagatcgcgtcactgcactccagcctggggcgacagagtgagactccatctcaaaatgaagaaagagaaaaaaaaggcagattaaggagtctccattactcagccatgcagtggctgaatgcatgggtcagagtttaggagcttaaactacgtcttaaatccagatctcactgctcagcttgagtctgaagaagataaaactcaagtacagaggcagatatttgggaatctttccagagacgtatcccctaaagctgcaaatggaccaggactcagggaactagagagggacagagctggaagggtcaaccaagaaagacaaggaagaatccatgggagagcgaagaaccatggacttggagaagaaccaggagtggaaggaagaggagaaatcctgagttgggaaatcctaagcgggcgtttccttgctgaggggttgtaaggaagtcagaggtgaaccaccctggaggtagcaatgggggtgggattgtgagtggcctctggaaaggcagtttcagttgaaagggccaagggaactgcagcccggctgccatgagaaccaggaacacaagaggagatgagaggaagagcaagacagaggaggcccacgtgtccagcctgcctgcttagctaaagcctctgtgtgccaaacctgtggcccaaaatggctcctcagctacctcaaacagtgccaggttcctgtcatagtagtcaattcctctggaagcctccaagggggaaagaaaagggctgctctctctgtggttgccatgtcctgtgaagagagagggacaatcagggcctgcttcctgagccccccagcctgggccccttcccagaaagccagtccccaaatcatttctgtggagcactttggagctgcagtgtcaccaggttgcaactcagttttcacatggcaccgtgccaatgctcttgaaggcccagggatagccagagagaggccagtgaccaaaacctgggacatcattccctccagtgaagggaatccaggtgagggcgcaggcgccctagcacaagcacgtatggacactgagggacggggcctgcagaggggcggggccagcgtttgacccgcccccagatcgcctccacgccccagtccctttcccggtctttccggagtacccaatgtgcaggatgccaagggttcggtgtcctcagggaccgcccaggcagtgccctccagatagacgaagccgcacacagcaccttcggctgccatggcccaaaggtggccggctggctaccccaccatgcactgcgcggggggcgtcctgcagggcagcccggggcatgccgggaggtggggcaagccccaggccgtggagagcggaagtggattccaggagccttctagggttgcctaagaaagtcggacgggtgggtgtcggactgagcagggagaaaaatgggagctgggactgctggcaggagcaacacaatggcccccttgcccgcagatcccgccgcttgccccaggcaaacctccgcctacagccctaggctgatgagccagtgccccagctctgagaaatctcgccaaaaggagtgaaatgctccttttcaataagcctgcctcaactcccaaagctcgactgttttttctggcctcctatcattcattcttccctgttttccaactcttgtcccttatgagtctcggtgggtgccattcccagcttcccaccaagcagaacgccaagcactcgttttctaggtgctgagtgttccctccaccccagctaccctcgcagccccggccctggctcaaggcctcacagcaaatggaaagcacacatcttggtgttggatggcagcagtatgtagttctgacatgagaaggactggcatggtgtccagtgatggagatggcaacagaactgtcaccaccagcccaggctagtggtgtgattgggccatgcactggccatgcccgccaaccttttctgtttacataggccacaattcatttttcttgactgcagctgagaatgctgattgaggcatcctcctgtatctgatacatctcttgctatcagcatgaggcttcaattgctttctctgagccaacaaccactcagcaggtgctgtgctgtggattctttatcccccaaggaaactaacaaatcaagtgtgcccatgacagtttctggggcaaagtcagttcttccttcccacagcatgtgaaagtggcacacctgctacacccagcaacctggactagctaagtgagccaagcagctcagccccacattcacataggtcaatgccaatggcacagtggacaaaggcagccagaggtcaagacagtccaccgtgtcatgttaaagccaggcggggtcatgtcggacactctatgatatctgctgtaccctccatgcttgttcaggatcagaaggagtcccaagaaaaatctgaaaacccagtaacactctgcctcttacattaatgacattaatggctcttcagtgaaaagcctttgaaaattacttttggatttttgtgacaaaaaaagtgtctccctttgataaatcaggtgcttcattttgtcagaaaatgccagttatacagctcgtcttacttctctttctgctttggctgccaggaatctccaagctaaatttactctttagataaagtcaccatctgtctcacctgagtgcttgcccccttcctctgcatggttttcaatcttcctgagagtaacaatcacttggggagacacttttgttggctatttcttctgattcttttgtggaagtaggctggaaatcaattataatttattctaaactcatgtactacagcctgccccatcactgttgcctggtctttctgggtagactgtattgctatccagaaaatatacagctgagcacacagcagctccccacaaatgcctgtaaatggtcctctaagacctagcctatcccttgtcccttcagctatcactctaggatggctcggggcccttccaaaagttgtctctagttctcacagcaacattccagtagagagcatttactaccttttagggacaaggagagtgaagctcaaagatgttcagaggcaaggtcacccagggagaaggccacatctgggtcccagggtccatcagagccctgtaggggcggagctgcaggttccgttcctactacagactccagtccatctatgcagcacaatctttaaaaatagagaagagtgctgcaatttggccagggtacgcatacctaggcctctgggcattcagactgcggc

SEQ ID NO: 1243344 - DNA, 4001 bp, Homo sapiens
ccactcagcaggtgctgtgctgtggattctttatcccccaaggaaactaacaaatcaagtgtgcccatgacagtttctggggcaaagtcagttcttccttcccacagcatgtgaaagtggcacacctgctacacccagcaacctggactagctaagtgagccaagcagctcagccccacattcacataggtcaatgccaatggcacagtggacaaaggcagccagaggtcaagacagtccaccgtgtcatgttaaagccaggcggggtcatgtcggacactctatgatatctgctgtaccctccatgcttgttcaggatcagaaggagtcccaagaaaaatctgaaaacccagtaacactctgcctcttacattaatgacattaatggctcttcagtgaaaagcctttgaaaattacttttggatttttgtgacaaaaaaagtgtctccctttgataaatcaggtgcttcattttgtcagaaaatgccagttatacagctcgtcttacttctctttctgctttggctgccaggaatctccaagctaaatttactctttagataaagtcaccatctgtctcacctgagtgcttgcccccttcctctgcatggttttcaatcttcctgagagtaacaatcacttggggagacacttttgttggctatttcttctgattcttttgtggaagtaggctggaaatcaattataatttattctaaactcatgtactacagcctgccccatcactgttgcctggtctttctgggtagactgtattgctatccagaaaatatacagctgagcacacagcagctccccacaaatgcctgtaaatggtcctctaagacctagcctatcccttgtcccttcagctatcactctaggatggctcggggcccttccaaaagttgtctctagttctcacagcaacattccagtagagagcatttactaccttttagggacaaggagagtgaagctcaaagatgttcagaggcaaggtcacccagggagaaggccacatctgggtcccagggtccatcagagccctgtaggggcggagctgcaggttccgttcctactacagactccagtccatctatgcagcacaatctttaaaaatagagaagagtgctgcaatttggccagggtacgcatacctaggcctctgggcattcagactgcggcagactggcttggattcccagaccttcccccgtgtgacccagggagacatgcttactccctgtgcggccttggtttcctcttctatgaagtggagattgtaacacttgtttttccaactgcccagatgcactagaaaagggacagttagtgccagacgcccagtgggcactcctcggagttcccccaaagctcccaagggcttgtgggaatgtaagggtctaagtagtgcctggatgtctgtactgccctcggcttcagacctcctgttctggcctcagccattccaaaaattccagggcaggtctggacatgcctgccaggctgaagctgctcagacaccacctgagatccccagtaaatctgaatatggcctaggcctagggactgcctgtgagctacacaactgtgttcccaccagcaactgtgactgcaccagtggcaggtggggatccaggtgaccctcctgatccctgtgtacacggacatctgcctgaggtgccccctccagcacctccctaccccctgcccacaggccaaggtgggctggatgagcaagcccatctaggcctcccagagcagaggtgtgggcactgaactggggaaggggcaggagatagatctgaggctcactgtgctttgtgccctctgaccctttgcagtccccaccaaggatcaaaatcactcaccggggctcagggtgtcccccatcctgtagacagccaaggtctggctggaaaggagtaagaggaggagaaagaggaagggaggcagtgggaggagctggcctagcttgcggggatctagcaggactcagccaatgtagctccaggtccctccagtcaccctgtaggggccaaggcgtggccaaggtggggccagcagctaggctcagctctgcctgcccactggtccaggctgatcctggggatgcagcccagtctaccctctggggagagaggtcctcccagggttagggaagcaggaatgctggcttttgctttgaccacttgaatcaagctaggggcagacaagggcatggaggctggggcactcacacagctgtcaagcctgtaaaacctctgcaatgtccagcagcccatgccactgtcctgtgctacctctgcacatggcagtcaagtgatacacacacatagccatcattcacattgggcatggatcatctcagtcgtgtcaccatcacagatggatcagaggtccagacaacgtcacctgacacgtgtcaaccacacacttcctacatatctccatcatgatcggtcacagatatcacaggcatttatcatcagtcaaatcaccatcctcatcactgtcaaccctgcaggaaacaggggctgtgagaatgccctgacctgaaccagccttcaccctgtgatacccacagctacacacttgtacaagcacaattacacatgcatatgccactacgtacacagacacatgtcctcagccgtgttcgtgctccgagggtgggccttaacaagaacagccctctggggggcctcctggggtaggagatagagaaagggctgtggagagacgcgggcacctgggaggaaggaggagggagatggggcttacctctcggccctggcacctaagttaaagagttaaggtgctggaatctcaaacccaggcttgactgcccctgggcaagttatataaccgccacccctcccttcactgcttcctaatgagagtaacagtacttatcccaagggtgatgctggaggattaaacgagttaactcacttcaagtgcctagacacgtccggctccatgtgagtgcttcactgaggcccactgtccctacagatctacaccggcgcactcacgggcagttacccatagaccccccagtaggcacactctggccagagtgcaggtaggcgcagagaggcacacggaggggtttgggcagttggggagcggatcgtctcaaaggcaaagacgctgaatctcaaatgaggaaccgaggcgagaaaaggatgtgggattcaccgaagttgaagggccgggaagggcctgagatggggtctcggccctgtccccaagccgggcggcccggccggctggcctccctgggcggccacgtctgcagcccccgcccggggcccacaggggaggagctggggtggagaaagcggccgggcgcgggcgccgggggccgaggaaaatcgtgtctgcgcgcgcagggcggggagccagtggcagcggcgcggtccaaaaaaagttgagtccgcaccgacgtgtgcgcgcaaggtcccgggataggtgcgggcgcgggcccgggatggcggccccgggtggcaggccccgctgccccgccacggcccctcagaacgcgccctcaccgtccgagtcatccagctcggcgcgctccccgtagtccacccaactgagcccctcgaggttgtcatagtcgccgcgcctcggcccgtccactggcaccacggtgaagtgaggcatcgtgcgggctcggccccgccgcacccgccgtcccagccgcccgccgctgtccccgccgctgtccccgccgccccgggccgacacgccccgcccgctcgcattcctccccgctgcgctcacttcctccgcccgccccccgggccgcccctcgggggcggagagcgggaggggctcggccggctcctcccagagcgggggccctggtggcgggaagacccctgggcgggagcactcctagtggctccacggcctgggggcgggcccgattcctgtgtgacctcgggtgagaggccgccctctctgagccccagatgcaacatttgtaa

SEQ ID NO: 1243345 - DNA, 4001 bp, Homo sapiens
actgggccccagcgaggagcagcagggatgccaggcctgtgaccatggtgcccagcagcagcacggggcggcgtccacagcaatctgccgtcaggagcaggaagaccaaggctgccgcctccaggccggcctccaggaagtagggcaggtagaaggtcggcacctgaggtgccaggctgcggcggaagctagctctgatgcctccaccaaccagcctgggagagagagcaaatctatgggcccagccagagccggggactctggggaccatatgcccaccccgggggatggtgcaggaccccagcccttcctcgactcacgagctgaagcccaagataagcccgtttctccaggtgactcgggtacgcagaagccccagtggggagtggtaccggggctgggggctccgtgcagacagcatggtcagctctgtagccgcagagatgtgaggggaggggggtgaggagctgtgcctctccgaagccctcctccagtacctgaatctccctcctccctggtaggcgcctgacctgtagccagggagttctcctccaaggaactgtccccggggcccacgccactggcttctgcaaagcgccacaggatcttcctggctcgagctacctgacctgtggccagcagccagcagggagactcggggaacagggccgggaacctgcagcgttggtgaggatgcccacggctccctccacctcctcctggaaggagaggcaaaggccagggcccccaccccacccccaggctcaggggcaggacatcactgtagttctctgtgaccctgtaacccatgcgtttacctggcatgggatacgtcggtgcagagggaagctacatagtcagccccgatgagggctgctggcccagctcccaccacacttacccccaaaagagcagcaagagtccactcatcagggcacccagcccctgcagaagacgccagtcctgcacaagcgcagccaggccgggcagcagcagggtgcccaccaccgagaaaaggccagcccccatggagaaggccaggcggtggggagggtcacacaactccaggcctgggcagacacagacaggttgaagtggaggcctcggggaggactggaacagttccattgggaactgcggggacctattggtgacctgcccaggagcgggatgcccaagggactcactgctcactgtccctgcagctcggggccctcggcaagggagcctcagaggcctgcgggccacccactgcccctcccccagtgacagcagcccccagggtactcacgagccagatacagggcgaggagggcccctgccaatgtgcccccgtggagtaggcgcaggaccagcagggtagggaagctggcagccagggcctcactggcccccaggcctgtggtcagcaccagggaggccacaaaaactgcccggcgtccaaacctggtgggcagcgggggacatgcttggacagggtcaggataacccagggtccaaccttcatcctggcagcaccaggtctagctgaaccctgagagtgggcggaggggagggctgctgggcagcaggaaaagggaaggggcctcaccggtcacagcctgctcccaggatgacacagcccagcagccagcccaggaggtggctcacctgctccagcgggaccttccagccgtctccacacacaaggttccactatggggaacagcagccacgtggaggccagctcaggaccctcccctggggacaggtgcagggagtcccagaatggctactggaaggggccctccatgtcctgctcaatccctccgtggagagaaggggaaactgaggcatgagagggcaaggggcttggtccaggtcacacagcagcctctctggtctccggcagcccctgcacaggggtcggggggatctgcccaccctaagttttctgcttgtccctagatagggcctcccccacctccgcacaccattgctcttcccccacggccagctcttgtccgacccgtttccacctcctattccgagggaccccggggacacccagggccttggtggcgtcatagacacagcccccaccccagccggccaagggtcatagccatgacacaggcctaagaaatgaaccccagcacctgcgctggtacccacgccctccctgccctgcccatttcaagagggactcgggcagcggctggagagctgtgctcagcggcatttcccggtgaggcccttgacccttgacctcagctctgcgcctccccccaccccttccggttcctgggtcttcttggcaagcttaatctactgctgggggccgtgctatgcccgagattttactttcaaacctgacgttttgggaaagctgatggggcattcctggatccaggcaccaaacaggaggagggcaggtgggaggtgggagggagcagggtggagagagaagcccggcgggttccagggccccaggcagcccttgtgaagatgtggcaaccccgttccagtttccacactggggccagtcctcccaggatgggggatgggggcctcggggtaaaggctgcctcaggggtgtgcaggtctcagccccagcgcggaaaggcatgaaaggggcctggaggtccctgccgcccgcctccccatctcttctcacgcagatcgtcaaggtttcccttcaggcaatgcagtctctagcccagcctctgcgcacctcactgatgggaagcccaccttccccagtctgtgctgaccacgtcagtccctccaagcagagactctgccttggaaagccagcccaaagccacggtctgctgaagacgctggtggtcctgaagcaaattccaggccctgctcccccaccggcgccttcggctccaatcctccagcgccccaggccgccccgcgcctggcagctcccaggcccagattcagcccccgcccggcccctctccgcgggtccggcccgtgcgcgcccgtctgcggcaccgtcgggccggcggccgccccggagcaggaagcccaggaggacggccggggggcccgggtcagaggcgccaggtaggatggagaaaggacacccagggcctcggcgggctgggggcggggagggctgcggggcagcagggacgggggcgcacctgggtgaccgggctttgcaggaggccggcgccgggcagcgcgtagagccagccgcgtgtgcagggccgggtgccgttgcgtgcgggcgcggggcgcgggcccggggcgggtgcagggcgcgggatcggggtagcgcaggagcaggcaggggctcgcggctcgcgtgggccccaggcgcgggatggcggcgtccagcagcgcgggtccgcgcagggcgcgcagcgctgggggcaacagcgtggggtccggtcggcagtggggcgcgggctgcgcggtaagcagctcctcggagctcagcaccagccccagcactatgcagggtacccacgaggcggaggccagcaggcgccgggcccggccaaagccgcccgcagctctcagcacccgcgcctcctgctccatcggtcgcaggctgcgctcgggacggggcggggcctggaccagggcgggctcctggggcggggctttggggcgaggcattaaggggcggagcctgagtccagtggaggcggggtgtgggggcgggcggtgtgagggcggggcctaaggcgtaaaggggcggggcccgatctggggcatagggcggggaggttgaggggcgggaaggttgagaggcggggcttgcggccgaaccgcgagggggcggggccccgtgagggcggcacgtgggggccgggggcgtggcaggggcgtggccgggagcgctcaggtgccctcgcggcgcaggtgcactcaggttgcccgggggcgcgcgggctccggccggcgtcccggggtggtccccgcgtggggccgggggcgtccgcgcgggcggggcgaggtcggggagggcagccgcccgccctcctcggcgctgggag

SEQ ID NO: 1243346 - DNA, 4001 bp, Homo sapiens
acaggtgcccgccaccatgcctggctaatttttgtatttttagtagagatggggttttgccatgttggccaggctggtcttgaactcctgaccttgtgatcccccttggcctcccaaagtgctaggattacaggcgtgagccaccacgcctggccaactttttaaattttttgttcctgtggggaacaaaattggcctttcaaaattcaggccaattctcaactcttctcccatgtgacttctcccacgtgacaagccccccacgcctgtcatgtttaaattttctgtagagatgaggaggtctcactatgttgcccaggctggtcttgaactcctgggctcaagcaatcctgctgcctcggcctcccaaagtgctgggattacaggcgtgagccacagcccccagcctggtttagtctttatagcccagagggaaaaaaagggaactgagcatattcagccataatgactgccctaaccattgggccaccctctctgatgccttcagcccactgggggtttaaaatgactaacaagaccccttggactacttcccattgctcctcctgatgatggacaaacaaagctggggaccatccactcatgagagggaaagggtgaaagttcatgtgctctcagccatctgttatcaagcatggaaccaagggacatggcaccagaggaaacattcctctgctggctcgaaacccagaaagatctgtcagatgtcacagggcttacacatcctcttacacatcctgtcacccaaccagcaactcagcaaaatcaaagcagtgagcagcgaaggcagagtcttgggactcccaggcttccagtgtagctagagaaagaaccctgcaaagtgaccactgccagagctgtgaccatctcctccccgctgctcacgtcacagagacagaggtctacagagtgattcgtccaaggtcacaaggcttggtgcggcttcctgactctccaaccaaaatgtttcccttgggcacccctgcccgagtcctgcaccatcctccagcctctcctgccacccacatgagagtgcaggctggggtcctcgtggaactcagaagctgggggtcccacctcttgcagattctctgccttggttaagacctctcggcacccccactgctcactggcaaattactcagctcattgttgcaccttacctgctctttctccctgatgggctgtgccagaggcggttgctccttctccccaaaggtctgggatctgattctcctcacttccctttctggacccaatttcttctttctcaagactttgcctaaaatttgctgtcagcagagggaagagtttgggctacttctgtgctggcttcagcagagctggaggaaactgagcggctctcacgcttactcatgaaatggagcttcaggacagataggaaaacaggcccaggagggagaggttagactaaggtcacagtgggtagctggcagagccagaatagaagcctgatgcccacatgctcaggccagcgatgtaggcccctcagatcccaactggagtgtgctcccagtccagcctggggttggagccctgagatagaaagggtgggctgctttgtgaggtgaggctttgtgaggtgagccagggcgcacccgggccaggaggccggggcggggcgattcccaggcctggagcgagaagggtgggctactgtggggtaacctggggaggagctccgggacccgatcccggcctaggactgggtggagaccctctggctgggtaaaggcgcggcagagctggcgcaacagagggacgggcgtggggcgaggacgccaggatctggacccctgcagggaaagggtctgagcttttccgcggtggcggggactgaggggctccacagacctcggggatctaacacttccaccctccagagcctgtctccggccacctaccttgggggattctttcccgagccggctgcggagacacgtgagcatgcatcacatgacgcccgctcgggcggccgcgggacacgctgggagttgtagtttccgcaaatgtgaagcttggacaacaccagctccctgaatcctcagcccgacagcactgccctgagccagcctcgcgtccagccagctcgtgtttatcctcttacttttagtcttggcctcttgaccaaatcaaacactgctccttcctccaaggaagagcattaggaggtctggcctctttgccagtcccggtggcggtgggccaaagctgtttggcctcattatcctcccggtctctgtccttgccttcacgcccatggccagagcactggagtttttttttaatcagtaatgtgggggacctggagccacggtctttcctgcaagggagtgggctgggggcatggttacgaccccatcggtttagactctagaacagtttttgagggattgtaggtgctcagtaaatatttgttgaatgacgaaatgggcatccagtcctggttctgttcttggctgtgtgtcactcataaattgtcacgtaatctccagcatcccaatagcctcatctctgttttgtggatatgctctccactgcacttacctctccatgcatcagaggtcctcaccgatgaggacacactgggaatccttagaaacccaaatcacaccttttttttttttttttttttttttttttttgagacagagtctcactctgtctccccggctggggtgcagtggcacgatctttgctcactgcaacctctgcctcccgggttcatgtgattctcctgcctcagcctcccgagtacctgggattacaggcatgcaccaccactcccagctaatttttgtatttttagtagagatggggtttcgccatgttggccaggttggtctcaaactcctgacctcaagtgatccacccacctcagcctcccaaagtgctgggattacaggcatgagccaccgtgcctggcctccaaaaagtttatataaattgaatcatactggttgagtgcggtggctcacacctgtaatcccagcactttgggaggccaaggcgggctgatcacttgaggtcaggagttcgagaccagcctggccaacatggcgaagtcctgtctctattaaaaatacaaaaattagctgggcatggtggtgcacgccagtagtcccagctactcgggagcctgaggcaggagaatcacttgaacccggggggcggaggtggcggtgagcagagatcgtgccactgcactccagcctgggagacagagtgagactctgtctcaaaaaaaaaaaaaaaaatagaatcatactgtcttaatcagttaaggccgctataacagagtatcatagactgggtggtttaaacgacagagatttatttttcaccgtcctggaagctgtcaagactgaggtcagaatgccagcagagtcaagttctggggaggaccatcttcatagttttcagatggccatcttcctgctgtgtcctcacattgcggaaagcagagagggaaagtaaactctctcttatttttatttattttattattattattatttttagagacacggtctctgttgcccaggctggagggcagtggcgcaatcacagctcactgcagtcgccatctcccaggctccactagtcctcccgcttcagcctcccaaatagttgagactacaggcatgcgtgccatcatgcctagctaacttttcattttttatagagacaaggtcttcctatgttgcccagaatggcctcaaactcctgggctcaagtgaacctcctgtctcagtctccccaagtgcttggattacaggcatgagccaccatgcctggtcttgtttcttcttataagtgaactaatcctgcggctgggtgtggtggctcacgcctgtaattccagcactttgggaggccgaggcaggtagatcatgaggtcaggagttcaagaccagcctgaccaacatggtgaaaccccatctctactaaaaatacaa

SEQ ID NO: 1243347 - DNA, 4001 bp, Homo sapiens
agcctcccccaaatcttccatcattcacagtgacatcactccagccccaactccatctccccggtagccctggaggctaaaaggaacaacttggggtggcgggagcgtgtcaagagccaggctggctcctctgctctgccatgagtttccatttattcacctcagggttcccttctcctcaagtctgctgagtgaagggatctggagctcatcctaagcaaaacaaaacagctgtttccccagaagcaagtcacaaatgtggtctcaggcccacccagccctgcagggccagcatctgcatttcagcaagatctgtgtgaaatgcctgcacggtgcttgtggaacagggttcccactctctggctcatggccattcctgctgcccggggattggccacaaccctacccccaagccccacctgccctctgtggcttgagatggggcttctccctcactgctgtaatggcaggcttcctgacacactagtccaaacgcaggcgtgctgccccgtcacgtgcacctcaggaagctcttaccatttccagtggggctcagcgcaaaggtcacctcctccgagaggcttccgaccacgccatgtcatatcatcccccgatccccagagacacatgaccctcccggcatgatccaccatctgaagctgatgacatgcatcttgtctgacttcccattaaaacaaagctccatgaggacagggaccacactgcgtcatccatcctaggccaggcacggggcaggagctcggccaacgccaggggtgtcatgggttacacccgacactagtttccaaacagacccgaagagcctcagggcacacaaacggttggaactcagccattatccaccagctgccgtaagacgtgtgagaaaaagccggccaaagagcttaccacaaaatgcagcaattcattccatcagccagcggcaaaggatcttagaaaataaagctgtgctcatcagtggctctcccgcagcaaagagaagagcgcggcgtccgcgcttccccaaaagggaattctggctttgcacccggcaggcaggagagcggaacatccgacaccaggcaaggccggcccggctctgtgtggggagtgtgggagtgtcacaccagttttaggctcaatctgcacacaggagtcgagctttgtttttgtgtgtttaagacagagtctcactccgtcgcccaggctggagcgcacagtctcagctcactgcaacctccgcctcccaggttcaagcgattctcctgactccacctcctgagtaacttggattacaggcgcccgccaccacgccccgctaatttttgtatttccagtagagacagggtttcaccatatgggccaggctggtctcaaactcctgacctcaggtgatccgtccaccttggcctcccaaagggctgcgattataggcacgagccaccgtgcccggcccagctttagtttttgagctaagaccagcaggcaagaaagagcagctggccaggcagggcgcccagagaggttccttcccaggtgaaatgcccacttcacagacagagctgcgatgcctgtagctccatcccggaagctgtgtatcagatgccaccagcgcccacgggggatattctcatcccagggctacagtgggattatcttctcccctcattagctgagcgggatagaaaataaaaccccgaagctatagcttacaggacacgcaactccgcagaagcaatgcgaggaaccccacccagaaaagccaaagccacctcgtacccgtccccaggactcacttcccggggacttaccagctccaccaggaaggcagggaccactccgcccgctttggagaaggcccaggggaagttgagcaggccagctcccagcgcggacttcatgaggatgaagacagcgcccatcgaggacagagtggcagcagccgtggcagggtgaggcttttctggaaggcccctgcttcctggggtctgtccctccatggctagaggcggcagaggggtggagagaaagcacagtcttcacgctttcctccctaagttctcgatatccttatttgtctccccaactcagtgagagctccctgagccgctcctgcccgcttccttggcgtcagctccccctttccaaagggtgctgcatgcatctgcccacgacttctagtcccccttcgtctcccattccctacccacattattctcactcctgccctcccactagaccccaaggcaacctcaccccttccccctccctctcttctcccaaacccccaaccttcctcatccccatcaatcctctctccccccattcccatccactccctttgcttccagccaaacttctgtacaaacagacccccagttcctggtccttaccaccaaatccaacttttaaggtgccggacagtctttggctgttggggatgggactcgggcttactccaggtggctcagttgcatttcttggggccagaggggtgggagaagcaagattcgagcttggccaggggtgagtgagtcattaactaaaggagccctagcgagtatgtgtcagggtcaggcccctccacacctaagaggacagcaacaagtggtcagggccatgggtcccaagaatttgcagcttttgagacttctgacctgagcaaggaaggcttaagactcccgcctctccccagccccctgcaggcccggccccgggggtggagctttctcagctgccctggagggtgacagggagctcagctgggagccacacggggcaggggagcaggcaccatgatctcatggcagcttctgcagcgcctccatcctcacatacctctccaaggtccccagcccaacggagggggcgtgaaaagtgccctgagcccagcctcctcctctgcagaacaggctccaccgtccgcaggtgctgcctcctaggtggtttcctttacctcctccacccaactccagcaggtgcgtctcagagctaatcccatgcacacgagtcacctgagacggggcttgttgaacgcttgggggaggcggcggctgctggtccctaggccacgcttgagtgatgacacatctctccaaactgatacggggtcagctaaggggacagaatatcggagacggccccattccggaaaatgctggcacatgcagctcagatccggaatttgactgtttattcctggaacccaggctccctctcacccgcattctcgaactccagtttgcatcagaatccactggaaggcttgttcaaacacagaacaccaggccccagcccctgtttctgactgagtgtctccggggcggggtctgggcacctgcctttctaacgggttcccaggtgactccaatgccgctggttcggcccctcgctgagaagcactgctttcagttaaatatcctcaatgcccagaacccctccccccgctgcatctaatcagtccttatctgtccgacaccagatcagccccaaaggcttctttttgatgtggtttctaatggtctcaacccccgactcctgttacctcctgatgagcaggcaggttccaaactctgtggctcacacaatggctgctccataaatgcccaaccagcagagtcagtggctggcttctcagcaggggcaagtgaaagggagccgggattgcagtcccggagctcaaggctggacaatgacccggatgacattcacgccactgctgcataaatgtgctgctgagaacctagcctggatgagttcacgcggattcctgagcgggtgtccccactgttccccccaactcccaccccgcaccaagcaggaactcggctcaggcaggtggagcacgtggctcagagcatcacagctggcaagcaacaaggctgggattcaccctgagtcaggctcctttcagaggctgtaatgtcacacggcctcctgccccacaaggactctgacagtgcctgaatgagtgtgtgagagaatgaatgaatgaatgaatg

SEQ ID NO: 1243348 - DNA, 4001 bp, Homo sapiens
ccaaaacaggcatgcaataaatgttggtacaacaaataaatgtgggatttttagagcctttgctatagatcctttgcacgctgtgaccgcccaaaaaagggacagcatttttccaagtcctatctgcaggatgcccaatgggctaggacacttctgtcaactattgcccagaataattcagcagaacaccatttgaaaaccactgattggtagggtgcagtggctcatgcctgtaatcccagcactttgcaaggctgaggcgggagaatcgcttgagttcaggagattgagaccagccaaggcaacacagggagaccccatttgtacaaaaaataaaaataaaaaagttagcagggcatgctggtgagctatgatagtactacatttcagcctgggcaacacagagagaccctgtgaaagaaaagacagaaaagaaacgagagagagagagaacagaaaacacacacagagagagagaggaggcaaagaaggaaagaaggaaggagaaagggaaagaaaggaagaaataaataataaaagagagagaagaaagaaagaaagaaagaaaaaagggaaaagaaagagaaacagagaggtgggagggagggaaggaaggaaagaaggaaggagaaagaaagggaaagaaaggaataaggaaagaaataaaagaaagaaggaaagaaagaaagaacaaagaaaagaaaggaaaagaaagaaaaagaaagaaagagaaaaagaaagaaaggaaagaaaaagaaaatcactgatattgtggctgagctcatggccacaggaattgagtcttggcttggccactcactatctgtattaccttgagcaagttatttaatgacccttagactctgtccatgaattagggggtgctgtacctaccttacagggtttctgtgtcagttagatgagatccaggcgtaaagttctctgcacgtgtctgacacgtaccagtgaagacttgtatttgccttgtagttaacagcagctgcagttgtagtaaatacattcctatagctttttaatgcttatgtggatacatttaccttcgttatctctgggtaacacacctgtggggtgggtcagcctgaggttcatattcccatttgacagataaggaacctgagactcggtgaggcaaaatgtttggctcaatgtccctgaccttggttaagtggaagagctgggacccacgtacggtgctgctggctgccggctgctggcttcataccaccatgcccaccccacaaacacactccattgtcctggtgtatgacaagctttctctgcagagagggctgagcttcccctgccccacaggtgacagctggagtccttctgccagcacctgtccccagaccaacttcccagtttggagagtggctacctgtttgggggcagggggtgtcttaccttattccagatgcagggctcacctgccctgggggctgtcagtggcttctaaggcactaggaggtggcggtggttgtaaggagggagatacccgggatcctctctctttgcagccaagagcttccggagacagcagtgacccttcctcctatatgcccgctgctgagagagcctccaagcgggtcaaactccaaactccagcctcagctgcagcggggattaaaggaagcgtgaatgatctccccagggcagaagagagaacggggcccagcccaggacccttgaactctgagcaggtggggaaggtgacatgtcccacgctctgcccacaccgtcctccaccagggtcctcacctgcgtggggacccatggcatggaggggttggggagacgctggagcccaaggcaccatcctgcttcactcacccagtcttccactgtcccgcctccacgctggggacaggcaggcttgggacgagctggaggaaggggaggggaggaaaaatgctggcggcggatggaggggacagaggcaaagtgccaggagggacgtccagccacagccctcaccgcagtggcagcaacaggaacagcaaccattgcttgtgcaacccctttccatatactcttcagacagaggcatggcaaagaacaggtgtctgcctgaagtcgagagttcgagaccagcctgaccaacatggagaaaccccatctctactaaaaatacaaagttagccgggtatggtggtgcatgcctgtggtcccagctactcgggaggctgaggcaggagaatcacttgaatccgggaggcggaggttgtggtgagccgagattacaccattgcactccagcctgggcaacaagagcgaaaatcagtctcaaaaaaagaagaagaagaagaagaagaggtgtctgaggccctgaaaaaccgtcaggagtgaccgagccatggccaggcgcccacatcgggcccaggacatcagcggggcatagcgaagatttctgccagatgctcaaagcatccaaaactttatttactttttatttctgagacaggatctcactctgtcacccaggctggagtgcagtggtggcatcacagcttgctgcaggctcatcctcctgggctcaagtgatcctcccaccacagcctcccgagtagctgggactacaggcgtgcaccaccacacccagctaattttttcatttttttggtagagagagaatcttgctatgttgcccaggctggtctccaactcctgggtttaagtgatcctcccaccttggcctcccaaagtgctgggattacaggggtcaaacactgtgccaggccaaataccaaaacattttaaaaatagttactagtatttgcaaaccaagaggcttgaaacataattctagaatactcacttttctagaacaacctgaagatctggcctcaccaggcccccatggccacaggacagctgctgactggggaggagtcgtggcctccccatctcactccttcactgggcctgccaggctctggggggccctcagctgaggcccctgtcctggcaccgagtagccagaaataatagcagtgatgaacacgtgccaggctctaagggcacaacatgcctttactcacttggtctttccaacaaccctcgaagttaggtcctgttatctctatcttactgacgaggtaacagaggtagaggagatgagtcatcggcccaggatcacccgggttgtaagtgacacagcaagatttcagcccaggccacctggctctagagtcctgcaggagcagtggagggtggcttgactggataaagggtggcctgggtgagcaaacactgggtgactgaccaacaccagtatgaatggggcctttgggggagggacctgccctgggggacagatttacagaaggaacagctgggattggagaagagggacagacagaaggccatgaatctgtgatctgcagcagaggccacagcaccaggaaaggcagtggggtgccaccgagggtgcactgcttcgccaacctggggtccagtcctgacttcttgggaatgtctggggagccttagccatgtgcagggtgtctacagaagaggcgtggtagtgagtgaagccgggcaggtggagctgaggctgacccgagagcatgtgtcccagctgaagaggacagccacgacccagctccacgtgggggaagacaggcccaatggggtcagaacttctgattgttctagagaagttctgcaaagtttcatgattacgcatccttgagggccagatgtggcctgctcgacccttggcttgtcacctccgattgtttctctgtcaggtttttcatttttaccctcagtgctataaagaataggagaggtggagtgcaggggctcatgctatcatctcagagctttgggaagctgaggcaggaggatctcttgaggccaggagttagaggccagtctgggtaactcagtgagaccctcatctctacacaaaataggaagaattagatggacatagcagtgtgcacctgtagtcccagctactcaggagactgaggtgg

SEQ ID NO: 1243349 - DNA, 4001 bp, Homo sapiens
tgctggggtgctttgttgtgcttccaaccccaccacatactagcattcattttattcctggaacacgatttctggcctcagggtctttgccattctgttccctctgcctgggatgctcttccctgcactctttgctggacaagctcctactcatcctttagatgtcagcctgctgtatatccccaaaggagccccctcttggcctcaatataaattgggtccccaagctttttgctttcatggcaaacacaacttctcatcacagtctaatcaagtgtaacacttgatgtgtgtgattaccccttgtctgcactgcacagcaagccccataaagaaaggtccatgtctctgtcactctcattgtgtccccaaaacaggcatgcaataaatgttggtacaacaaataaatgtgggatttttagagcctttgctatagatcctttgcacgctgtgaccgcccaaaaaagggacagcatttttccaagtcctatctgcaggatgcccaatgggctaggacacttctgtcaactattgcccagaataattcagcagaacaccatttgaaaaccactgattggtagggtgcagtggctcatgcctgtaatcccagcactttgcaaggctgaggcgggagaatcgcttgagttcaggagattgagaccagccaaggcaacacagggagaccccatttgtacaaaaaataaaaataaaaaagttagcagggcatgctggtgagctatgatagtactacatttcagcctgggcaacacagagagaccctgtgaaagaaaagacagaaaagaaacgagagagagagagaacagaaaacacacacagagagagagaggaggcaaagaaggaaagaaggaaggagaaagggaaagaaaggaagaaataaataataaaagagagagaagaaagaaagaaagaaagaaaaaagggaaaagaaagagaaacagagaggtgggagggagggaaggaaggaaagaaggaaggagaaagaaagggaaagaaaggaataaggaaagaaataaaagaaagaaggaaagaaagaaagaacaaagaaaagaaaggaaaagaaagaaaaagaaagaaagagaaaaagaaagaaaggaaagaaaaagaaaatcactgatattgtggctgagctcatggccacaggaattgagtcttggcttggccactcactatctgtattaccttgagcaagttatttaatgacccttagactctgtccatgaattagggggtgctgtacctaccttacagggtttctgtgtcagttagatgagatccaggcgtaaagttctctgcacgtgtctgacacgtaccagtgaagacttgtatttgccttgtagttaacagcagctgcagttgtagtaaatacattcctatagctttttaatgcttatgtggatacatttaccttcgttatctctgggtaacacacctgtggggtgggtcagcctgaggttcatattcccatttgacagataaggaacctgagactcggtgaggcaaaatgtttggctcaatgtccctgaccttggttaagtggaagagctgggacccacgtacggtgctgctggctgccggctgctggcttcataccaccatgcccaccccacaaacacactccattgtcctggtgtatgacaagctttctctgcagagagggctgagcttcccctgccccacaggtgacagctggagtccttctgccagcacctgtccccagaccaacttcccagtttggagagtggctacctgtttgggggcagggggtgtcttaccttattccagatgcagggctcacctgccctgggggctgtcagtggcttctaaggcactaggaggtggcggtggttgtaaggagggagatacccgggatcctctctctttgcagccaagagcttccggagacagcagtgacccttcctcctatatgcccgctgctgagagagcctccaagcgggtcaaactccaaactccagcctcagctgcagcggggattaaaggaagcgtgaatgatctccccagggcagaagagagaacggggcccagcccaggacccttgaactctgagcaggtggggaaggtgacatgtcccacgctctgcccacaccgtcctccaccagggtcctcacctgcgtggggacccatggcatggaggggttggggagacgctggagcccaaggcaccatcctgcttcactcacccagtcttccactgtcccgcctccacgctggggacaggcaggcttgggacgagctggaggaaggggaggggaggaaaaatgctggcggcggatggaggggacagaggcaaagtgccaggagggacgtccagccacagccctcaccgcagtggcagcaacaggaacagcaaccattgcttgtgcaacccctttccatatactcttcagacagaggcatggcaaagaacaggtgtctgcctgaagtcgagagttcgagaccagcctgaccaacatggagaaaccccatctctactaaaaatacaaagttagccgggtatggtggtgcatgcctgtggtcccagctactcgggaggctgaggcaggagaatcacttgaatccgggaggcggaggttgtggtgagccgagattacaccattgcactccagcctgggcaacaagagcgaaaatcagtctcaaaaaaagaagaagaagaagaagaagaggtgtctgaggccctgaaaaaccgtcaggagtgaccgagccatggccaggcgcccacatcgggcccaggacatcagcggggcatagcgaagatttctgccagatgctcaaagcatccaaaactttatttactttttatttctgagacaggatctcactctgtcacccaggctggagtgcagtggtggcatcacagcttgctgcaggctcatcctcctgggctcaagtgatcctcccaccacagcctcccgagtagctgggactacaggcgtgcaccaccacacccagctaattttttcatttttttggtagagagagaatcttgctatgttgcccaggctggtctccaactcctgggtttaagtgatcctcccaccttggcctcccaaagtgctgggattacaggggtcaaacactgtgccaggccaaataccaaaacattttaaaaatagttactagtatttgcaaaccaagaggcttgaaacataattctagaatactcacttttctagaacaacctgaagatctggcctcaccaggcccccatggccacaggacagctgctgactggggaggagtcgtggcctccccatctcactccttcactgggcctgccaggctctggggggccctcagctgaggcccctgtcctggcaccgagtagccagaaataatagcagtgatgaacacgtgccaggctctaagggcacaacatgcctttactcacttggtctttccaacaaccctcgaagttaggtcctgttatctctatcttactgacgaggtaacagaggtagaggagatgagtcatcggcccaggatcacccgggttgtaagtgacacagcaagatttcagcccaggccacctggctctagagtcctgcaggagcagtggagggtggcttgactggataaagggtggcctgggtgagcaaacactgggtgactgaccaacaccagtatgaatggggcctttgggggagggacctgccctgggggacagatttacagaaggaacagctgggattggagaagagggacagacagaaggccatgaatctgtgatctgcagcagaggccacagcaccaggaaaggcagtggggtgccaccgagggtgcactgcttcgccaacctggggtccagtcctgacttcttgggaatgtctggggagccttagccatgtgcagggtgtctacagaagaggcgtggtagtgagtgaagccgggcaggtggagctgaggctgacccgagagcatgtgtcccagctgaagaggacagccacgacccagctccacgtggg

SEQ ID NO: 1243350 - DNA, 4001 bp, Homo sapiens
ggaccaacagtggtcacccctgcacccctctgcttcctggctagatgtatgacctccactcccagcccagtcacaccccgcagttgggaagtcccactgccagtctcattccccctttcctggagtttccccaaggtgtgacccttccaggtgttctcactgagggtggggttattggaaaaaagagggcctcacattccactcgaatccagcaacagccaagccacttgcagcgccagtccctgccaggcccacaaagtggccactgccgatgttgctggcgaagagagaggccccaacctgggtggccagaggagggagtgagcagggctgcttctccaggcccctcccgttcccggcccagcccgtctcaccggccaccacaccatgctgcgtcctgccaggaagtagccgcccacagtgcctctgttggttctgcacatggactgggagacagaggcgggggagacctgggtttagggcacagccttggacctcatcagccacctcaacacattcctcagccttgtttctggctgaagattaacgagccaagtttccctgatcgtttgcactcccacccccaactcctcccagacactcagggcaacccaggctctaatcccagtgtcctattcccccagtttttttcacatattttttctttttctttctttttttttttttctcattttttgagacagagtcttgctcttgttgcccaggctggagtgcagtggtgtgattttggctcactacaacctccacctcccaggttcaagcaattctcatgcctcagcctccaaagtagctgggattataggcacacgccactatacccagctttttgtgtgtgtgtgcgtgtgtgtgtgtgtgtgtgtgtgtgtgtgtattttagtagagacagggtttcaccatgttggccaggctggccttgaactcctggcttcaagcaattcacctgcctcagcctcccaaagtactgaggcatgaaccaccgcacccagccccacatctgtctttctttttagagacaaggtctcgctctgtctcctaggctggagtgcagtgacatgatcatagctcactgcagccttgaactcctgggctcaagcaatcttcccaccttggcctccgagtagttgtgactacaggcacacacaccaccatgcctgactaatttttcctttctttctttttttttcttttttctttttaagaaacaaggtctcatccaggcacagtggctcacatctgtaatcccagcactttgggaggcagaggcagaaggattgcttgagcctaagagttcaagactagcctgggcaacatggtgagacccctctctctttaaaagtaaataatttttaaaataaattttttaaataaaaaagagatacggtttcaccatgtgggccagtctggtctcaaactcctggcctcagtgatccccctgccttggcctcccaaagtgctgggattacaggtgtgagccactagttccatcccaactccccaggatttatcatttgtggatttggcttgaccttcctggggaccttgaatattttctgctggtcagccacaatgtggccaggggaatgagaccccatttagaatgtcgaccctgatgaaaatccgcggaccccttcagctagcacagtcccaaagtgggaagacaagggaggaatgttggctgggtctccctgagaacttccaaagacctgcttgcccccaggcctaggtttctccttcaaagatccaagcatcattctcccacctagggtccccctgagacttttcccccaggcccccaaagccagcagccaccagcagcacaccccccaacttctcacccacaagccaacgccaatgaccagcaggaaatatgcagcaatgactaggatgtcagcaggattgtcaatcagggccttctgggcccccatctctggtgccgagcctgcctctgtgtgctcctccattctccccaggatctgccccatccaggaaccagcccctggattcccccaggggaaggattaatggttacctcaggggcactgagccgacaagtcccccaggtctcattcccgctccccagctttgtttagctgaatcaggtcatatcaaggctgaaggctggtcttggggagctgggcccttccaagttcaagagcactctttcctgggccttagcatccgccctctcccctgtgctccaggctcaaaatcactcttttactccctaaaaatgcatcgcttccttagctaagctagcacccctggatttaactaatccagaggaatcattttcaaatccaagtctgacagggtcactcgccctcctcaggaaccctccatagctcttagtacaagctcttcagcctgatttccaatcctggtcatgccccaattcccgctcatccttccccctgcttctccaaaccaaatctagaggaaatcagaaatcctttcccactcctttaacctacccagcccagatttttgctttttgctttttttgaccagatattttatccccaccaaatccttgcacaaactgtgtcttctgtttagagcacttccctgtctcccaaatggccaactcctactcagctttcagtacccagcctgtgtcgcctcttcaagaaagacttctctgacatttctgatgtagttctgagcacactgtgtggcccttgcctgggtccaggtctgtcttcccaacaaactagtgtctcctcaagagtaggactggctgggtgtgggggctcatgcctgtaatcctagcactttgggaggctgcagcaggaggctcacttgagctcaggagtttgaaaccagcctgggcagcggagtgagacctcatctcttaaaaaataaataaataaaaattaaaaagagcaggactgatctgattcatccctggagtctcatttctcagcacaggactggattcaagaagggagaggctggttaatatctgtatgtctacctttctagaagaattgaccagacttggatgtcaggagacagtcgaaggaaagtcctgcctgattatggcagcgatggtcatcccggagatggggaacagagaaaaatgctttgagtgtaatatgacagagtttggatgaaggagttccttagcttgtattcctctaaaaggagaccctgagatgagaatttgtgtgcaacgactttcctgaggaggtgattccagtatggactgtgatggtgtagggaagagaaatgaaacaaggagaaaaaccaacaaagcatgtgtttctttgttttgagacagggtcttgctgtgtcaccaaagctggagtacagtggtgtgatcacagctcactgcagcctcgacctcctgggctcaagggatcctcccacctcagcttcccaaatagctggaactacgggcacgccacaacacttggctaatttttgtattttttatacagatggggtttcactgtgttgcccaggctggtctcaaaatcctgagccaaactgcctcagcctcccgaagtgctgggattacaggtgtgagccaccacgcctggcgtaagggtgtgtcatttgtcaggttaccacaaagagcagttggagcctcatcccaaaaaggacactctgagacactgtgaagaacaccccatagcaatgttccttgaggggccaggtggttggggtatctattccctgatttgtgtctgtcactggctaaaagctgcagaaatgtccacacacttcaggcctgctgagaacacggagcacactccctcctcccaagaacagcctcagacaagaaactccagaaggagctgcaagtcagggtatctggaaactgtcacagtatatgacttccaaggtgggccatgcaggtatatgggtggggcacccacagtgtctgcttcagagggtgatgagtttaaagtgcctgagagaaatccagtgccaagtgtcagaggacacgtgtgtgttacagacatttcagataaggt

SEQ ID NO: 1243351 - DNA, 4001 bp, Homo sapiens
cccgggttcaagtgattctcctgcctcagcctcctgcgtagctgggattacaggcgtgcaccactacgcccagctaagtttttgtatttttagtagagacgaggtctcaccatgttgcccaggctggtctcgaactcctgagctcaggcaatctgcccactttgtccttccaaagtgctaggattataggcatgagccaccatgcccggccccactccttttttgcaaacaccaagtattgcccgtcccaaagcaagtgtccagagtacacatagaagcagagttgtaagtcctagagcctgtgaacaggtcatgagctttccctctacccagctccaaattcttgcccttcctccctctgacctcccttaagtccagagtcacagctaccgccaagcaatgcagcccagtggagagagagaggctttcagagctgggtcccccttctccaatttcttcctcaaaaggtctattttcccacactctttgcagggtacctctgagctcatcccagcaaaagtggcaggagcaaagcccctcaggaaggagctagggggtgggggccagcaccctgacttccagaccgcttccctggcccggggttctatgttattcttcctggattggctgtaggtgatctctaggctctcattttcaggcaggtggccagttggaccatccagcagaagggggagagagtgtggctgttccactggagtcttcttcaggcccctctcccactcctccctgcaatgcggctagaacttgaggaggtagaggtttcaccccaatcatctgggcctcctgccttgaggaccaggccagttcttggcacctactggcctgattccacctgggctgtgctccctgagaatggcattatttctgatactggcttcttcttgtgtgtttctatccccaagaccacagggcctccccaggtgccttcagaaaaccgaagtattcccactgcttctggcccaaaggttcctgcccccaggctcagagtgctagatttagggtcactgtgggcctggttgtcaaatcccacccacttctggtgccccttcaagagctcttggaatctccacctcccttccagcagaccatcaaaaggtcaggctcccccacccaacctggcaccccagattctgtcctttccatccatacccctaccatgactttagggtcatgactcgatttcactcttctgctgttttgcttccagggtgcccaatcctgacacttccgctggaatgagctcgaggtactctgcaaagagcctgggaaaatgaccttccagaggactccaatctttttttttcccgttagccctgtccagttctttctgcgccccagatttgcccctgtctcctcgcctcccttccgtgtgtattccagctcctgtcccagccaccgctgcagacagtggacctcccagattcaaattcccagcccgaccccacgctcaccgccgccgttcttgtagcagaggtaggggaagcgccacacgttggccaggtccactgcgaagccgactacggacagcaggaagtcgatcttcttgccccaggtctcccggggctgcgcgtcgccgtcgcggggcgccagcaggcactggacgccgttgcgctccttcaccaccagcagctccgcagttttgcgcgcccgaaggggctgctctggacccgtgtccgccccgttgttctcgggctgcacctgcgggttcatccgcgccagaagcatggatgcggctggcgagaggaactttaccggtcctgggggcacgccgaggctctgcttggataaagggaaaagaggtggttacccggccgttcctccctacttgcaactcccaagaccacccgggagcgccttagacactgggatgagcgcgcgctgagcggacgcagggttcccagaaaagggcgcgcgtccgctggaaaaatttggaaacagaggttggggcacgccggaactcaagagttggagacttctgacagccctctgggggcggctgaagaccctgcagcacttttcctcgttcacccactctcgcctgccccaaatggctgggattgaactcaccgaggctgagggcagcgtgccgaccccctccccagctcaggtccgcgacacttcaacagccacaggagccttctcggacacttaacgtcactgcactacaaactcgctagccctctgctggcgcgtctcggcccgggcctcccaggcagacctagccctgtcccgcgctcagggcgcactcacgtgtccggcggcgaggggatccctggtgccttgcgccctgccggcccccgaccggcggcgccttggcaggctctagggcgcgggctggggctgggctccgccgtgtggcgttcgggcggggccggggaagagctggaggcgcggggcggccggcagggcgcgggctgactggttctggccgtgcctggcgggggccgggctggtaatgtagcctgcgccccaggtaacgcgccgattgcattaacccagcgcccggcccgctccgtctggagcctgttagcgctaatggagactgacagcgcggccggggatgggcaggggcgggagggtggcgcgggttcccagggatctgggggactcgggcgcgcactccctttctatcctgcgccgagcaccgctcgccgctcccaaggacaccaggcctctgatctcccaccacggggagcgagtgacagactctccagaactggggtctgcgtcgcgtcagaaaggaggccaaaaaaggactggggaagcagcgaccggtgcagcaccagctctgtcttccgcagcaggccacttaaactatctggtcagtttctttatcaacgaaatgggaatgtgcggctcagggcccagtgctgcaaataggcggccagcgggctgttgggcagttttgtttgagcggcttagcatgttgacaggtcacagcccagcacttactcctgcatctctgttatttatgggcagggtagcaggtcatttgaggttgtgacccgtgttctgtgaggctgagaactactatttattctttcaattattcattcattcacaccttcacacatttgttcttccatatgcccgctgtgtgccaggcactgttccgggctcttggattacactggcgcaacataactcggagattcctgacctcatggagtttacattctgctggcggagacagaggaaacgggaaacataataaatacacacgttatatgatgggtgagggaatggggggacagtggggctgcagtttgcatacggggtcagggaatttgagaaggtaacaattagacaagtaaaggagtgagccatttggacctgagagtcgttttctcattcattcactcatctattgattaatgtattaatccctttagcagatgctgatcatctgctgtgtgcgtgaacagtgctggctagagaggagatagcccctgccttcaaggagctcccagaccagtgtatagagtctatcacaacccagtgtggtcaggatgtgttgtgaccacagatgtgtggaagtagggtggagctgaatcagcaagggaagcatcctgttgatccaaggaggcttcagagaggtggccgtgctaagtgggttgggtggggcttggatcagcccagccacactgacctttccattctgtaaacatcctaagctcaaacccaccccaagacctttacacttgctgttttctctgcctgagttgttcaggtctcagtccagaggtcccttcccgacgactcaaatcgaaaatacacgctcactctatcctatcaccctatttattcatttgttacatcgctatccgaatttgtcctagttgtttaactttatgtccccccttgggtggtatgtgagctccatgagcacagggaccttgtctgtcttttacagcacgtgttctggcacctggaacgtactagagcatcaaccagcctatgaagtgaatgagttaatgaat

SEQ ID NO: 1243352 - DNA, 4001 bp, Homo sapiens
tgaggaccaggccagttcttggcacctactggcctgattccacctgggctgtgctccctgagaatggcattatttctgatactggcttcttcttgtgtgtttctatccccaagaccacagggcctccccaggtgccttcagaaaaccgaagtattcccactgcttctggcccaaaggttcctgcccccaggctcagagtgctagatttagggtcactgtgggcctggttgtcaaatcccacccacttctggtgccccttcaagagctcttggaatctccacctcccttccagcagaccatcaaaaggtcaggctcccccacccaacctggcaccccagattctgtcctttccatccatacccctaccatgactttagggtcatgactcgatttcactcttctgctgttttgcttccagggtgcccaatcctgacacttccgctggaatgagctcgaggtactctgcaaagagcctgggaaaatgaccttccagaggactccaatctttttttttcccgttagccctgtccagttctttctgcgccccagatttgcccctgtctcctcgcctcccttccgtgtgtattccagctcctgtcccagccaccgctgcagacagtggacctcccagattcaaattcccagcccgaccccacgctcaccgccgccgttcttgtagcagaggtaggggaagcgccacacgttggccaggtccactgcgaagccgactacggacagcaggaagtcgatcttcttgccccaggtctcccggggctgcgcgtcgccgtcgcggggcgccagcaggcactggacgccgttgcgctccttcaccaccagcagctccgcagttttgcgcgcccgaaggggctgctctggacccgtgtccgccccgttgttctcgggctgcacctgcgggttcatccgcgccagaagcatggatgcggctggcgagaggaactttaccggtcctgggggcacgccgaggctctgcttggataaagggaaaagaggtggttacccggccgttcctccctacttgcaactcccaagaccacccgggagcgccttagacactgggatgagcgcgcgctgagcggacgcagggttcccagaaaagggcgcgcgtccgctggaaaaatttggaaacagaggttggggcacgccggaactcaagagttggagacttctgacagccctctgggggcggctgaagaccctgcagcacttttcctcgttcacccactctcgcctgccccaaatggctgggattgaactcaccgaggctgagggcagcgtgccgaccccctccccagctcaggtccgcgacacttcaacagccacaggagccttctcggacacttaacgtcactgcactacaaactcgctagccctctgctggcgcgtctcggcccgggcctcccaggcagacctagccctgtcccgcgctcagggcgcactcacgtgtccggcggcgaggggatccctggtgccttgcgccctgccggcccccgaccggcggcgccttggcaggctctagggcgcgggctggggctgggctccgccgtgtggcgttcgggcggggccggggaagagctggaggcgcggggcggccggcagggcgcgggctgactggttctggccgtgcctggcgggggccgggctggtaatgtagcctgcgccccaggtaacgcgccgattgcattaacccagcgcccggcccgctccgtctggagcctgttagcgctaatggagactgacagcgcggccggggatgggcaggggcgggagggtggcgcgggttcccagggatctgggggactcgggcgcgcactccctttctatcctgcgccgagcaccgctcgccgctcccaaggacaccaggcctctgatctcccaccacggggagcgagtgacagactctccagaactggggtctgcgtcgcgtcagaaaggaggccaaaaaaggactggggaagcagcgaccggtgcagcaccagctctgtcttccgcagcaggccacttaaactatctggtcagtttctttatcaacgaaatgggaatgtgcggctcagggcccagtgctgcaaataggcggccagcgggctgttgggcagttttgtttgagcggcttagcatgttgacaggtcacagcccagcacttactcctgcatctctgttatttatgggcagggtagcaggtcatttgaggttgtgacccgtgttctgtgaggctgagaactactatttattctttcaattattcattcattcacaccttcacacatttgttcttccatatgcccgctgtgtgccaggcactgttccgggctcttggattacactggcgcaacataactcggagattcctgacctcatggagtttacattctgctggcggagacagaggaaacgggaaacataataaatacacacgttatatgatgggtgagggaatggggggacagtggggctgcagtttgcatacggggtcagggaatttgagaaggtaacaattagacaagtaaaggagtgagccatttggacctgagagtcgttttctcattcattcactcatctattgattaatgtattaatccctttagcagatgctgatcatctgctgtgtgcgtgaacagtgctggctagagaggagatagcccctgccttcaaggagctcccagaccagtgtatagagtctatcacaacccagtgtggtcaggatgtgttgtgaccacagatgtgtggaagtagggtggagctgaatcagcaagggaagcatcctgttgatccaaggaggcttcagagaggtggccgtgctaagtgggttgggtggggcttggatcagcccagccacactgacctttccattctgtaaacatcctaagctcaaacccaccccaagacctttacacttgctgttttctctgcctgagttgttcaggtctcagtccagaggtcccttcccgacgactcaaatcgaaaatacacgctcactctatcctatcaccctatttattcatttgttacatcgctatccgaatttgtcctagttgtttaactttatgtccccccttgggtggtatgtgagctccatgagcacagggaccttgtctgtcttttacagcacgtgttctggcacctggaacgtactagagcatcaaccagcctatgaagtgaatgagttaatgaatgaaagaatggtggtgtgtggcggtgtttagagcatctgtaccagagggacaatcgtgacaaatgtcctctgggcaggatgcagaggggagaggaagggaaacctagaggggtatgggttcccctggcttctggggaagatgacagaaggcaggtgagggaaaagattgagcagaggtttgaggacaagagctcagaactgtaggtttccacacatgaaaggtgtttatctcctttgatctattggacgatcatgacaatcctgtaaggaaagcaggaagagaatcatctttccacgtatcaggtcaggaaactgtggctctgtggactaaagggacttgtccaaggtcccacagattggaagtcacagagtggaaatgagaacccaagtctcctggcctccagcctctgctccctccaccaagtcatggtggagacactcagaatctctctagtagtcatggtccccttctctcctctaccccacaccccatccaactagttttcaagtgctgagaatcccacctctgaaacaccctgcaaagccacaacagaggaccctcatcacccctcactgcagcagcctcctagctggtcaccccacgttcagtatctttccagctgcatgatcgtcaccagctgccagagctctacctagaactcaagtgcgaccacctcactcctctgcctgaaactcctctgaaacacaccaacacataaatgtgatttaattaactctggatttgaggtaattttattttcttctctatacttctctgtatatgccaacttttccacaatgagcatttgat

SEQ ID NO: 1243353 - DNA, 4001 bp, Homo sapiens
gagaatcacttaaatgtgggaagtggaagttgcagtgagctgagatggtgccactgcactccagcgtgggcaacagaccgagactctgtctcaaaaaacaaaaaaataaaataaaatagaagaaatgatggaaataggaaattataactagataaacatcatggtaatagtccttacttgcaagaatcatcaacaaatgctaagaaatgtggacaaaagtatgatgagaatcaagacatttgcataaattcagtgtatgtccttaaaagacacattacttaaaaaaggaaaataactctctctacacaggaggaggctggcagtctccaccttaaccaagtgtgcaaggttaacatcacaagtaacaagatattgacagcatgtctccccaccccctgatggaatgcactgaggagggcacagcatcattcctagggtaatcacgccaaaatgcataaccacagtttaattatgagaaaacaacaaacaaactcaaatcaatatttcacaaagtaactgaccgtacttttcaagtgtcaaggtcatgaaaatcaaggaagagcaaagattggagaagattaaagaaacatggcaactaaatacctgaaaagaacatgagtgggaaaattggtgaaattcaagtaaggtctgcagcttgttagctaacagtgtatcaatgttaattttccggtttcaaactcagaccatggttatgtaagttgtcaacattaggggaaactgggtgatgggtatatgcactatttttactacttttaatgtataacggtatttcaacataaaagtttcttttttaaaatgatattctgtcttgcaccaatggccagtgcttctcgtgcacacatggtccaaataatttctcagagctgcatacagctggcctgcttcccgcttcttgaattttctccaagctctgattatgttcccccatgggaactccagaaggacagcagcccagggtgagtcagactacagcttcagggtcaaatcaactcgggttcaacctgcagctcatcgcctgccctggagccccagctcttcccttctctgacatcatcagttcctatgtcacctcctcagagaggcctttcctgactacccacgcaaccgttcttttccctccatgattgatttttcccacatacctggtttcagttctttaagagcagttacataccccagaaagtgttgcattccctgaagtgcacacactctaaaacattctcactcccttacctgtttatttgtgtattatcttgcccgcctccacttccctgccccagaacgcaagcttctccaactacctcgaccgtggcgtgtcctcagcctctcacccagcatcaggccagtggctgctcagtaaacattaatatcctgacggcatgcgtctccttggtctgtgactttccttagtgtttggctcaggtcataccaagcactggcctcaacaggcccagcacaaggggtctgtgacttactcataaaactcggctgccggcgtgaacttgtacttggagtacttggtgtggttgccaagcacggagccattgaggagcttggggtcggtacagttggggctgttccaggtgtggccacagtcggtccagggcaggttgagggtgaaggaggagaagaggtagtagagtgaccaggcgatgatgacgttgtagtagaagccaacgtacagggcgatcaggatgacagcatagccaacgcctgggcagggacagggggtaaggtaggagtctcccaggcccagccccacagccacctctccttgggtgtggctccaccactgcactcccattccctctgtctctcgtttcctgcagaacagcggtccccaaccttttcagcaccagtgacctgtcgcatggaagacaatttttccacagattttggggtgggggtagtttcaagatgaaaccgttccacctcaggtcatcaggcgttagttagattctcataaggagcacacaacctagatccctcgcatgcgcagttcacagtaggggttgcgctcctatgagaatctagtgcagcggctgatctgacaggaggcggagctcaggcggtcatgcgagcgatggggagcagctgtaaatacagatgaagcttcacttacccgctgctcacctcctgctgtgtggcccggttcctaacaggccggttattggtccgtggcccggggattgaggaaacgtgctatagcagattgccagagtccataggcccctgccatctctttgcccgagagctctctctttccactggagctcccctgcccactcaccacctgcttgcccccagtgggcagccacgttaggagctggatcgtgagtatccagctccctcgccccctgggcaggataacactgacaggtgttcacattctcccctgatgggactgagctccctgcccagagtggcattgacttggtgcacaccctttatggctgcctccccttccctatccccagttgctgctccctaaggatcacttcccgcactaactctttacacttatatccttgtctccgaactgcttctggggaaacccaagcaagcactccctgattggaacttcagccctgtgtgctttctgggtcctactctcagccacctgcttcgggtgccagtatcgtgttcctcaatgtatcacaagctcctttaggggtagttctatagcttttttctagggtagatgtattgtttacctgcccaacattgcttttcaaggaattagccttaagctatgattagcctgtgaggtgttggcgaggctactccccactcttcctccatcgcaagatgtatgcctggccaatcagagcactgcttcctgacagccacagtgattggttagtagatgggcatatgactcaagttaaaccaatgagaatcttctctgggacctttaaggaaactatgactctataagggtttttgtttgtttacttgtttgcttttggtaaaatttaaacttggtaaaatttaagcccggggttgctgatggccatctttgcaggtacttgagaagaatttacctgagactgatgctaacagaaaacaacagatctgaaacacaagaagagcgatagattccagacaacattatttgggcatctggatctatctatacctgaagccaatccccggactttactgtaacagaagtcaattctcttttatactgaagccagtttgagttgaatttctgacaattaacaacaaaaaaagtaacgaatgcacatgtcttataagactcttgcaccagctgtatctcccacaggactgagtacacaagaggtactcaggaggcacgtgccagcggagaagaggctcatgggagtcacactggccctcgttgccatctgtgcccagttctccaaccagtgcttgggagagactaactcttcctccatgcccttctcccagctgtataggggccaagaaatagcagttgctctgcctactttctgcagatgtgttcttagtcccaaatgcaagtaggcttcatgttatatttcagctgcaatcaactagttgtggctattgtactaaggattttgaatcagctttccggctgggctcaaaaagatccatgatcaacttctaacgcctgccatgggagcaaaaggagagagtagtggtgtatgtgctgggtacttctgatacttacgtaaaaatttcccatacaggaaatagattctctgggtactcagcaggtaagctggattagaacccaggtttccagaatttctatgctaatgctattcccaacacactgaatgctctccacgtaacttggaatgggggacactgttgaccttgtcaatacctgtgaatcccacatgacaggaggtctaccttagatctcaccactggagcagattccccaagggcaacagggaagcctttatgaacaaccgtgactttctcccaccccttctttacctttgaagaatgggcagattttccaa

SEQ ID NO: 1243354 - DNA, 4001 bp, Homo sapiens
aacctccatctgtcagctccaaccttgggttaactttctcgttggaagagctaactgctttcttactcaagatcctctgctcagagccacctgtgctctatggtgatcccactccttttttttttgagacagagtcttgctctgtcacccatggtccaggctggagtgcagtggcgtgatcttggctcactgcaacctccacatcccgggttcaagtgattctcctgcctcagcctcctgcgtagctgggattacaggcgtgcaccactacgcccagctaagtttttgtatttttagtagagacgaggtctcaccatgttgcccaggctggtctcgaactcctgagctcaggcaatctgcccactttgtccttccaaagtgctaggattataggcatgagccaccatgcccggccccactccttttttgcaaacaccaagtattgcccgtcccaaagcaagtgtccagagtacacatagaagcagagttgtaagtcctagagcctgtgaacaggtcatgagctttccctctacccagctccaaattcttgcccttcctccctctgacctcccttaagtccagagtcacagctaccgccaagcaatgcagcccagtggagagagagaggctttcagagctgggtcccccttctccaatttcttcctcaaaaggtctattttcccacactctttgcagggtacctctgagctcatcccagcaaaagtggcaggagcaaagcccctcaggaaggagctagggggtgggggccagcaccctgacttccagaccgcttccctggcccggggttctatgttattcttcctggattggctgtaggtgatctctaggctctcattttcaggcaggtggccagttggaccatccagcagaagggggagagagtgtggctgttccactggagtcttcttcaggcccctctcccactcctccctgcaatgcggctagaacttgaggaggtagaggtttcaccccaatcatctgggcctcctgccttgaggaccaggccagttcttggcacctactggcctgattccacctgggctgtgctccctgagaatggcattatttctgatactggcttcttcttgtgtgtttctatccccaagaccacagggcctccccaggtgccttcagaaaaccgaagtattcccactgcttctggcccaaaggttcctgcccccaggctcagagtgctagatttagggtcactgtgggcctggttgtcaaatcccacccacttctggtgccccttcaagagctcttggaatctccacctcccttccagcagaccatcaaaaggtcaggctcccccacccaacctggcaccccagattctgtcctttccatccatacccctaccatgactttagggtcatgactcgatttcactcttctgctgttttgcttccagggtgcccaatcctgacacttccgctggaatgagctcgaggtactctgcaaagagcctgggaaaatgaccttccagaggactccaatctttttttttcccgttagccctgtccagttctttctgcgccccagatttgcccctgtctcctcgcctcccttccgtgtgtattccagctcctgtcccagccaccgctgcagacagtggacctcccagattcaaattcccagcccgaccccacgctcaccgccgccgttcttgtagcagaggtaggggaagcgccacacgttggccaggtccactgcgaagccgactacggacagcaggaagtcgatcttcttgccccaggtctcccggggctgcgcgtcgccgtcgcggggcgccagcaggcactggacgccgttgcgctccttcaccaccagcagctccgcagttttgcgcgcccgaaggggctgctctggacccgtgtccgccccgttgttctcgggctgcacctgcgggttcatccgcgccagaagcatggatgcggctggcgagaggaactttaccggtcctgggggcacgccgaggctctgcttggataaagggaaaagaggtggttacccggccgttcctccctacttgcaactcccaagaccacccgggagcgccttagacactgggatgagcgcgcgctgagcggacgcagggttcccagaaaagggcgcgcgtccgctggaaaaatttggaaacagaggttggggcacgccggaactcaagagttggagacttctgacagccctctgggggcggctgaagaccctgcagcacttttcctcgttcacccactctcgcctgccccaaatggctgggattgaactcaccgaggctgagggcagcgtgccgaccccctccccagctcaggtccgcgacacttcaacagccacaggagccttctcggacacttaacgtcactgcactacaaactcgctagccctctgctggcgcgtctcggcccgggcctcccaggcagacctagccctgtcccgcgctcagggcgcactcacgtgtccggcggcgaggggatccctggtgccttgcgccctgccggcccccgaccggcggcgccttggcaggctctagggcgcgggctggggctgggctccgccgtgtggcgttcgggcggggccggggaagagctggaggcgcggggcggccggcagggcgcgggctgactggttctggccgtgcctggcgggggccgggctggtaatgtagcctgcgccccaggtaacgcgccgattgcattaacccagcgcccggcccgctccgtctggagcctgttagcgctaatggagactgacagcgcggccggggatgggcaggggcgggagggtggcgcgggttcccagggatctgggggactcgggcgcgcactccctttctatcctgcgccgagcaccgctcgccgctcccaaggacaccaggcctctgatctcccaccacggggagcgagtgacagactctccagaactggggtctgcgtcgcgtcagaaaggaggccaaaaaaggactggggaagcagcgaccggtgcagcaccagctctgtcttccgcagcaggccacttaaactatctggtcagtttctttatcaacgaaatgggaatgtgcggctcagggcccagtgctgcaaataggcggccagcgggctgttgggcagttttgtttgagcggcttagcatgttgacaggtcacagcccagcacttactcctgcatctctgttatttatgggcagggtagcaggtcatttgaggttgtgacccgtgttctgtgaggctgagaactactatttattctttcaattattcattcattcacaccttcacacatttgttcttccatatgcccgctgtgtgccaggcactgttccgggctcttggattacactggcgcaacataactcggagattcctgacctcatggagtttacattctgctggcggagacagaggaaacgggaaacataataaatacacacgttatatgatgggtgagggaatggggggacagtggggctgcagtttgcatacggggtcagggaatttgagaaggtaacaattagacaagtaaaggagtgagccatttggacctgagagtcgttttctcattcattcactcatctattgattaatgtattaatccctttagcagatgctgatcatctgctgtgtgcgtgaacagtgctggctagagaggagatagcccctgccttcaaggagctcccagaccagtgtatagagtctatcacaacccagtgtggtcaggatgtgttgtgaccacagatgtgtggaagtagggtggagctgaatcagcaagggaagcatcctgttgatccaaggaggcttcagagaggtggccgtgctaagtgggttgggtggggcttggatcagcccagccacactgacctttccattctgtaaacatcctaagctcaaacccaccccaagacctttacacttgctgttttctctgcctgagttgttcaggtctcagtccagaggtcccttcccgacgactcaaatcgaaaataca

SEQ ID NO: 1243355 - DNA, 4001 bp, Homo sapiens
acagagccctgctgagtcttgccctcggggcattctcacatttatgaagaaatgcctccccctccccctcccccccaaagtacggtgtggcagaaaacagcgccaacaggtcctgccagtcagaagccactcccctgatttcatggctcaagaccccaactataaattagcccttcccaccttgaatgtgtacacacactattgagatgcaggccgatccatgccatgggatgaatctgagaattgccaagacccaccttcccacgccacccaaccaaatcatgtggcatctgctacaagtgattttccccctgaaatcccacaagaaaactattttgaggccgggcacggtggctcacgcctgtaatcccagcactttgggaggccgaggcgggcggatcacaaggtcaggagatcgagaccatcctggctaacacggtgaaacgccgtctctactaaaaatacaaaaaaaattacccgggcgtagtggcgggcacctgtagtcccagctactcgggaggctgagccaggagaatggcatgaacctgggaggcgggcttgcggtgagccgagatcgtgccactgtactccagcctgggcgactgagcgggactcagtgtcaaaaaaaaaaaaaaaaaagaaagaaaaagaaaaagaaaactattttgaaaagcagttatctctggcctggtgaagaacacaccagcaccatgcccaccaaaacaggagccccatggctgtttcccagagaaacctgggacccgcacgtccattcactgcaacacagactgaatctgcagccaagctccgctctctcactactgggaaccctcaggggggatcccttagcctaaatcagcaccagtcactacccgcacacgatgttattactactgttttcttatgagtcagcccgtgtcactgattcctgacgagctggtgtggagagcagaaatgaatgattttttttttaactgcaatttccttctcaccaaccagtcagcaatcggagctctaacagtaaaccgattgctcagttactccacgtgggtgccacgcaagaggctgggagtattgctcagcggggccaacgggagggtggcacttgcctaaaccgcttaagtgggggaatggaatgcccaccgaagggcagggcagggaccctgctgtcccgtcactgaagatattcccagcctgtggggagaagtgtaaaagaatgaatgaaagaaacgcacgtggtttctgggaccaatgaccttagcctagaactgccgggatggtccaggaacgtaaagatgtagagatgtgggagccaggggcgtagtgatgcaaggatgcagggacccagagactacgacctcccaacccccggcccgcgccccgtactcacgcacgcagaggcaggccacgagcttggctgcctcctcgggcaccgggcaggtggggaagagcggcttgagcaggtaggtggcgaagaccagggccacgatgtactgcgatgaaggccggatgatgagcagctcgatccagagcttgaggaaggcgggcagcgagccgtagacctccagcatgtaggcgtagtcgccgcccgatttggagatggtggtgccgagctccgcgtagcagagcgcgcccacgatggagaagacgccgcacgcggcccacaccaccagcgccagccccggcgagcctgcctccttgagcacgcccgtgggcgtcacgaagatgcccgagccgataatggtccccacgatgatggccacgccgttgagcagcgtgatgttccgctgcagggtcacgccctcgccctcgcctgccggcgccgagccgtccgcgctcttggcggccagcatcttctcccgcgcctcttccttctcctcggccgccggcgccgctagcgcgcgccgcttcgggcccgcacccgccatgctctgcgcaccggccgggcctgggacacccgggagccgcggcccagcgagcagtgtgcgcgccgcccgccgcccgcagctgcgtcaggaaccccgcccgcgccgccttttaggccccggcccgccggccccgcccaccgtccgcggctcctccccgccccgtggcccggccccgtccctcagccccgccccctcggcccagctcggagcacgtgcgtcgtccggcccagcctggcgggctattcccaggcccgcgtggtcctcgaaggccccagtcctcctgcgccatggagaccccggcctcgcgacctcccccctcccggcgcccgcgtcatcccagcccgtcctcccggatgcgcctgggcggggcctggcagtcagggcgcgccccttcacccactggcccgcagcctctcgtcaagcctgggagcgggcagtgcaccagggctggcctgaggccaaggatggagtttggggtaccccccgaagggaacctaggctcctgtcccggatgggccgaggggatggaaccgcccccacaaccagctcctggggcacgggggagggatgagaggatgacctgaggggaagctcctgcagcctccttccagcctgggggctgcatcagtggggctggtgagccgcgaactgggacgagggaagaaccgaaccgaggccacccagtaattcccattgtatcccaaaagaatcttgccaaagacggcgatccggtgcccgtagctttgagaagcagtaataacacaggctttgggaagccagcaatctgcctgagctcaatttaatcaacagaaccgggggttcgctgggagccataagacccccacccccaaatctacctggggaattcaaaggcaggcttcagtgtgaaggggctttaaagcttgttattcctagggaatgcgagaggcatcttagctaaaaagggttgagaggtaatttcagttagaggcgagagcaggatgccaaggctcctaggcctggaaatgggaaggaatataaatactgccccgagattgaccagactggtgagcggccaaagacctgttcaaagggtgtgtgtgggtcagggaggaagctcctcagtatcaccccaccccggggttccttggcgtgtgtgcaaacgagtccttggaagctcacagcaggcatgtggggaggcctttgttctgggtgagcgttcagcctcccagggcaaacacgcaaacaccggttgcagagctgggtgttcacagcaagacagtctgctgggcagatgcctctggaatccacagaattctgaacaatagccgtggtggaggggggtcagaatccctgtcgtgctgggacctctagctgcagccaggaatgtccaggccccaccccagggagggggcggctgaggaatgccagggcttgtcattctggaccttgctcgccccccggtatgtcgggcattcctctgcggtgataaaaccgagcgaaatctcagcagcccaggcagccacaggcgggggagtgcggaggtcacacagatactaacttgtaatctgccgtccacattgctggctgtggaaggtgcagagacccctccatctgccctattcttcccgctgtgcctgcagagggaaggagacagtaccaccatggctgggcaaactcaccgagtgctcactgagtcctcccctagacagcttcttatgcaatagggtaggtgccagttagagccattttgcaaataaggaagctgaggcttggtagggttacctcgcttgtccggccagcaagtagcctgggagctgtccttttgactctgaacttatatggtacttttaatcattccaccattcttctttgagtaacaagaaaggcaaccaacagtcataccccaaagcataaaattacaaccatgataagccaaggacatgacagggtgagccagcgacagcgacagggaccaggcaggtccagatagacttttctgaggtggtacctggagctgagagcccagggtgagtgagaattaataagggaggtgcaggggtccccaccggcacagagggggccctgcacagt

SEQ ID NO: 1243356 - DNA, 4001 bp, Homo sapiens
tatatgtaattatttttaattaaccaagaaagcagcagaatgatatttccttgtaaaatctaaattttacatgcccggcaggggcagtcctaattactagcaggttccatgacacccacagggtgggtataactgaagtagccagcccaaacctgtcagagaactggccttgtcacattaaatcatgtaagtctaggcagctctggggccccaggtcccgtgggcaccgtttacataactttttttctttttttttggagatggagtctcgctctgttgcccaggctagagtgcaatggcgcaatcttggctcactgcaacctccgcctcccgggttcaagccattctcctgcctcagcctcccgagtaggtgggactacaggtgcccaccaccacacctggctcaatttttgtatttttagtagagacgggatttcaccatgttagccaggatggtctcgatctcctgaccccgtgatccgcctgcctcggcctcccaaagtgctgggattacaggactgagccaccgcgcccggcctgcataacttttttagaaactaatatacatccaagaaattacagcaggaagcacaaaggtcaggaaatttcttctactaagaagttccagggagatggggatcataaaaccggtatatgcaataaaaatacatccacggccaaatagggaaggaggacaaggagaggaagagaggagaaaatcaggctggtggttttccacacacttgccaggaaaataaactccagtgtaacgacttgaataacgatctgagatcaaagttgggaagcaaaagccgtctgcgcagcacacatgggacctgagtaatgcaggcagcctgggcaggtccccaaaaggcctcaccgccaccaaaaagaggtggaactgatataaggaagtactcacagcctttcaagtctgctcctcccagatctgaaatctgggagcagttctgagagacaagccccggatggctgggcactgaacagccgccctgcgagatgagctgccctggctttttcccctatcaagggcagagactgaattctttttaactgtgtcaccaagcccagggcatacaagaggtactcaaaaacgtgttcgccgacaccctgattcctatttatactgaccattacacaacatgtttgcttagagcccagcaaagaattttcagaatgtttcacgtctatctccccacattcaggagagatagtcacacaagatgacaggctatagggacgctcaaaagagccataatcaccaggggcacgcgggttccccagcgccagcagcccaacgctccaggctccagcacgccacaaaaccttgcggcattctctaaagtaaaaggactgattttaaaatgataatcgtcattcttgcgacagccccaggaagcctggctcctgaggtcctgagcccgcgtctttctttgccccaccgcggccgccacacagcacaggttctccgtcctgcagtcggaggcgcagtcacagccccactcagggtcaccgtcgcacagtctcacgctcgcggcgcggcccgcgcactcagcgtcccggtcaccctcgcacctggggtttccctctccacacacacccccggtctccctcacactcgccgcgtcgccagcacaccccaagactggctccctcgcggtcaccatcagcctccggggctcgcacccatacagcgtttctcccacactcggccctcacgctcgaggtccctctctcctcgtggcgccccccctcacccgcagcgcctctcgcgcggccccgatcggccagccccgcgctgtttctgggccgcatcccgctcccgacggcggcagcgaagacccacagggttcggctcccacagaacgcggcccagccccggccccgctcccggcgcgcccgcccatggcccagcccgttacctcccagtggcccggcgccgccaggatgctcggtcgcgccgccgccgccgcggcagctcaggccccgccccgccacgtcacccgccgccggatcgcgacagcgcgcgccgcgtcgggacacagttccgtgcggggccagctggcggcggcgcttccgggcccccgtggccgccacggcctggccggtacggggtccgccggcccagaacgtgagcgtggacgccagacagcccccagctgcctcgtcagggctcgagcagcccgtgaactgggcccggccacgctcgccgccctggagttagatggggcctccgagggcgtccacagcggacattcccgcggggagctctcatcggcccccgcaccccgttcctatctcgcacttgacctgggcccgacgcccagggcgccccctacagctcacacagggatccaaacggcctccgccgccgggccactgccactcgcagtctaggaaccccaggaagacacacactctggggacttgtccaaacacacgcacagctcagactcgtagcccttgaggcccccgcacccacaaagaaactgcaggctccctttgccaaccccaggcctccctggggctctgtcctcatcttcccaagagggctgccacccctcttgggggagctgcacctcctgccccccctcttgggggagctgcacctcctgcccccttcccctccctctgtttgctcctccatctttctctcgagttccttttcctctggtggctctggggctctctgtctagagcctcctgacctcatgggcgcctgagccctcctccgaaatttcctgtccacacctcaagcactgactttctccagggccctggaatcttttcccccagccttatgaccacaagtacacgtcctctggttccagaccatacccaagaccctgctccctgccacccagtgacagggacccagccagagatgggtagcacctcagacccttcctccccactcctcccacggcctatacctcgttttcttctccccagccacaacggcttctcaatccctatcctgctccccttaccccatctccacagagtaggggatgctcctagaatacagattgcgatgactttgtatctcccctgcctaaaacccttccattctcctctctgcaggcctgggatgacaatacttgaggaatcctcgctggtgctgccctcctgccctctgcttggaacccctcccctaagtgtcagtgagtggacgtatatatttggatcaatcgagttgcaccctttgcctcccagatcagttcctccggcctccctggctgagcagaaggacagctctggacacttgtgtcagcacccagcccacgtgtccctgccacagcttcatataaggtatgccggctcagccgggcctggtggctcacgcctgtaatcctacaactttgggaggctgaggcaggcagatcaccttgaggtcaggagttcgagaccagcctgaccaacatggagaaaccccgtctctactaaaaatacaaaattagccgagtgtggtggcacatgcctgtaatcgcagctactcaggaggctgaggcaggagaatcgctttaacccaggaggcagaggttgcagtaagccgagatcgcgccattgcactccagcctgggcaataagagcgaaagtctatctcaaaaaaaaaaaaaaaaaaacaccatatgccagctccgtctggctttgcagtctcatacccagttacgtagcccatcagctgaaagcccaatgtacaccacaccctgaatcagatgttctccaacaccatcagtgttcctcaggaccaccctgcaggatacatttatttgtaaccattcttttcttttgcttttagagatcttgctgttgcccaggctggagtgcaatggctattcacaggtgtgatcatagctcactgcagcctcgaactcctggtttcaagcgatcttcctgcctcagcttcctacttgggactacagatttatttcatctttttttttttttttgagatgtatctcgctctgtcttgctcaggc

SEQ ID NO: 1243357 - DNA, 4001 bp, Homo sapiens
tgcttgaacccgggagttggaggttgcagtgagccagcatcatgccaatgcactctagcctgggcaacagagtgagactctgactcaaaaaaaaaaaaaaaaagagagggcacactttatgttgagaattttctggttttttttttagagacagtatcttgctctgttgctcaaaccagagggcagtgacttgatcacagctcactgcaatctctaattcctgagtttaagtgatcctcctgccccagcctccccagtagctaggactacaagcgcgtgccacaatgcccagctaatttcctcttcctttttgtagtgacaaggtcttgctttgttgcccaggctggcctcaagcgaccctcctgcctcagcctcccaaagcgctgggattacagggagtattttatttttttttgagacagggtctcactctgtcacctaggctgaaatgccactgccgcacaatcatggctcactgtagccttgacctccccaggctcaagtgatcctcccgcctgggcctccctacgtgctaggattaggcgtcagctactgtgcccagcctcaaggagaattttccatttctgtagttttgctgcatgtagtagactttttttggaagtgattgcaaatgaagttagcaaatgtaatataaagaaaagcactggattaaatgtgagaaaacttgcattctagacctaaatctacctcaaacttgatatgctatccaggactattcctttaacctctctttgatcaattttcctacctgctctatctctattttgctccagtgatccccatctcagtcagggtgaaaggcaatgtccttgcaagtacctagcaggcatcctcccctcaaattccttactgctctcctctagctcaccgggctccaggcaccttgcaaggagcaaagaaacggcttaagggcctctttactttcaggttctctgcctagaagtcctctcgatatgtggaataccctgccattcaccttctgcaagtcttcactcaaatgtcatttcctcagtgacactctcactgaagtggcaccactcttcctgctttgtctccccgcctccttacatcccttatcatcatctgacactgaatagacttgtttactgtttctgtctacctgcatgttaggtcctcactgctgtatccacagaatctaaaaaaatacctggcatatcgtaggcacgtagtaaacacatgttggatgaacaaccaaatctgtaaaatgaggccgtcacgccggatggatcatccatccccttaagatgaaactgtgctgcgactgggcccagtcttcttgcattaccatcctgagaagcccagcgaccaccttcaggggcatactcactttgcaggagcctgcagaggcggcttcaggttctccctcctcgtggacaaggtctaacaactgaaagcccgagttcccggcggcttctgggttccccggcgtgtactcggactcctggccgctcgaggtggtccccaaggatcggcggctggaaagcacccggtagcggccctcctgccggacctcccgagccgaggcgcggagattacggcggacacgctgctggctgtcccgtgacgggcgcagaacttcccgcaggagaggctggactggttcctcctagggggcaacaggggacggaggccagcgtaagcaggagttcgcgagcgggtcagggatcgggtttcgtaccggctgcacccgaagatgccctccacaccagctgcaccacgcccaatacctgggagcacacagtggccaccaagtggaagacattattctccgccgctctctccaaaccctccgacgtcttctgtgccgctgactcgaccgcgtcgctccggaggcgtttacaagcgagcacaagagcctccgccggctccgcactgcgcttccgcttcacccggagtacagcggtcctggcggcctccatagtggctgccgctgagcactgtgggagctcgcggggtgtgatgggatagctttccagttctgctttaggacccgccccccagcacgctcctcgacgctgcgaggtcccgccccgcgtgctggccgcggtaaaagtggtagcagcggaggcgagcggagggtttcccgcggcgggtgaggcgctgggtatgctgggaaggtggggtcgctttggggttctgtgtgcagcgagcatggtgtccttggcaccagggtttcggcagaggagcctagcgtgggcctacttggactcctccgcgtggggcagctcgggacacccgggcctgcaggagagcggggttctaggctggccccggctctgcagtgcagccgggtgcctgccactcgcggggctctgtcgcagtactcgtgcctggcgcctcccctcagccacagagaccgcagtagctccaaccatcgcacccctaactgggccacgagttctctgattgccagacctgttgtctttgccactcactgttctgagtaattggagagtcgtgtattcactacacgccaaccagagtggtcctgtaaaagcgtaagcctagtgtagatacgcttctgcttaaaactcttgagtggctcccagtgcttttagaacaaaatccaaacgcctttccgaagtcgacaaggcccagcttgattgagcagaagatgtgataggagatgaggagcggggggcttctgcaaaagtgcttcggtcgctcaggcttttggcacattttgcttatgcaacctagttctttctaccttagggccttttcttgggaaagttggggtaaggattcctgacctgtaaaaactcttccccaacttttatcccggtctgtcttgtagatctcaaatgctagtttcctcagagtccttctgtaaccttggttttctctttctacaacgctctgtgtatttcttgcattcatgtagtctgtaatttgtattactctctcattagagtctaagctcttggagggcaagggtcttctctagcttgtggtggtggctccagtccctaatatagtgcctggcacatagaaggtatttaataaattttgttattttattttttcgagacagagtctcactctgctgcctaggctgagtgcagtggtgtgatcgaggcgcactgcagccttgacctcctgggctcaagcgatcctcacctcggcctaccgagtagctgggactacaggcacgcgccactacactcgggtaatttttaattttaatatatgtatatttatatatatatatatatatatatatttttttttttaagacagggtctcactctgtcacccaggctggagttcagtggcgccatctctgctcactgcaacctctgcctcccgggctcaagtgattcccctacctcagcctcccgagtagctgggagtaactgggactacaggcacaggccaccgcgcccggctaatttttttaaaaattttttgtagagaacggggtctcactatgttgcgcaggctggtctggaactcccagactcgatatccttgcgtctcggcccctcacagtgctgggatcacaggtgtgagccaccaccgcctagcaaatacattttgaatgaatgtagtggaccatctgctctgcagtctgacggctaatacaattagggcttggcatggtggtttctatttcctccttgtaaatggccatgcaagtttacaactcttggagaatgaggaggggttcagagaatatctcctgaatctgtagtgtagactgcttctgggagagaacaaataataatggatgagggcattcagccagagaaggtgtgtagtgcccaccagaagaggttcatgccttcataaaattgttaacacaagacatagttccaggtttgtttgtttgtttgagatacagtcttgctctgttgcccaggctggagtgcagtggcgcgatcttggctcactgcaacctctgcctcccaggttcaagcaattctcctgcctcagcctcccaagtagcagggattaca

SEQ ID NO: 1243358 - DNA, 4001 bp, Homo sapiens
gcgtgcaggtgcctgtgaagtgtctggaccacgcggggggccagcgcacacccgcggagagaaagcagtgcccactgggaagtgggcaggaagaggggcagccctactcccacctgcggcctgggggagggtggacaaggctccccaccagctgccgggctcagcaggggtggtgaacagataggagggactgagccaggcccatcttcccccagccctcctctctccccatgacccagagtgagacaagaggaacccagtgcccagctgcttcttgactatgtgtcccagacaagttaccctcaatctctggcatcagtttcctcaactgtcaaatggggcagtaactgcccctcttgccctcctggggcagtggggagagtccaccatggtctgtgtgtccagtcctcagagaccagccccacagggccttggaaaagcaggtgttcccagggcgagggtggcagtgactatccaacagcagcctggccccagccctggcagccctaccctcaatccctcaggtccaggcccctggcctgatccccacattcttcagcaaacaaccttacacagcagacactctgggtggaaggcatggggccggccgacagagtgacagacaaggcaccaggtaaacaggagaccagctccaggtccagctgaaccaacctgctaatctctaggttccaggaccagccatgtagacaggttatggattcatcggtgctgtgagggacaggggacctggaggaaaaggggtgtgtggacgctggaccccaaccagggtctggagggagtccctggcctgtgggagacagacacacctcaggggtcagaacccacagagaaaaggctctgttctccttagccaggaggcaggaggcttcggccagtaaccccagccaggctaggcagcctctgaggaggagtagtgcctttgtagctaaggaatgtggttgccagcaatgaccaactcagcccggtcccagacacaccagctgggacacactagagtacagacacaaagactcaccggcctgcagacagtgatgagtacactagccaggcgtgcacacacacagagcccagctcccatacgcccaggagtccagacctgcacacacacaggcacacgtgcagacctgtatactcacacacacactacagcacacacaggtgcagacacactgatgcctttactgcgacccctcctgggtacgcacaggcaggcgcatgcacacatggctgaccccaaagggacctgcatacacacgcccagctgtgttcacacgcacacgtgtacacacacacccaggcaaaagcacccaggtcttcacctttccggaggggctccaggcggcccaacaccctccttcacggcacactgaggccaaaacgcgaccaaagggcgaggccagcggccaggagccgcagtgcgggcccctccctgccaggatgcccccccccacccccgtgcaggactgagcttcctgcgccgggactccgaaggcgccgggccgctgcctcccgacaacgtccgcgtcctccccgcgggagccccctcgggcccccgtgcgacccctgctcgccccagggggacgcgctcggggagggggcggcgggccgggggcgagcgctggcccccacctggtggtgcgtctcgccctccacgttgacgccgttgacctcgaccaggcggtccccagcgcgcagcgcggcggcctcggcgggggaaccgggttccacgcgccggatgaactgcccgcggcggcccttctcgccgtgcaggtggaagccgtagccctgctctccgcgcaccaagcggcacaggcgcggccgcagcggctccggcgcggccatggcgcccgctgcccaccggccgcccgcgggcaggggcgcgggggagctcgggggcggcggcggcgctgggcacccggcggtggcttcagcggcggctcctgttcggctcccgtcgcctcgggatccggctcgggctccggctcgggctgcggcaccgcctccgcgcccgccccttccccgcccccgccgcccggccgcccccgcctccagtcccagccgtcccggccaggcccctacctccgcgcccggccagcccgaggcggggcagggggaggcggcagggctaggggaccccttaaccaccgggacctctctgtctcgcccctactctgggcagccgccttggtgccagcgcctttgccttctatcccaggaacatttattggatacctactgtatgcgcagcatcgaggcaggtcttgaggtgggcgacgggttggacaaagggtctccaggccaagggaccccgacaaaggggccaaagggtaagaacaagggccacagccctccccaccctccccgggaagcccttccggacccccttgcctgtctcctctcggctgtgtctcacctggatccctcccagccagtggctgggagactccctggcccagggcagagtctcaggagggcccaggaggcaaaaagggctttaaaagtgacacgcagcagcccctccctgcatcctgggggccagtggctgggagactccctggcctacccaccgtgttcggcctatctgcaccgcgtcggttcccacgccctgctgccattctttcccttggccgggccggccccctcacttgtgtcccagcccaccccaggcctggactgtgactttgcagggtgacaaaaggatatgagtctcgagggtccctgctacccacctcctgacatgggctacactccactgaattatttgggctctaagctctgggtgtgcacaggcgctgctccacagtgtccacaggcaggcagcaggcctcccctcccctgcccacagccgtccacgtccctcagcctctacctgaagcacgagtgtccctccttccccaacaggacagtcaccaccacagtgaaatcatttaggcctaagtgcattttacctggaacaaccctaggggaccggccacttcacagacctgcaaacaggcctggagagggaaaagacccacgaagcctcctcagctccatttgggcccagggatgtgagattcggagtccatgctatcttcaccacccagctcttcctctgtctccaatataggaaggtagctgagtccaggcacagccccagtctgccctcctccccagcccagccaggcccccttgcacatacctggttcccaggggtcaggcacagccagcccaggcaattccccatgtgagccgtagaagcaggcttggcgcagtcctcctctccctctcgtctctccggggccctgggctgggctcccctgcccccacccaagcacagggctcgcctctgggcagcctcctgggccatggccccctgggtgcccatatcccggcagctgcccctaaaagccacttaggctgaggcgccgcgactgctcgccaccccaacccctgcaattcctgggtaaggctgcttcaggctcccgcccggccggccgcttccatctctctgtctgcatgtccagaggctgcctgtctggcctgtggctggcctccctggacacagcctggtgctgccacccttggagtctgtgaagatggctgtgggcagtgtgacccaccaccacgcaccccacataccacacctgtttgggcttagggggtcatcccacaccaaccaggtccacccaaaacctggcaggctgtagcttcctggccacactagagtcgagggaggtggctggatgggagactccagcagccccaggtcccctgggtaagggggcttgcagaccttacccgccctgggtggggcagacgcctgatcagccttgggcatacaccatccttccctggcccaggactcagctgattcctactcccagtgactgaagatgggctgaggggccggagcagtggctcacgcctgtaatcccaacactctgggaggccgaggtgggtggatcacctgaggtcaggagttcgagaccagcctggcc

SEQ ID NO: 1243359 - DNA, 4001 bp, Homo sapiens
atgtcagcgggggggaccgccccgccaagggagcaagggggtccttctccacacagctagtgctctgtcccctgggctcaggacctgcccttggtctggaacacccttctcctgtccagcctgccagatgcctcatctgaagcctcctgcccaccctctgaaccctctctgcatggccaccacccagcccgtcacaccagaaactccagggacaagcctgtggctccctggccccacaggggctcagctgggccacatgggctgaattagagggtgcaagacccccaaaatctccagggccccaccacatagactcactcctcccccagacacacctggtggcacaggcgtggggcttcaaggctgaccctgacacctgcccaccaaagtgcccctcagggatgcagtcacagcacggcccccaggctggcctgggacgcagggaaggcgtggggacaggagtccagttcgggaggggaagtggagcacagcccccaggctggcctgggacggagggaaggcgtggggacaggagcccagttcgggaggggaggtggagcacggcccccaggctggcctgggacggagggaaggcgtggggacaggagtccagttcgggaggggaggtggagcacggcccccaggctggcctgggacggagggaaggcgtggggacaggagcccagttcgggaggggaggtggagcacggcccccaggctggcctgggacggagggaaggcgtggggacaggagtccagttcgggaggggaggtggagcacggcccccaggctggcctgggacggagggaaggcgtggggacaggagtccagttcgggaggggaggtggagcacggcccccaggctggcctgggacggagggaaggcgtggggacaggagtccagttcgggaggggaggtggagcacggcccccaggctggcctgggacgcagggaaggcgtggggacaggagcccaattcagtggaggaggtgggagcgtgatatgggcccagtccgcaaagacacatcacacagccacagacacaagacgtccacacacacctgcaaacacgcacagcagcccacacatgcggccagccccacagtgctggcccggcagcccttcccacgcctgcacagcggcctgcggggcagggtttctcagggcaccagacaggaagcaggatctggtgggtgtctggggccctgaggccaggccaaggacccctcagtgttctcagggtcattctggccacccctctgcctctgtccagaagcagccgtctttcactctacaaggcaagaagttctgcctatcaaacctaaaccccttcattgtcagcagggtcccagtggcgccaggcacagcactaaaacctcaggtggaggggctgcaatggaggggccagggtgggctgctggcagcacatgggctcgtggggaaggggggcccagagagccgaggagctcgggcggcgttcatagctcacattcctcctccctgccctggctcagcacacacttcctgccgcctcccgccaggccctcgggctcccacgggctccaggctccctccctgccggcggccagcacagagctggaccatccctggtcccccagccatgcctgtgtccggacaaagaggctggcatgggggtaccctgggcacccccccagatggtgacgcaccagccctggcagagaaaggccttcattgttgctcagcgaccagcctgcttacatcaaggtcccggagtcccctccttccaccccgggaggctgagcggctgccggttcctcctagccctcccttcctcccaccccacctgacctgtaccagcctctggggtgggctccgtggaggggctcccggagcccgggcaggtggcgtggcactcccggagcgtgccatgacagcggcacagtgacagcaagtggcaggcgtccggccggggtggcctgaactctctggccgacccaggctgccaccccacttatctacctccctctgcggccctggctccccggggatgggtggggacgtgggggctgagtcactctggggagcagggtgatgactgagcccgctcccctgcgaaggctccagcctggcgccccccacccagctaggcttccgtcccaagaaaggaaggaaggaagctgctggaaggccctgccctgccccaggacccagggctgaggggacagggaggagtcccggccccagaacacaggacggtcctgttgaggctccagaggagcaagagccagggaagcccggaagcccccgcaggcaccgcgccccaaccacacagccgcctcccgcagaactgtcacccctcacacctgctcttagcccccaaggccctccagatgggggtggagacatgggctaggggcagggggcagagggctcagggtctgccaccacctccagggcctggcaccgctggccaccccgtctctgtttgggggctgtcccctgtcgtcactactaggatcagctgcactgcagctgcggccacccccagcctggtgtggcccagggctgagtcatcactaactaggccttcacggcccccaaaaggaggggccaaccacatcagtgtcctcccctgcccacctcccctatccccagccaggacagaggacactgagagccacccttagctcccagggggcacccaaagttgggccctctccatccttcaccaaagacaaactacacacatcccttccagagctctgcctctctgccaccagtgcccccactggagccatccccgcaaggtaagctttgccctcctgggctccctgaccatctgaggcatgccctgaacccaggctgagaagggcaggatctgagcctgctctgtggaggtcaggtgaggcccacctcttcctgcccatgctgggagctcaggtgaagaaacctcaggtcctgagccaggcgcaggggctcacacctgtaatcccagcactttgggaggctgaggcaggcggatcacttgagcccaagagtttgagaccagcctggccaacacggtgaaaccctgtctctaccaaaaacacaaaaattagccaggtgtggtggtacacgcctgtaatcccagctactcagcaggctgagacataagaattgcttgaacccaggaggcggagcttgcagtgagccgagatcgcaccacagcactccagcctgggcgacagagtgaaactccgtctcaaaaaaaaaaaaaaagaaagaaagaaatgaaacctcagacctcaggggccgggtacagtggctcacacctgtaatcccagaactttgggaggtcgaggagggcagatcacctgagatcaggagttcgagaccagcttgagcaacatggtgaaaccccgtctctactaaaaacacaaaaattagtcaggtgtggtggtgcgcgcctgtaatcccagctactggggagggtgaggcaagagaatcgcttgaacccagacagcggaggttgtagtgagccaagaaagaaaaagaaaaagaaacctcaggtcttgatgccagaagagagaaggggagaccctgttccttgggtgccccctgacctcctggagcccctgtccccagccagactcatgcacaaagggacctgccactcaggccaccctttgttcctctaaaaatacacccagaggaagcccctcctagggcttcctgcagcccccagagcctgaaatagcagagggggaaggtcccacccaaggcaaggtgcctgggccactgcaccctccagataaagtccgagggccggatttttccacaggaaggtgaaccatgcgtttgtgtccaaatcaatggacaaacgcctgaggcagagggggagcttcctcctgggggagggaaggtggctgggaaagagggaggccccaaccctcagcctggagacaggggcttaggaccagccagcccccctgcaaggccagcccccccaccagccctgggctgggcaccttggccctg

SEQ ID NO: 1243360 - DNA, 4001 bp, Homo sapiens
cgtttctagcactatagccactcctacttttgtcctctaaaataaactctttggctctcctttaagtcctcagaccacaagcgaacacatctctctctacataatccctggggtgttggggaaggagacctctaaattagcctctgtgagaccctatgccaagacagtgccctttggaagctgtacccaaagggcctagaacagtgcctggcacatagtgagctctatgtaaatatttgtttaataaaagggaaaaagtctcctagcaatgaagctgggggaaggtgttcctgaatgctctgccttttctcttgttcgaggattttctttgacttgtgaaaaggaggctctcttctcttacttccataggaaatgtcatccaaactagaaaaagaaccatgatttatggggaaaactacagtttttgctataaaccctaagacaggaactcttctgcaactcacagacttagcaaacccaatcgttggctccaaacctgaggctctttctactcttactctcattgctgctggacctctaaggtaaacatggtcatagatctctccatacttgtccctactttggtctcccacttctctccttcggggaccctatttcatcttcatctcttcatgcattaaccccagccccgagatccaagccccatcacagaaccacgctcccggaaggcatattgagttccactttccattattaatctcaggctgccacagcagagtggagagttctgttcctgcccagccccctcaccccctagcagtgtccatgtgggagaagaggggcaaattctaggctctgggtgattcctccatgaaggctgtattggtgagactggagtacaggctgtgccagcatccatggggagagagtagcaacgctcagctataattagtcacccccacagcagagccagcacaacagggagaaggaggagggtctctggtgggaggagggaccactggctgctcagaagggaggaggaaggagcagatgcaaggaaaagcagctctattcagggaaaaagaagtctgaagcacagccttcaatgctgtcaggactgaagaggtcggatgtatgaaagcatctagggtagacagcacacaggaaggccccgatacacggaagtttcttataccctgaagtgagaagaatgtggacctgaacgtgggttgggggggtacccatacacaggcacaagaaggcagcagctttaagtggggagcaggggagagctggaggaaaagtggcagtgtagtttcccaagggaatggacactcggacatggtctccagggaaggctgctttttcagaaccaggatgcctgtgttcttgggagaacaccctcccctcaatgtccccacacatcctcaccagcgacagaggtttctgggaggctagggattggtgggggagagaccagactgaagagggcctactgcaaggggaagaggggagcggagagggcaaaggagcctacagatggagttggggagagcgggggacagcccttcagaaaggcaaatcctcagagctcccaggggagaagacagggacctgggacccacaagaagcgatgcaggaactgggcgagagcccggatttgtggaatccaaacctaagtcccagcaccgtgcaagaagccagccccaatctgaggaccgaggaggtgggggtgttgggggcgggtccgccgctggcggtcggcctggcgcacgcacacacgcactcaccgattttggccagactggccaccaggatccacagggccaccaggtagggcgcctccacctcgtgccactgccagcggaagagctctaagcctgggggaggctcgcccggggactctggcttctgggtgggctcttcggccgcccccgccaggggcagcgcgagcagggacagggcggcgcgcagcatcctgccgcctgcccagccgccctcccggcaccgcacggccgccggccccgcgtcgccgccgccacctaccgggcgcccccgcgtcacaggcacgtggggcccgctccccccaatcccggctccgatacccccaagccaggtccaggctccgagaccctgcctcggactctcgtagtcggggactctctcctctttcctccctaaatcagtcccagctccggaaattccccagtgcagctctcccccaagttccacaacctactccttcgagtccgcgcccccaaacctccccaaaaccgcccccaccagatccagagcggtgcgcggccacggcccccctggggcagcccgcagcgggaagggcgggggtctgcggggggcgcggtcaggacgggaggggcacggctcctcctcggccagcgctgctgtgcggcgagcagcacccccctgggaccaaggcgcggccgggtgcaaaacgcaggggaccgtgcttggccgccctccgcccacgttgccaagcccaggaccccctgccggcccccacccggacctgagctgcgcacgcgcactggacgctccccaaagcagtgacggacaacgctgcccccaacgtcccagaaaccctaaggcccagactggcccagctcgtgccaggcgaagagggaggctgttcttcatctcccaaaccaaggggcacctggccctccctttcagtcacactacagagaactgtctcatctctttgatgaagctgacaggaacctatggaaaacccagcctactgattcccttcaaactaggcgagatgcacccaactttttccaaatctgaggggcattcggctcatagcgccccaaacagaggaggaccgtctccacttttcattcaggctgaggggcacccatcccactttttctccaaaactgaggggaacgtgttctatctgccccctcaaactgactcctcccaatcttttcccagaaaactgaagggcatccttccctcttcctcccacaactaaagggaactgatcccacctcttccttcaaactgggtggaatttattctcacttcttgctccaaattgaagggaccccctctcactgctttccctaaatgaggaaaccacagggactcacccctcaaatggaaggaatgagggctatcttgtccctcaactgagagagacctggccggccactatctaaagaaacttctgccccatctgccctaacacccctcaaagagaacgcagcctcactatccccagaccaaagaaagcctccccgccttctgcgcgttctcgaaggtggggcgcgagctcggtttttcccgccctcctagccagtgaactaacgggattcccattgggccctgtgagtggctagcggcggccccgcctccggcagtggttacctcctggcgcgcactcggggactaatcttggctccacccccttcctcggccccgcctccgtctggccccgcccctccagccgcgtccggtccggccgggcccgaaccgcggagctacagtgtgctttgagtagaagctgcactggggccgggactcggaggcgcgctgcgtgagccggccgcagagccatggcgggcggggaagaccgcggggacggagagccggtatcagtggtgaccgtgagggtgcagtacctggaagacaccgaccccttcgcatgtgccaactttccggagccgcgccgggcccccacctgcagcctggacggggcgctgcccttgggcgcgcagatacccgcggtgcaccgcctgctgggagcgccgctcaaggtgagggaggccggagaaaggttggggcgatcgggggttcagggtgggcgccatgaaaactggtgggaggtgctccgcgggaagaggctggagcgagtgttcttctccggaaaagtcttgggctggggtcccagggtccactctgccccgcctgcgggggagtcccctctcaagttgaggggaaactgaagaggggtgccaggaacttggctccgccattctgactgcccttcgaattaggcgcacctggggaggtgc

SEQ ID NO: 1243361 - DNA, 4001 bp, Homo sapiens
gatcactgcactccagcctccgcaacagagcaagactctgtctaaaaaaaaaaaaagggccgggcgcggtggctcatgcctgtaatcccagcactttgggaggctgaggcgggcggatcacgaggctaggacatcgagaccatcctggctaacacggtgaaaccccgtctctactaaaaatacaaaaaattaaccaggcgtggtggcgggcgcctgtagtcccagctactcgggaggctgaggcaggagaatggcgtgaacccaggaggcggagcttgcagtgagcagagatcgcgccactgcactctagcctgggcgacagagctagactccatctcaaaaaaaaaaaaaaaaaaaagagggtcatgctctgtcgaccacactggagtgcagcggagtactgatggcctagggaagaaccttttctttgaaggggaaatggtgaaggccctgagcagggcctgctttgctcaggaatggccgtaagtcctatagcatcagcatcttagagatggggatagggtggccaaagcgtgtcagtgggtttccctcaagaaagagctggatccgaagtcgtctggactctagagccatccattcctcggggggacctcacctggatggtctgggcgcacagggagcagcaggcccctggatccccctggtctggctcaggctccgcgtcatcaaagggacctgcgcggcgccttggggccggggcctggggcggtggaggcccgaaggccagaggcacgtgcggcggcggcgggaggcagaggtcctggcggaggtctgggcgcacccagcgcagcgtgagcgggaggcgagcccagggcggtgcgcgcagcatgtgcgccagcacgcgcaggtggaaagcgaaggctgtctctcctcgcaggcgaggccccacgtgcgccaggcggcgcgaggcgtgcgggtgctgccaagcccactcaaactgcgggcggcgtacaggggcatcagggcggctcggagcgaggggcggaacccaagccctcacccggccgccgctgcccggtctccttccttacccgaagggcggccacggaggacgggaagccgtgcacgacgagcaccatctccctgaggaggagaaccgtgatgtccctgtcgcagcccagcgcctcagccgcgggtcccctccaatcccacccgagagcggggtcctcattcccggcttcagccgagaagtgcagccctctgcacctgcccacctcaggccctgcctccagcccaggtacccacctgtcccacctcctctctctcctgcattccacccgaccccagcgtgcccaccaagagccctatgctggaacccagcctggatcatcacccccgccccagctagctccttccctgagttccgccgcggagatgccccgggcaccgcctccccgtcacgctcctcccctgcgacaggccccgtccccaccacagacgccccgcctctgtcacagtcctggccggtccttctcaacaggcctgtgccccgcggggtccgcctcctctgggacgccttcctcccggcacagaaggcctccccctctcaccagggccctcgcccgctggtccgccaggccccgccttttttgcggcccccattgtgctgctggacccgacgagcagtgttgacagtgaaccccacgtagacgcggccccggtaccgggggttcaggcagtagagcaggtagacgccgaaaaagcgccctggcctcgccgcgacccccgcgggacccatcgggccttggggttcgggaaccacagcagggggttgattgccgtgacctagggtccaggggagggctggatcgctagggctgcagggtgcttgcttcggaacaagctctcggggactatccggaggcagcctgcaggaagccgtagcgccggtacgtgcccctctcctgtctggaggcgggtgtagaagtccgaccgcggaagccagactgctgtccagtcggcgagcgcgtaccattcagcatcggctccgcccgagtcccaccttcctcaggctctgattggctgacacatggcaagcgcgaaaagcctggaccgctggaaagcccggctgcttgagggcggaagtactgcgttgacgtacgccttagtaagggcggaagtgagttttccagcggaagtggctcctgtaaggcagcaaggtagcgtggccggcgcccgagctggggttgtgtccctgctgggctgccgttccagctggactgccgccatggaactcagcgccgaatacctccgcgagaagctgcagcgggacctggaggcggagcatgtggtgagttgagccgccggacaaggggaaaagagctcggggggcgggttcggcaccattcatattcttccgctcggtaggaggtggaggacacgaccctcaaccgttgctcctgtagcttccgagtcctggtggtgtcggccaagttcgaggggaaaccgctgcttcagagacacaggtaaggccctgggagcaccttgcctagctcctgtaccacaaccccagccactccccctacccctgcaacctgactcccgcactccccctggcgtggctcagggaccttgaggatcccgccttcgtgacccctgcttcgagtatttcgatgtagaccctctctccaagtacgtgttcccacggcctggggactacaaccttggggacaccagtctcttgggtcaccctagcctcggggtgtgcgatcaccgctggccttttcctaaccccatctctcgccccaggctggtgaacgcgtgcctagcagaagagctcccgcacatccatgcctttgaacagaaaaccctgaccccagaccagtgggcacgtgagcgacagaaatgagggactgggatctgcacagccattaaattataaatctggaccagcttctgtgtcgatgtgtgtgtgggaggggtgctgaggccgagtctaggacctggcctctccctgccctgcctccgtccattgttttaccttggacacgtctctgtccccatctaggcctctatccctgcttgtaaaatgaaagttctaccgtaaaagtcccttccagggtctaccgagaaagccttctctctgcaactccgtttagacatctaggagtctgtactgccaccacctacccacctcctagagagctcagggttcctcctctctgctagccttcaagatgcagagatgagaaagtgatcggggtttcagggccctgaccagttgaacaaacctctccctgacattaccgcagtatcagaggcaccatatagaattccacatattccttgcaggttccccccggccttctcaggcccaagagggagtggtgcccaggtaggggctcatcaactcctggaatgctgatgttttcagacccactggagaaggttccagtggccccatagccctgggcttaatgtgtctacagctgcccccggaggaccatggaggttttaagaatagtgggtgtgggacggggataggggtgagattagagtaggaatataaggctgacctgagtcagaaaattggggcaggtgatgcccctgtatcagtcttcataacaggttagtagggttgctaggaccttgtttgttttatttgttttttgttgtttgagacagggtcttgctctgtcgcccaggctggagtgccgtggcgccatctcagctcattgcaacctctgcctcccaggttcaaaagattcttgtgcttcagcctcctgagtagctgggattacaggggtgcaccaccatgcccggctaatttttgtacttttagtagagacagggtttcaccatgttggccaggccagtctcaaactcctggcctcaagtgatctgcccgccttggtctcctaaagtgctggaattttaggcgtgagccattgtacctggcccagattgctaggactttgaacagaggtccctgagacctagggagggagcccaaataacctagttggggccagggctcgttg

SEQ ID NO: 1243362 - DNA, 4001 bp, Homo sapiens
gatcactgcactccagcctccgcaacagagcaagactctgtctaaaaaaaaaaaaagggccgggcgcggtggctcatgcctgtaatcccagcactttgggaggctgaggcgggcggatcacgaggctaggacatcgagaccatcctggctaacacggtgaaaccccgtctctactaaaaatacaaaaaattaaccaggcgtggtggcgggcgcctgtagtcccagctactcgggaggctgaggcaggagaatggcgtgaacccaggaggcggagcttgcagtgagcagagatcgcgccactgcactctagcctgggcgacagagctagactccatctcaaaaaaaaaaaaaaaaaaaagagggtcatgctctgtcgaccacactggagtgcagcggagtactgatggcctagggaagaaccttttctttgaaggggaaatggtgaaggccctgagcagggcctgctttgctcaggaatggccgtaagtcctatagcatcagcatcttagagatggggatagggtggccaaagcgtgtcagtgggtttccctcaagaaagagctggatccgaagtcgtctggactctagagccatccattcctcggggggacctcacctggatggtctgggcgcacagggagcagcaggcccctggatccccctggtctggctcaggctccgcgtcatcaaagggacctgcgcggcgccttggggccggggcctggggcggtggaggcccgaaggccagaggcacgtgcggcggcggcgggaggcagaggtcctggcggaggtctgggcgcacccagcgcagcgtgagcgggaggcgagcccagggcggtgcgcgcagcatgtgcgccagcacgcgcaggtggaaagcgaaggctgtctctcctcgcaggcgaggccccacgtgcgccaggcggcgcgaggcgtgcgggtgctgccaagcccactcaaactgcgggcggcgtacaggggcatcagggcggctcggagcgaggggcggaacccaagccctcacccggccgccgctgcccggtctccttccttacccgaagggcggccacggaggacgggaagccgtgcacgacgagcaccatctccctgaggaggagaacggtgatgtccctgtcgcagcccagcgcctcagccgcgggtcccctccaatcccacccgagagcggggtcctcattcccggcttcagccgagaagtgcagccctctgcacctgcccacctcaggccctgcctccagcccaggtacccacctgtcccacctcctctctctcctgcattccacccgaccccagcgtgcccaccaagagccctatgctggaacccagcctggatcatcacccccgccccagctagctccttccctgagttccgccgcggagatgccccgggcaccgcctccccgtcacgctcctcccctgcgacaggccccgtccccaccacagacgccccgcctctgtcacagtcctggccggtccttctcaacaggcctgtgccccgcggggtccgcctcctctgggacgccttcctcccggcacagaaggcctccccctctcaccagggccctcgcccgctggtccgccaggccccgccttttttgcggcccccattgtgctgctggacccgacgagcagtgttgacagtgaaccccacgtagacgcggccccggtaccgggggttcaggcagtagagcaggtagacgccgaaaaagcgccctggcctcgccgcgacccccgcgggacccatcgggccttggggttcgggaaccacagcagggggttgattgccgtgacctagggtccaggggagggctggatcgctagggctgcagggtgcttgcttcggaacaagctctcggggactatccggaggcagcctgcaggaagccgtagcgccggtacgtgcccctctcctgtctggaggcgggtgtagaagtccgaccgcggaagccagactgctgtccagtcggcgagcgcgtaccattcagcatcggctccgcccgagtcccaccttcctcaggctctgattggctgacacatggcaagcgcgaaaagcctggaccgctggaaagcccggctgcttgagggcggaagtactgcgttgacgtacgccttagtaagggcggaagtgagttttccagcggaagtggctcctgtaaggcagcaaggtagcgtggccggcgcccgagctggggttgtgtccctgctgggctgccgttccagctggactgccgccatggaactcagcgccgaatacctccgcgagaagctgcagcgggacctggaggcggagcatgtggtgagttgagccgccggacaaggggaaaagagctcggggggcgggttcggcaccattcatattcttccgctcggtaggaggtggaggacacgaccctcaaccgttgctcctgtagcttccgagtcctggtggtgtcggccaagttcgaggggaaaccgctgcttcagagacacaggtaaggccctgggagcaccttgcctagctcctgtaccacaaccccagccactccccctacccctgcaacctgactcccgcactccccctggcgtggctcagggaccttgaggatcccgccttcgtgacccctgcttcgagtatttcgatgtagaccctctctccaagtacgtgttcccacggcctggggactacaaccttggggacaccagtctcttgggtcaccctagcctcggggtgtgcgatcaccgctggccttttcctaaccccatctctcgccccaggctggtgaacgcgtgcctagcagaagagctcccgcacatccatgcctttgaacagaaaaccctgaccccagaccagtgggcacgtgagcgacagaaatgagggactgggatctgcacagccattaaattataaatctggaccagcttctgtgtcgatgtgtgtgtgggaggggtgctgaggccgagtctaggacctggcctctccctgccctgcctccgtccattgttttaccttggacacgtctctgtccccatctaggcctctatccctgcttgtaaaatgaaagttctaccgtaaaagtcccttccagggtctaccgagaaagccttctctctgcaactccgtttagacatctaggagtctgtactgccaccacctacccacctcctagagagctcagggttcctcctctctgctagccttcaagatgcagagatgagaaagtgatcggggtttcagggccctgaccagttgaacaaacctctccctgacattaccgcagtatcagaggcaccatatagaattccacatattccttgcaggttccccccggccttctcaggcccaagagggagtggtgcccaggtaggggctcatcaactcctggaatgctgatgttttcagacccactggagaaggttccagtggccccatagccctgggcttaatgtgtctacagctgcccccggaggaccatggaggttttaagaatagtgggtgtgggacggggataggggtgagattagagtaggaatataaggctgacctgagtcagaaaattggggcaggtgatgcccctgtatcagtcttcataacaggttagtagggttgctaggaccttgtttgttttatttgttttttgttgtttgagacagggtcttgctctgtcgcccaggctggagtgccgtggcgccatctcagctcattgcaacctctgcctcccaggttcaaaagattcttgtgcttcagcctcctgagtagctgggattacaggggtgcaccaccatgcccggctaatttttgtacttttagtagagacagggtttcaccatgttggccaggccagtctcaaactcctggcctcaagtgatctgcccgccttggtctcctaaagtgctggaattttaggcgtgagccattgtacctggcccagattgctaggactttgaacagaggtccctgagacctagggagggagcccaaataacctagttggggccagggctcgttg

SEQ ID NO: 1243363 - DNA, 4001 bp, Homo sapiens; identical to SEQ ID NO: 1243361

SEQ ID NO: 1243364 - DNA, 4001 bp, Homo sapiens; identical to SEQ ID NO: 1243362

SEQ ID NO: 1243365 - DNA, 4001 bp, Homo sapiens
atgtaagtgtaatcagacattgtcattttatgccagttcttccagggagggacaagggcatgtggggtgagggaaaagtcttcggagtaacaatactgtcaaatactcagtccagcctggttaacatggtctaaccgtcctatcagacatcacaacaaaaggacctagaaacctgtcaaagcatgttgttcttccacaggtattaaaatatgtgcatcttgggagagtgttttcttaactgaaatttagggagcaaaccccataaaaggcagtcaccacagaaacaggatgatccccaaatctaggaaaactatctcctacactgatctaagacccctggctgttaaagaggctctttctgtaaatactgcaacataagagacagaaagagacattatattctcatgaacactcaggagagaaaaggtcacttttacttatcttctcaacccagcaaggctctccaaacctggatgactggaatgtcgcctgtgtgcaaaggctgggcctcgtgagcatggttgtttactttggcacacagctaagtggggttcaaaaatcaaaactgaatgacccaatggcagaaagttattcctttcaaatacaataatgcaatctccactgtccaaggaatctaattaatcattttgttttccagagctgaaaatactcctacctagaatctactttgtatggctggcgcattctcttctgtgtcttccccttagagaagtgtcctctaatcctttatggaccgtctccatccccgttaatccctatcatcgcccactgttttcacaatggcatctgtcataggttatcatcatatgaaacaggtaatatctatcgaatgcttactgtgtgccaagcactgttccaattgctttccaagtcaaactcgtttaatccttacaagaagcctatatggtggaatctcttgtcatcctgtctttacggcaaggaaacacgcgcaagcagaatgaggaactggcctaaagccagttcaggaacagctttcacagtggcagggctgggatcaaacccaggaagtgtggttcgaaactatccgctcttgtgtttttattcatcggcttattatctgtcccccattaagctcaacacttcaggagggtagagatccatctattactttgcaacctctttggctgatctggtgcctgacttgaaataagtgctccacaactacttgttgaattcatgaattgcaaagagttcggtataatgggagtagagagaaaggtgtaggagaaaacgctgcggggagaggaaaggattggctcacaagggcctggaaggtcaggctaggcaaagtgaattttatcctgttggatgcggggagcggctggaacaaattccacctccacaactgtgttgatctccgcatctctgttgatatgaacctcacaacagtctatctcctcctataggtgcccagtcaagatttactgaatgacataacggatcctgcaagcctgcaggtttccagagggaaggggacttgtgcctccttgcttcgtacctaccgcagcccacggctcacagcaggcgagggatgaatgaatggatcggtaaggggcggaccctcccgcttcccccaacccggcgacctacggaaaggggctgaggggttccccgtctgggaaaagggctgccaaagactctaacggctctaaagtcagacggagaaccccgatccccggactggcccggacggagaccaccgtggggatccggatccgccaccctcctccctccaggcgggccccggcccctctccacccgagtgcggctcctgcctctccgtcggggctgcgggcctgccgaggccacggagccagcgagggagacgggcgagaaaggctcttctcccttaggaaagagagaacggcccgaaatgacaggacctccgcctcccgggtgccgactcccagccccacagcccggctcctcctacctccggcgccgccgcggcaccttcttaacggagactcgcgcgcctgcgcatgcgccgcccgcgcccccgcggagcattgcctgcgcgcaggcgcagagcgggcgcgcgcggtggtgcggcagcctcgcttccggtcttcctctgcggcgccgggcgcgggcccgcggcggccagcgcttccggtcggcaggaggcggggcgaggcggaagcggcgcttgcttcaggtggagtctgttagtttttgagaaagagttagggcgagtttaaggcactgtggcagctgtgagataaagtctggttcctccccagctggctcaggaaatgttcgcggatacaacggcggccccctctgggcatacctgcctgtggagcggagagtggacggtgtgagggggaccgggagaggcaccaaatctggcctgggggcccgagaagcttcctctcaggtggggtggcgtgagagtcgaggcctggaggtcggggagggttagctacgtgaagaggggattctgccgcgcttcaggtgcctggaggggatgcccgagctcttccgcagggctagggtgaagccagccagggcctgggggaaaggtagcagaggtttgccatggcttggtatttgagggactttacacatcgtattaagggtttgagcttcaacttggggtcgtcgggagccattgaaggttttttgttgtttgttttttgagacggggttttgctcttgttgcccaggctggggtgcagtggcgcgatctcggctcactgcaacctctgtctcccgggttcgagcggttcttgtgcctcaccttcccaagtagctgggattacaggcgccagtcaccacgcccagctaatttttgtgtttttagtagagactaggtttcactctgttgcccaggctggtctccaactcctgacctcaggtgatccgcccgcctcggcctcccaaagtggtgggattacaggcgtgagccaccgctcacggctttttttttttttttttttaagtagagacgggcggtgggggcgggggggggagtctcactatgttgcccaggctggtctcgagccctggccgcaagagatcctcccgcctcggcctcccaaagcgctgagattacaggcgtgagccaccacgcccggcgtaagattttgtttttaaaggcctaattacagtgagaacagatgaggcaaggacacccattaggaggctattacataatctagatgaaaagtgagagcggcccgaattaggaggtggagcgaaaagaatggagaaatatggagcatagtcaagacgcagttgttaacgatttgccggtttctggccttaacatctgagagtagtgtgcctccagtcactgaaataatgaacacaggagaggtgtaaaggaatcagtttgcagggcagacaatatgttttttaaaagatacagtatcataaaatgcacactagaagtgtacattcagtggtttccagtacgttcacaggatttgcagccatcgtcgctaattccagaacgttttaaaaccccaaatcgaacctgccgtacccattcgtagtcactccgcaattcccccgaccccatcccctggcaatcacttatcggctttctgtctctgtggttttgcgtattcagtacattttatgtaaatgggatcatgtgatacttggctttttctgctgggcttttattaagcatgttttcaagatttcatccatgtagatgaatcagtactgcatgccttttcatggctgcataatcacgtgtttggatggaccatgttttgtttatccatgtatcaggtgatgggcatatggatgtttttactttttggctgttagaaataatgctgctatgaacattcgtgttcataacacaagtttttgtgttctaggagtggaattactgggtaagactacatttgattctgaatgttgagcttcaaaaccttccaagaggttttccttgatgaaggatttaggaggtgtttacttgctctctggcttggaaatctaag

SEQ ID NO: 1243366 - DNA, 4001 bp, Homo sapiens
tattcttctaaaaggttactaaattctcttatatacttatactgatcacaatactgaaaaataatagaaaatccattgtcatttatttaccacctaatttgttagatgccagaaaatcaaatttcacacatttcaataaaaaggcaaaactaagcatgtcaatcatagaaaaaaatacttaatcaactaattttatttaaagcactcacaaactcttaagtggtacaagacaagtcaacgctgtttatcgaacaatatttttttttttacgactaaacatctcaattctagactcaggcactaattattaaagtcatctagttatatacaccaattctcaacagacacagtatttggaaaggcatattaaatagactaagatgtgtaccacctattagccaaagataattttattgatttttctaacgagtcttcaaatgttacattctaacatcttagcaaattatttccaaatactgctggaattacatgtaactatcaggaaacaaaagggcttcccaacaacttgcgcgttctacattatttggccagtttctggacaattataacaattgtgctccaaagtaggagagttccatgaatcaattacccctaaaatatatttctgtatatttaaggagttctaagcattgggttaaattccaaacagactctgaatacaagcatttattaagagagattagaataaatcagtcctaaattaggcacagctgccctcccattgatcaaaaagacaggaaactacatttatttaaaaagttaatgttcctaatatattcaaatctcactaagccccaaaacggtctgagatcaaatcctccataaatgaggaaattctctagacttctaagtgggtgcccaaagagttcactcaagtgtccaggtatgaattacgattcaccagagtaaccggccttgcacttagggaaaacttccatcgcccaagaccagcgtgggtcgatcccatcaacagtcacacaatctcatctcatgctccactaatgaatgttctgcctagagtcagagcaatgccttagctggagttttgttttgtttttttcaatattaacacgtgggggtcacagaaaggaacagaggttagaagagctctcacgtggcggctgaaagagtggggaaccgagaaagtgaatgagtaacagggagggtcctggactctcagcatctcccaactcggggtcagggggaggctgtaactggaatgccccccacccccacccccgcctctttctcacctcctggtcccgaccccaggccagtgccaccgccgggagccccgggtctcggctccagccccgggctgaacaagcagggaggggaggcacttaggcctcgcctccccgcggccttcctcccccagccggggcggaggagacccaggaagccgcgcccggctccgaggggtggagggcctaggccgcgcctcccagccccgcggccctaggcctcggcccgcccgaggcggagcccgggaggtcggggcggggtcccgggccggtcacccacctgggttgccagtcattccagctccgcggatacttggtgccgccgccgccgccgccgctgctcagccgagaccccggggctctgcggctcattaccttccccgacacgacatggccaagcgccgccgcccaaagaagcgcgagtcgccgcccgaaccggccgccgccgacaccccgctccggcccggggctgaggaggaagccgagaaggaggaggaggaggaggaggaggagaaggaggaggcggcggagggcgggggaagaggacggccgttccgggttccgcctgagcccgcagcgcaggacgaggaggcgggagcggcgcggtgagagagaggcggatgaaggggaggcgacgtcttttccagggccgtgcgcggcccacgtcgccggggccccggaggacgaggacgacgaggagcaggcggtggcggcagctcctcacgctcacacggccactgcttccccgcctcccggctccgcccgccgcgccgccgctgtcgcacggcatgctgggagcgaggggcggggttggcgcccgccgggcctggggagagaggcgggtcctgtcggcggggcggagccgagagaggcggggtcgatagcaggccgccccgccccccacgtccccaggcccttgggcggcgaagaggtctgggcgtagcggtgacgaatcctaagacaggggatctccactactgcggccacacacttttctcccaaacgcttcccggaaagcaccggagggccgggcagtcaggtgtaaacaggcgtccaatcaaggacctgcggtgtgggtgggggctggtgccctgcggtgcgcgcgcacacaggcgtgcccttggattcacgtgcgccagttttcccactttctacggggtggggtggaaagtgaaaatagtaagatcgagaggtggatatccaccttcccaacctccacctgaaatgtgcccatcgagtcctggcaccttttaccatttcttcacaatgaaaaaaactaaacgatggaagggaagggagtacccacgatcaccaaaccctgtcctctgcaatgtgaaatgtgctttgaagtcctttcaccctgaggcttgcccgccttctgctggtgaaagaagctgggggctaggcgcggtggatcacgcctgtaatcccagcactttcggaggccgaggtgggcggatcgtctgaggtgaggagttcccgaccagcctagccaacatggagaaaccccgcctctactaaaaatacaaaaattagccgggcatggtggagggcgcctgtaatcccagctacttgggaggctgaggcaggggaatcgcttgaacccagcaggccgaggttgcagtgagccgagatcagaccattgcagtccagcctggacaacaagagtgaaactctgtctcaaaaaaataaaagagagagagaaaggagggagggaagaaaaaggaaggaaggaagggaggaaggaaggaaaggaaaggaaaggaaaggaaaaaagaaaagaaagagagaaggccgggcgtggtggatcacgtctgtaatcccagcactttgggaggccgaggcgggcggatcacgaggtcaggagatcgagaccatcctggctaacacggtgaaaccccgtctctactaaaaatacaaaaaattagccgggcgtggtggcgggtgcctgtagtcccagctactcctgaggctgaggcaggagaatggcgtgaacccgggaagcggagctcacagtgagcagagatggctccactgcactccagcgtgggcgacagagcaagactctgtctcaaaaagaaaaaaaaaacaaagcagcagctgggtagaggagacgtacccgaccgtctaccccatgacgtgtcccatgccccagggaaaaaagttccctaaagcatctgatgcataacgtgaatgcacacacgttttttaaaagttgggccaggatgctccttaaacgagtgtctaaaccgtatctgcataaggagtcataacctatcattttatgttgcaaagaaaacgtctttatatatcgcttgtgcaaataaatattgttaccaaaagtacttgaagattacgaggagttgaccccttcacacacatgcatatcccctccaccttgggctccttgcttatggccaccaatccctcactaagggaggatcctgccagttctaaatgatggggactacaaaaattacaaaaattagctggcgtggtagcgcgtgcctgtggtcccaggaactcaggagggtgaggcaggaggatgacttgagtccagcgggtggaggctgcagtgacctatgatcccgccactgcactccagcctgggctgcggagggtagggagggagggagggaggagaagaaaaagaaaaggaggggcaccatggatggctgactcctgtaatcccagcactttgggaggccgaggtgggtggatcatttgaggtcagga

SEQ ID NO: 1243367 - DNA, 4001 bp, Homo sapiens
gggctcaggaaagctggaaccacggccacctttcttctgtgaatacggttttacttagacacagccacgcccatctgtttacctattgtctgtggcgactttctcactgcaatgaaaagttgcatagtagttgcaacagagaacttaggaccagcaaagcctaaaatagggaccatctggccctttacagaaaacacttgccagcctgagtgtggtggcgctttgggaggctgaggcagctggaccccttgaccccaggagttcaagacaatcttgggcaacatagggagacctcatctctacaaaaagtaaaaaaattagcccagcatggtctacgtacctgaagtcccagctactagggaggctggggcaggaggatcacttgaacccaggaagtcgaggctgcagtgagctgtcattgtgcctctgcactccaacttgggtgacaaagtgagaccctgtcccaaaaaagaaaaaaaaaaaagaaagaaaagaaaggagaaaagaaagaaaaaagaaagagaaaacatttgccaatagcaaggacacaggaatgcctaagccttgtgaagtcaagtaccaggaaacaagaaagaattaactgtgtgagatggacttggtataagaaacagcttatcaggctgggcatggtggttcacgtctgtaatctcagcatttagggaggctgaggtgagaggatcactagaacccaggagtttgagaccagcatgggcaacatagtgagaccgtgtctcaaaaaaattttaaaaagggctgggcgcaggggctaacgcctgtaatcccagcactttgggaggccgaggagggcagatcacgagatcaggagatcgagaccatcctggctaacacagggaaaaccagtctctactaaaaataggaaaaaattagccgggcgtggtggcaggcgcctgtagtcccagctactcgggaggctgaggcaggagagcggcgtgaacccgggaggcagagcttacagtgagccgagatcatgccactaaactccagcctgggtgacagagcgagactccgtctcaaaaaaaaaaagaaaaaaaggaaaaaagaaaaaaaaaggccaggcatggtggctcactaatcccaacactttgggagaccagggttggtggatcacttgaggtcagaagcttgtgactagcctgaccaatgtggtgaaaccccttctctactaaaaatacaaaattagcgtggtggtgcacaccggtaatccagctacttgggaggctgaggcaagagaattgcttgaacccaggaggcggaggttgcagtgagccgagatcgcgccactgcattccagcaagggcaacagagcgaggctgtctcaaaaacaaacaacaaaaaaagaaacagcttatcagagagacagtaaggcaggggtgaggaccacagtctggaaagcacatggcctatttaaagagggcatctcaagtcagggtgataacctctaagatacaccggaaatctagatgtttctgtaaaccagaaaaaggcagtagagggtgagcacacagactcagagcggcagagactctgccacctcctcacctgaccctctcttatctatcagcttggggtagtaacagcacttacttcacagggcttgattattaaacaagttaacatctttgggctcctagaacgatgccatgtgcagagtcaggactgggtaaatatttgctaaagcaatctcttcatgtttttgacgctgcaacttaaaacacatggcgccaatcgtggacacggatatcccgctagccagctgtggggcctgggtttgctcaccccagcagagtggttgagggcgtcagcttggaggtgggagcccagctgacgagggggccttgggcccctggttctacttggggattattgtattattaggctggggtcattgtggggattagaagggtaacagctcctgctcctgctgcagagaagcctccaggtgggggtcacagcaagtgcagatggagctcagattcttcggttaactgtcaccctctcccctcccccatcacacacaccaggccctgccaggacaaggcagctcctggaagctccaccaggacccacgtccaccaggtgtcacagcaggctgcttctctctctctctgccccccgtgggctcttcgcaccgctccctcccagccatcttccctgcctgaccttggtctctctctctctgtctccgtcaccttcatgcctgtgccgtctttctcgctctctatcaactctgctgtgtgtccccctggggaaagtgggggcacctcctcctgagccccctgcccaagtttcctgctgggacgggagccacttcaccccatacacactccctgaagcccctccaggactccagcctggctgcaaacacccatcctggactttgcctggccctccaggctctgctgggggaagcgacctgagaggcccctgcctgggctgtaggtggggacagggcagacccttgggcagcggagcctctctggatgggtgttgaggcaccctgcagaaacagctccccacaggcacccttgccacacccctgggactacaggcacttagggtacaccagaggcatgaagtgtggagggggttggccaacggccaagctcaaataggggttcagataggagaggtcaatgtgggctcctctgagccccagtgacccccttctccccacccacctggtgacaggcatctcgaacccttggcccccatggaccccctgaggcgctccccctctccctgcctgtcctcgcagccctccagccccagcaccccaccctgcgagatgcttggtcctgtgggcattgaggctgtgctggaccagctgaagatcaaggctatgaagatggggtttgagttcaacatcatggtggtgggtgagtgagaggtagggcccacggcaggacagacccacagtgctacgcgtgcctgggcgtgtggcctcacctttggcagcctgtcgcccctccccatctcttaggtgggcctgataatagcacctcacagggatgttgtcattgaaaatttgagaaatgctgagtcattaaaagacaaaaatgtgcctggagcggtggctcacacctataatccagggttttgggagactgaggtgggtggatcacttgagctcaggagtttgagactagcaaaacctaatgtctacaaaaagtacaaaaatgaggccgggcatggtggctcaagcctgtaattccagcactttgaaaggccaaggcaggagggtcacttgaggtcaggagttcgaaaacagcctggccaacatggggaaactccgtctctactaaaaatacaaaaatttgccaggcgtggtggtgggcgcctgtacttaggagctacttaggaggctaaggcaggagaattgcttgaacctgggaggcagatgttgtagtgagccgagattgcgccactgtactccagcctgggtgacagagcaagactgaagcagaaggatccctggaggccaggagttcatgaccagcctaggcaacacagcaagaccccatctctacaaaaaaaatttaaaaattagccaggcatggtgacatgcacctgaatcccagctacttggggggctgaggtgggaggatcgtttgaacctgagggtggaggttgcagtgagctgcgatcacttgagtctgggtgacagattgagaccctgtcttaaaaattaaaaaacagtgcaaggccgggtgtggtggctcacgcctgtaatcccagcactttgggaggctgaggcaggcggatcatgaggtcaggaaatcaagaccatcctggctaacatggtgaaaccccgtctctactaaaaatacaaaaaaattagccaggcgtggtggcgggcgcctgtagtcccagctacttgggaggctgagacaggggaatggcgtgaatctgggaggcggagcttgcagtgaaccgagatcccaccatcgcgctccagcctg

SEQ ID NO: 1243368 - DNA, 4001 bp, Homo sapiens
ttccccagaaggaagaactggcagaaggtagtggacagcaaagggcagaagtcggcctggggctcaggaaagctggaaccacggccacctttcttctgtgaatacggttttacttagacacagccacgcccatctgtttacctattgtctgtggcgactttctcactgcaatgaaaagttgcatagtagttgcaacagagaacttaggaccagcaaagcctaaaatagggaccatctggccctttacagaaaacacttgccagcctgagtgtggtggcgctttgggaggctgaggcagctggaccccttgaccccaggagttcaagacaatcttgggcaacatagggagacctcatctctacaaaaagtaaaaaaattagcccagcatggtctacgtacctgaagtcccagctactagggaggctggggcaggaggatcacttgaacccaggaagtcgaggctgcagtgagctgtcattgtgcctctgcactccaacttgggtgacaaagtgagaccctgtcccaaaaaagaaaaaaaaaaaagaaagaaaagaaaggagaaaagaaagaaaaaagaaagagaaaacatttgccaatagcaaggacacaggaatgcctaagccttgtgaagtcaagtaccaggaaacaagaaagaattaactgtgtgagatggacttggtataagaaacagcttatcaggctgggcatggtggttcacgtctgtaatctcagcatttagggaggctgaggtgagaggatcactagaacccaggagtttgagaccagcatgggcaacatagtgagaccgtgtctcaaaaaaattttaaaaagggctgggcgcaggggctaacgcctgtaatcccagcactttgggaggccgaggagggcagatcacgagatcaggagatcgagaccatcctggctaacacagggaaaaccagtctctactaaaaataggaaaaaattagccgggcgtggtggcaggcgcctgtagtcccagctactcgggaggctgaggcaggagagcggcgtgaacccgggaggcagagcttacagtgagccgagatcatgccactaaactccagcctgggtgacagagcgagactccgtctcaaaaaaaaaaagaaaaaaaggaaaaaagaaaaaaaaaggccaggcatggtggctcactaatcccaacactttgggagaccagggttggtggatcacttgaggtcagaagcttgtgactagcctgaccaatgtggtgaaaccccttctctactaaaaatacaaaattagcgtggtggtgcacaccggtaatccagctacttgggaggctgaggcaagagaattgcttgaacccaggaggcggaggttgcagtgagccgagatcgcgccactgcattccagcaagggcaacagagcgaggctgtctcaaaaacaaacaacaaaaaaagaaacagcttatcagagagacagtaaggcaggggtgaggaccacagtctggaaagcacatggcctatttaaagagggcatctcaagtcagggtgataacctctaagatacaccggaaatctagatgtttctgtaaaccagaaaaaggcagtagagggtgagcacacagactcagagcggcagagactctgccacctcctcacctgaccctctcttatctatcagcttggggtagtaacagcacttacttcacagggcttgattattaaacaagttaacatctttgggctcctagaacgatgccatgtgcagagtcaggactgggtaaatatttgctaaagcaatctcttcatgtttttgacgctgcaacttaaaacacatggcgccaatcgtggacacggatatcccgctagccagctgtggggcctgggtttgctcaccccagcagagtggttgagggcgtcagcttggaggtgggagcccagctgacgagggggccttgggcccctggttctacttggggattattgtattattaggctggggtcattgtggggattagaagggtaacagctcctgctcctgctgcagagaagcctccaggtgggggtcacagcaagtgcagatggagctcagattcttcggttaactgtcaccctctcccctcccccatcacacacaccaggccctgccaggacaaggcagctcctggaagctccaccaggacccacgtccaccaggtgtcacagcaggctgcttctctctctctctgccccccgtgggctcttcgcaccgctccctcccagccatcttccctgcctgaccttggtctctctctctctgtctccgtcaccttcatgcctgtgccgtctttctcgctctctatcaactctgctgtgtgtccccctggggaaagtgggggcacctcctcctgagccccctgcccaagtttcctgctgggacgggagccacttcaccccatacacactccctgaagcccctccaggactccagcctggctgcaaacacccatcctggactttgcctggccctccaggctctgctgggggaagcgacctgagaggcccctgcctgggctgtaggtggggacagggcagacccttgggcagcggagcctctctggatgggtgttgaggcaccctgcagaaacagctccccacaggcacccttgccacacccctgggactacaggcacttagggtacaccagaggcatgaagtgtggagggggttggccaacggccaagctcaaataggggttcagataggagaggtcaatgtgggctcctctgagccccagtgacccccttctccccacccacctggtgacaggcatctcgaacccttggcccccatggaccccctgaggcgctccccctctccctgcctgtcctcgcagccctccagccccagcaccccaccctgcgagatgcttggtcctgtgggcattgaggctgtgctggaccagctgaagatcaaggctatgaagatggggtttgagttcaacatcatggtggtgggtgagtgagaggtagggcccacggcaggacagacccacagtgctacgcgtgcctgggcgtgtggcctcacctttggcagcctgtcgcccctccccatctcttaggtgggcctgataatagcacctcacagggatgttgtcattgaaaatttgagaaatgctgagtcattaaaagacaaaaatgtgcctggagcggtggctcacacctataatccagggttttgggagactgaggtgggtggatcacttgagctcaggagtttgagactagcaaaacctaatgtctacaaaaagtacaaaaatgaggccgggcatggtggctcaagcctgtaattccagcactttgaaaggccaaggcaggagggtcacttgaggtcaggagttcgaaaacagcctggccaacatggggaaactccgtctctactaaaaatacaaaaatttgccaggcgtggtggtgggcgcctgtacttaggagctacttaggaggctaaggcaggagaattgcttgaacctgggaggcagatgttgtagtgagccgagattgcgccactgtactccagcctgggtgacagagcaagactgaagcagaaggatccctggaggccaggagttcatgaccagcctaggcaacacagcaagaccccatctctacaaaaaaaatttaaaaattagccaggcatggtgacatgcacctgaatcccagctacttggggggctgaggtgggaggatcgtttgaacctgagggtggaggttgcagtgagctgcgatcacttgagtctgggtgacagattgagaccctgtcttaaaaattaaaaaacagtgcaaggccgggtgtggtggctcacgcctgtaatcccagcactttgggaggctgaggcaggcggatcatgaggtcaggaaatcaagaccatcctggctaacatggtgaaaccccgtctctactaaaaatacaaaaaaattagccaggcgtggtggcgggcgcctgtagtcccagctacttgggaggctgagacaggggaatggc

SEQ ID NO: 1243369 - DNA, 4001 bp, Homo sapiens
cgccaggctgctatttatctccctatcccaccccctaccccacctaacacatttgcactgccgggaatggacactggaagtgccaggaggaaggaaggctggtttggtggggtagtggggaggtcagggaggcggggccaagggtgtcccacattcccaacaccgccctctgatcaccatgggaatctttggactcaggacagggccaggcgcagggctctccctcctctccccttcgctgtcccctccccctggagggcatggtgtcggggggtggcactgagctatgagtcccggggatggtgaggaacgccacagacagagccaccctaggagtgagtatagtgctggtgactgtgtttcatagccccagtccagggctgtctaagaaataaagatcatcagactccacctggagcccctgtctgtctgtctgagtgggaacccaggcagggggtctctggtagtcagtggccatgagcttcaggagccagccgtctcccctattcccggagcctggcttccgcgttccctgtgccatgccagggcagggcacagaacctactgtcgagaggggaccctcgggctgccaagaagcccatggggtggcgacaagagctctacctgggactttgggccaccgagtctttttttttttttttgagacggagtctcgctctatcgcccaagctggagtgcagtggcgcgatctcggctcactgcaggctccgcctcccgggttcaagtgattctcctgcctcagcctcccgagtagctgggactacaggtgcccgccaccacgcccggctaattttttgtatttttagtagagacggggattcaccacgttaaccaggatgttctcgatctcctgacctcgtgatccgcccacctcggcctcccaaagtgctgggattataggtgtgagccaccgcgcccggcctgagaccagctcccctcccagctaggtgactgaggatgacctggcacagtcgtgctgactgaaggcttggagaggccaggtggccacctgagtggggcggcgagtcccgcgtcacccacccagacggggactggaagacactgcagactcaggctctgggcagacagaaggctttgttactgccaccgggcaggagacacagggtcagggttccagggccaagttatccactcccttgggtctttcctgcacgagaagcacagcgggaccaagcaggttcgctcgttgttccctagggggatgagcacccttcccgccactcccctcaccttccgcctccacccccagtacagttccgtgcaggtcccagaggccggcagggctcaccttccaggggctcaccttcctggggctttccctgcggggcccgggggagctgcagcagcagcagtgggcgacgaccagcagcagcaggagcagcacggtgcctggggacaggacaggcgtccaggtgtggccccaacctggagcccagggcagggggctgggaggacccagaggccacagccacacttacccatgaaggtgaggaaaacaatgaaggcaacagtgtcccatgtggactggaaaaactggtggctcttcagtctccccaggacttcctgaaccgtggcctccagctcctctgtggacacagccatcttggcgtgcaccgtgccacctgccccggtcccccagaggctgcatcaggatcctgggctcagctcagcggggaccacatccaggcttcccacagcccagccactgcccgctcctggcccagcgccagcttccccaccccctcccactccacttctccctcggccccaggcccagcttctctccttgcccagccctgtggtccttaccctgacaaccttctccccagccactgtcatctcccctctctctccccctggcagcccagcccccaggcccccacctacctcctagaagcctccaattcccccaaccaggcaggtcctggggagcacaggctgcttcctgcttccggctccacaccacctgaggccttggcaaccagccccgccctccccagggccagcagaggccgcccagcccaggggagagggcccaggcccagcaggtgcgctccctggctccccactgctggaggcccagggaggaagacgccggcctgtggcttcttcactcctgagacttcttacctttcctcagtatcccagatatgcagctgggaacacctgtgtgcttggccactgctgacttcgtgaatgaaagagagagagatgggagagaaggtgggtgggagggagggggaagggggagaaaacctacctgcatcccacgacccttgagcagctaggacaggtgtgcctgcatcatagagttgtccttggaatcctcaacgattggttccagcacctccgtgggtaccaaaatccacagatgctataaactccctgatataaaatgaggcagtatttgcatataacctgtgcatatactctatactttaaatcatctctggattacttataatacttaatatatttggcctggcctggtggctcacacctgtaatcccaccactttggaaggccaagttgggcagatcacttacttagatcaggagcttgagaccgtcctggccaacatggcgaaaccccacctctactaaaaatacaaaaattgggccgggcgcagtggctcacgcctgtaatcccagcactttgggaggcagaggcgggtcagctgaggccagaagtttgagaccagcctgactgaccaacgtggagaaaccatgtctctactaaaaatacaaaattagccaggcgtggtggcacattcctgtaatcccagctactagggaggctgaggcaggagaatcacttgaacccgggaggcagaggttgtggtgagccgagatcacgccattgcactccagcctgggcaacaagagcaaaactccatctcaaaaaaaaaaaaagataaaaatacaaaaattggtcgggtgtggtggctcatgcctgtaatcccagcactttgggaggccgaggcaggcggatcacaaggtcaggagatcaagaccatcctgggtaacacggtaaaaccccatctctactaaaaatacaaaaaattagccggccatggtggcacgcgcctatagtcccaactactcaggaggctgaggcaggagaattgcttgaaccctggaggcagagattgcagtgagccgagatctcgccactgcactccagcctgggtgacagagcaagactccatctcaaaaaataataataatacaaaaattaccccgctgtggtggcgggcacctgtaatcccagctacttgggaggctgaggcaggagaatcgcttgaacccaggaggcggagcctgtagtgagccaagatcatgtcaccgcacacccgcctgggtgacagagcaagactatctcaaaaaaaataaattggctgggtgcggtggcatactcctgtaatcccagctaatcgggaggccaaggcaggagaatcgcttgaacccaggaggcagaggctgcagtgagccaagatggcaccactgcactctagcgtgggtgacagagcaagactccatctcaagaaaaaattgtatacatatatttatttaatataatgtatgctaggtaaataattgttacattgtatagggaacagtaagcaaaaaagtctgtacatgtccaatagagatgtgatttgtttccaaatattttctgtctgtggttggctgaagccacagatgtggaacctgtggatacggaaggccagctgtactaggactcttcactgtccttattttctctattttactacttgaaaatatcagctaatgtggggctctgcatcgagcactgtgctgtgtcacctggtttattcctcatagcaatcctaaagtgggtattattgctttttccattttacagatgaggaaacggaggcctagagaagtttagccattagcccgtcacacacctaatgtatccatgtcccaatgctg

SEQ ID NO: 1243370 - DNA, 4001 bp, Homo sapiens
acacacacacacacagcccgaagcgcaagctctggccgtgccacacacatgaagactgaaacacacatgggtacattcatctagtcacacacattcacacccacactctgacccacaccatcatccatgcaaaccctcacacacttaaacacatcccctccccagaaccaaatttgacctaacatggctgatggggcgtgggagggtccagtcaggatgtccctctggaccctggcccactcacgccctgtgaactccaggccccttgctcaaggtggagcccccacctgtccctgtcctagtggtcacaggtcctgaacacccccactctcggcccccgaaggggccctggtcaccatcgcgtgcacagaatcctgggtgcctggctggccttagggtagggggtatgggaaaagggaaagatgtgggggcatagtgccctgccctggctcagccgcctcctccctcgggattttccatcccggctcgcgcgggcccgctagaagccggtgcgctttgtctcccgccccgctcctggcacgtttccgtggaagctgcccgcgccgcgcccgaagccccccctccgcggccgcgccccccgcccagcccgcggcgcaggcctgccagtgcggcgaccgccgctttgtcctctcgaggatgcctgggccgagcgcgaaagccccatgccttggaacagccaccgcgcgtcctggaagcaggtccccgagcctcggtttggggtgcgccctgcatcggagcggagcagcccccaaagattcgcgggcacgaggttgggggtagcgtctacctggagctcttgagtgcttgaggggagacccgccccgtcccgctctgtacatgcccatctgggattggcccccagctgcggtgccagaggctcggtccccggggcgtggtgggctagggcgggtcgtctcgacttagagccccaggcctggatccaggtagggagggcctgggagataaggcccaggtggggagaggtggggaggggtccctcctgtcctcgtacatccccctacactacctctcacacccaggccacccaaccctcggcgcgggcccgagcgcgggggattccgagtgtcagtgctttcctccacccgcgactccgagaaggatggggaggggtctcccagcgtttccctgccacattccaattccacccttcaccagtaacctaggagggtccaagtgggaggggtaagagtcctctgtctcttccacatcctcgatcctcctctttacaaaaccctagggccaagggaggaggggggaatagggaggggggcgagtgtggaggaaggggcctgggcaagggtcttccctgcatcccaagcagcccttcctgaatacccctgggagggtctgggctaggggagcggtccgcgatctcatccatcaccaccagactcctttgtaacctcgagcagccgaagtgttgcggggaggggtccccctgcctcgagtcccttcatcccacaacacctcatcctcccgtcctgagtaatccgagcagccccgtcgccaggcacagcgggagggagggtccaagcctcctcgctctcccaggagagatggggggtgggggtgacccccagccctcgcccctcatacccaagagccttctccatgataaaacgaaaactaacccaagctgctccgacctccggcgcccggccacgggaggcccctagtcagtcggcggctgtccgggacccgcggtcctgagagcaacgagaacacgtcccgtcaactccccagcccctcacgcctcggttcgcccgctccccaagaaaacaaaagcgaattcagcagcactgacctctgacggcgggcgggagggcggtcagcgcccggcagcgcaccccgctcctcccggctcctcacagcccgggctcccggccgcagatctggcggcggccgcagcggcggcggctctcgcggctctcgggtccggagcctccctcagactcagcacctggagcggcgaacagctccgcgcttcattcctctgaccccgcctccctcgcgccgccggagccaatggtgacccggaccccgcccaggagtctgcccattgggggcgtcctcccctctccctccggccccgcccgcaggttcctgggtctctccttcaagaccacatcccccagagaccggcggagtttcgcacagccttctgggacttatagttctttaaggacgcggagtgggctcacgccgcgggtaggcaaacagagcgggactgcatttcccagagtgcactgaagacacggaggcgcggagcagggcgggaggaccgtttccatagcaaagacgaccagccgaggatggctggcggaggcgtggggcaggccgcaggaccctcgaaggatcgtgtgagaccccgggcagcctcttgggaggccatttcgaggagaaaaccttgatttctgcctcaggaccctgggcctcagttttcctatctgagaagaagggcgaagagctgtgcccccgaccacacccgtcggtgatggggcaaaccgagggcaagcaggtttggttcctgcccagcaaaggtgagggaggacggaggagactctcccaccgcattcagaactttattcctttatttttgtctcaatcttgtcatagaggagcgcttcacttttggtcatcccttgggccaccagggccttcccgtctccgtcttcccatcgcaggtcctggcctccttcacaccactccaggataccgcagcatctcccccagcgcagcagacggagggcgcttcacatgcccccggacctaagcccactctccccttcaagatctggactccacttttttgcaacactcttaacttctttggaagctgggaagcctcctactcccttgggcctctccaccctgccctcagctaactcgtcggcaagccccagcctagacattgcctgttttgtgaagacatctagatgctgggctgtctgttgagtgccccaccctgtgtttgagcagcaccctctacttcccctgttctacttgcatgtttatgtgctcgtcttcctcattataagatccacaggggaggggccatgtctatattattcatacttacagtccagtgtctagtatctggcacgtagtaggcactcactagctattgagatataaatatagatatttgttgaattgaaaatgaattgggccgggcgtggtggctcacgcctgtaatcccagaactttgggaggccgaggcaggtggatcactaggtcaggagttcgagacaagtctgaccaaaatggtgaaacccagtctctactaaaaatacaaaaattagctgggcgtggtggcacgtgcctgtaatcccagctattcaggaggctgaggcgggagaatcgcttgaaccccgggaggtggaggttgcagtgagtcgagattgcaccactacactccagcctggacaacagagtgagaccctgtctcaaaaaaaaaaaaaaaaaaagagaaaaagaataaaattaaaaaaaagaaaataaaggaacctcattcacatacacctccaaaactctgatttcctaaagttgggcatttctcattgctggaggtgttcagttagaggcatgccgcccccttgaagaaatgtttatttcatttgtacagtgggttgggattttacctgaatgctttgagtacccttttaatcctatgatgctagagattgatagacccatgcctattattcctgtcagttctccctgaaatgtcatcagttcttcatgttccgctatttctagctgttggccctactcgtttctgtgcctaaatgccctacctcccactccttttctgagaaagatcttctgccctgtcagttatgaagtaaagatgtcctaagattcctgctctttcttttttctttctttctttctctctcttttttttttttttcgacggagtttcgctcttgttgcctggagtgcaatggctggagtgc

SEQ ID NO: 1243371 - DNA, 4001 bp, Homo sapiens
atcctggggagaagacactgttttgttttgttttgttttgagacagagtctcgctctgtcgcccaggttggagtgcaggggcgcgatcgtggctcactgcaacctccatctcccgggttcaagtgattctcctacctcagcctcctgagtatctgggattataggcacccgccagcacaccggggtaacttctgtatttttagtagggacggggtttcgccatgttggctggtttcgaactcctgacctcaagtgatctgccgtcctcgacctcccaaagtgctgagattacaggcatgagccgccacacccagctgaagagactgtttaagtaccttgctggcttcaggggttccctggggagccataggagccatttatttaaaaggagagattgaggggccccaaatcccagcacctcaggtctatcctggggtaacatcttggcagaaagttgccagggccccctggctgtcagaaagccaggcagctggggctacagtgaggaggggagcgggggcggggagcagagagcactgcggggcagcacggctactcacgacagttgcccactgggcccagcacagctacccagatttgcacactgggatggaccctaagcaacactttgaaacttgcaactattacccatgtaaattccgcacacatgtgtagtcacatgcgcatccacatacacataacagaagccagtgtccttcaccatgagccaggcactccggcagtttctgctctattttattttacaaaattgctgggggtgactgatgaaactgatttcaaaatgcacatttgaaaagcatggtcctagctggcaccccctggtggcagcccgggcctcgggtgtgggtccaggtgggatcccccccatccccaactctgggttctgagctgggataaaggcctcttggcggtgttgctgggggccacagccccaacagcgcccttcctgctctcccccaccggccacagagcgtgagtcccgaccaccgcgtccgccggcgcccctcagtgggcctttgtcccaagaagctgccaagccaggtggggactgctctcaccgcccgtgtggcaggctgtcctctgaaggacagagtcctcttctctcgtgtccctaagcctagcaggcagtgggaatgaacgggcagcccggttgctgggcacccatctccccagcctagccggtgtgtggaggattgcagccctttagcccagcctgcccaggcaagcctgccggggtgagcaggagggcttctggggtgaagggaggtgggggagggagggagaccacgggcggaggctcacctgaactgaatgcaggaggggcagtgcctttgcaccagaaagagcccatgtgtccttctcaccatcccctgtgcttacacccccagtcagcatgctccgggggtccctgagccgggccgccccagacggccctccttccctcccacccaccaccccgcgacccctcccaaacgtgtgcgccaggaagatgactccagggtgcctttagctggggctgtagtggttgggacgggcggctgtatatcaggggtgagttccagggagacttgggggcttagaaaacttagaaaacttctccaagttgggagagaatcccgcccgccctgccggaggcggggctcagtgccctgaagtggaggcgcccgtgggccacctccctccctgcagccgcagccgctgcgcagaggcgctggctccttctcctcccacctgggacaggtgtctccccagcccccgctcccaggggcctctctctctctcccgcccctcagggtcgagtcccggcaggggctcggggatcgggtagtcagtacctctctgcgtctccagccgccggtagttggggaccctgtggctggagtgcgttttcaccaggaaggagcgcggcatgttcccctcccgggcggcaggccggggtgggctggggcgggaggggcgcgcctgggtccggactgctgcgtccgccggcgcttgaaggggtcaggctcattagcatagcgcgccgcctccgccaaccagcgcccggcgcgagtggggcggggccacgggggcggaactgagggcgaggcggggtctcgggcaacacgcccaggacaggtgcgcgggcgggacggggcggggagcgcgtggccgccggtgtcctccccacgggaattctctggcgtgcgcgccgccgagtcacacaccgacccgtcgggcctggccacccactcgccgtgagtgaagggcagagttcaaagctgtgtggaaaccgagcgagaatctcttccacagaatgtggaagcgtcggccgagcgcggtccttggagaacccttgctgcggagaatgacgctcactctgcggcctggcctcgcctccccatcccttctgcaaactcacaggacaggattgatggggagagcccaggcgaaacgaagctgaccctagtgaccagccctactggcggctctggaacaggcccgggaccggtggcctggagacagtggtcctttctggatgggctgcagtctccgaaggcttcccccactggagtcagccctttaggagtttgtccagtgcctccagaaagctgttttttgggggacggaggacttggcctggaattctggaattcccagggggtcagacatggttatgggaagtttaataaaaccggtgaatcacgtgaattctgcaacagctgcacgtgtgacctgggcaatccgtttccctcctttgtggtcctgtagagccctcagggtcataaaaagctgggagccgctgtgtccagtgtctgggtctcttttgacatggacatttcataacgttgggggccaggtggggccgtctctgggctggcgtgcacacagggtgtccctggctgtgccgccggcctgcctccccagcagggcttccacctcagagctgggtggcctttgccccctgtgggccgggggtggagaaggtggggggtggtgagtccatggaagctctgagggacagacagcagggaggagggccgtgccacaccagcatcccacgtcccacatcacacgtccagggtgtgaaaagctgggctagtatcagccccactttgccaatgaaaaaaaactaggctgtgagtctgggctcagcagctcacgcctgtaatcccagcactgtgggaggctgagacaagaggactgcttgagcccaggagtttgagaccagcctgaaaaacaacatgagaccccgtctctacaaaaaaaaaaaaaaaaattattttaattagccaggcgtggcaacacccatcttcagtcccagctactcaggacgctgaggagggaggattgcttgttgcagtagcctccaggaggtggaggctgctgtgagctatgatgaccccactgcactccagtctggacaacagagcaagaccctgtctcaaaaaattaaaaaaaaacaaaaaagaagaccaaggctgtgagaggttaggacacagtgggattgggacccagccacactccagcttgtctgccacttggtgagggggagtggaaggacaggtggaggtgcccctggaagaaggtgcccgcctctcctgcaagcatggcctggcaccaccacgccgggagtgtagatttcagaggacacatgcctgccttctgcttattcacctgttcctcgcctggaaaggtttctatttatagcctcccttccttctctctctccctcgcagacacagataacgcttgcagatacctgagccaagcctccacccacaccgtccctccccgcccacctacccgttgtgtggccacccgccaagccccagcaagcttatctcctaatcccagctagagcctggtgttactcagggctgctgtagccctcccgaggagaatggctgatctcatcccgggaacgccctagagggcctgcgagcacctttggggtggggtcccagggctgccgcaacaacttgccccccagggacact

SEQ ID NO: 1243372 - DNA, 4001 bp, Homo sapiens
ccaggcccagtgccacaaacaccccttccccagggacacgctgcctcctcctaactcaaccgggcacatcatgagcattgccgggctcaccaccagcaaaacacccccgccttgcagccgccacctcctgaggctccttgacagacgccaggagggctgccctgcttacaggggaccagccatccctacggggctttcagtactgcctccccccataaagccacctgccaagggtgccaacaaactcttcagcgaaccccgggtcacaaaccagaaacgtttcctgccccaggttctgactgggaaaacagggttgtagggagaagagggcactgctggacacagccaggacgaggcgggacgtccgttctgccctgggcctccagcagccagtgggacacaaggacgcatcacacaaggccccagccctccagaagccaggaccaagaacggccggatgccagtgggactgacactgatggggctgtgcccagctctctggccagtgttatctcatcctccacccccacccatgacacccccatcctcagaagaggaaactcgctccagaatcccctaggttccccagtggcaaaagaggaagcgggagcccgcagagctctgaaccgggactgccccaaggtcagtcggggtcttcctcgggccaggccagaggctcatgcccccaccctgtgaatcacccgctggtcattttcacaggctgccccagggttggcctgtttggccaaacaactttgcttgtagatgccggagaaagttggtggcaattatatgtgccagacactgagataaacagctcacgcagatgtctcctttctgcctcaagacaacagggcagttgagctattactgttccctcttggcagatacagaaattggtggctcagagaagttaagtccattgcccaaggtcacacagctcaaaagtagacgcgcagggattcaaacccaggcaacctgcatccaaaatcccgcatttcgaccctgactctaaaatgccacattctccctacctcctctcccgcgtgcctgaggggccgcggacaggtgaaccccagtgtggccctcgctggggcgggctgggcgacctgggctgggtgctggggacttaggggtgacagcgccccggcggctcccgagtgctgagcgcgggcggcgtggcaggcgcggtgccaggcgcgctccgcgcaccctcccgttccaccctgcccggcggcgccggcgtctcccccactccacggaggagcaaagcgaggctccagggaggagggggctcggcccagggggcgacagctggagaggggacggcagctggggaggtagctcgaatcggcccgacggaggcggggtgtgggacggggaccaggggagctaggcatgcccacgccgcgcagccgctgcccacggaaccgggcgccgaacgctgcggcccggcctcagtttccctacccgcgagacgggcgccggacgtcacctggacccctatccccggagccctccccggagctcccagaattttgaagaaccccgaaatgccgggggaaggcgggagcgtagctgaggacgggcgggggctgcacgggcgggggcgagcgccccgcgatccccacaaagcggcctccgccccccgccgcctcctttgtccggatctcgccgcagcgccgctgacaaagaaccccagcccgcgggcgcggcccctggaacggaccctcccccgagccgcgcccgccgggccgcccctcccccgcccgcagaccccggcccggccccgccgccgcgcgcgcccctcctcgtcctggcctcccccttcccgcccccgggccccggcgcccccgcccggcccgagcgcgcggcctgccccgcccggctcaccatggcgcggcagcggcccggcccgatcgccccgcagcagccccgcgggcccggctccgcccgcccggtccggccgccgcgcactcgggacgcaggagccccgcgctgcggcgggcggggcccggctcctccccggctggggacggggcctcccagaaaggccaatgggagcccgcgctgggacggcggggcggggcgggccggggcggagtcacgtgtgctcggggccggcaggcggtggggcgggggctgcgcgcggcgggcgggctcggccctggcgagcgcggattgggcgcccgtgggtacggggccccactacaggcgcccttcctctgccagcctcatcctgaccccggcaggctgccttggtcccgcctgcttacagcggaggaaactgaggcacgctgcacggaagagtgctgcatactcctcgagagctgagagcggcggggaatccggggcaggggcaggggagaggcgcgaccgctgaggtgaatgaccttgcttcgggaggaagctgggcatcagtcgttcgcgaattcatttatgtatcattcatccgcccagtcagtcgatggcggaacactgaccacgtgcctgccacgccagtcgtcgtgggagcagccacgagccagacaaggtcccggccctgacgaagctctcattcctctgcgggatgaggctgtgaggcatttgcacccctctgccacctataatcatagttatttttagcataattacccggtggtttggcccccaccaaatgcctgccctgtataaacagcccaacacattttattaagatgactccggaagaaagaatcttcccattttacagatgaggaacctgaggctccaaagagctgaagtcccacagcctgctcctgatggagagagggttttgaggccaggcctgtctacctgggaagacagaggctccagttattggagtaatctccactcatccaccccaagaaggccatcggcgagaggacaccccagccctggggcccacagaaggggtgagggtgggtccctcaaggcttctgtggcccaggggacttgagaagacaggagggggcagggcgagctgggacctcctcctgggaacgggggccttatttgctggaaacttctttcccattctcaagcagaagcctctggaagagcatggcgggttgggctcacgaggctgaggtggccaggccctcactccctccactcagcctcgctgggctttcttccctgcgcccagtgcaccaagcctttcccaccgccaggcctttgcctatgtggctccctgcagctggaactcttctacttcatcttcccgatctcagcttaagtgccccttcctcaggagggccctccctgatcgcccagccaagagtagctcccttggggttttttgttttgtttttgagacggggtcttggtctgtcactcaggctggagtacagtggtgcaatcacagctcactacagcctccatccaactccttcctgggctcaagccatcgtcccactcagcctatatctatgaatgtgggcagatttgacgaagcaattttttttcttttttttagagagaaggtcttgctctgtcgcccaggctggagtacagtggtgcaatcataggtcactgtaacctgggctcaagcgatcctcctacctcagcctcccaggtagctgagactacaggtgcatgccaccatgcccggctaattttttaattttttgtagagatagggtctcttgttgttgcctgagctggtctcaaactcctgggtgatcctcctgccccggcctcccaaagtgctgggattataggcttgagccaccatgcccagcctacccattgtgaaattgtacatttttgacattgtgtgatgaacttttggtcttctctcccaggactaggtgtattgcactcactgctgtgtctacagaacagtgcctgccacacagtgggtgctgaatacatggatgttgaatgaatgaatgatcggactgcagaactccagggcgggttcagcggcagcctagtcaggaagccaggcacaggaggtgagctgggagttgcgcaggaagggaggacagaaaggcaga

SEQ ID NO: 1243373 - DNA, 4001 bp, Homo sapiens
ctggatggccttcttcaggtccaggactgtggcactctgcactacaaccacggctgcaaccacggacacagatgggagaagatccatggtgagaacccaaagccacagcctccgatggcaggaaaggaaccaacacctctgtgcacagggcaggtttgtggttgccccagtacccctgggcatggcctgtgagtttctgagcaggctgaccagcactgttaggtcttcctgctgtgaaagcctggaccacataacctgaagggaggagggtagcacttacgcattacttctccatccatcttgcacactcggaccgtcattgcctggccgtattctagggctatttgggagttgacttcttccagagtaacctacaaaagaccaagggcagaagtgggaaccctggctctctttaccaccttgagcaacaacaaagaacaagccgatagtggccaaaaagtggtgctccattttacgaagggcaaggaagggtggttgcctgtacgttatggtttcccaattcatcagagccccaatctcatgttccactcacattttaatgtccatagtggacagagtctctgggggaaagaggtgctaagaaacaggcaagagaataaactcacatgaggacctgcccccaggggtgggtagaggcctgtcagttcacgctgagtatatccctgatcatcaggacccaggccaggcttcgggactgagtaaggcaggtgtgcaaaatttaccggggcagcaaaacacggtaataacaataaatattttaatacaacatttaagaaatacaaggcaattaaaatatccatgatgagcaaaatataaaacatttaaaattggccgggcgcggtggctcacgcctgtaatcccagcactttgggaggccgaggcgggcggatcatgaggtcaggagatcaagaccatcctggcccaacatggtgaagccccgtctctactaaaaatacaaaaaattagccgggcgtggtggcgcgtgcctgtagtgaacccgggagggggaggttgcagtgagtcgagatggcaccactacactccagcctggcaacggaccaagactcagtctcaaataaataaataaataaataaaaagacagtatcgtcccaaagcatgatactgacgctttgacacatgattgacgcttgaggcaaatggaacaatcagtactactaatcttgctcttatttaaaactaaatttttcttttaccgtaggctctttttttgcctcaactttgacttttaaaggtattacaggccaggcgggtggctcacacctaaatcccagcattttgggaggccgaggcaggaggatcgcctgagcccaggagtttcagatcagcctgggcaacatagtgagactccctctgtacaaaatatttaaaaattagccgggtgtggtagcgcgcacctgtggtcccaattactcgggaggctgaggtgggaggacgccgctgcactccagcccgggcaacgcagcaagaccctgtcccccgagccccctaaatacaattacattaaaatgtcatttgatgtcactcactaatgaggtttttggttcctctttaagcttcgcgccccaggcgagtgcgcccggtcaaggttaaaaccctcgtttacgcccagaggcgccttcctcagccttgggccgcagtctcccaccagcaccttcggaggctgccggcgcccggatgcccggaccccggggaacgactcccgcgcccccagcccccgcccgcacacacctggatcggcagatcgcagagcagcgggtcctgcaccaccatagccagaccctcctggaacacgtccatggcctcggagtgcggcagcgcctcttcttcgtcctcatcttcctcttgcgcctcgggcccacccgcggcctccgtctcctccagggccgcccctctcagccgggctctgcccgcactgccagcccgcactagggaggccaagcgcgcacgcgcaggaactgcggcccgccccagcgaggccgcccagccactggcgcgccggggggggtggggcggctgcagtgaccaatgacaagtgcgagacagcctgcagcagggccgggagcgcagaatcgccctgtctattggttggttggtgtggcgggaaggctgccaggaccaatgtgagctcgaggcgggcggcgcatcggcgctgagcggcagtgggagctgccgggagttggagcctgcggagttcgagaccatgctgctgttctgccccggctgcgggaacgggctgatcgtggaggagggacaacgctgccaccgcttcgcctgcaacacgtgcccctacgtgcacaacatcacccgcaaggtgggacccgaaggccggcgctgggcgcgggcgactctcgcaggccttccgcgtcctccgactgctgctccatcgccgccagccccggcgtctgcctctgtccgctctttctcgcgcccctttctggtctgcagcagatctgtgggctctactttccaatacactcagaaagccccaccgtttcccaccgccttgggttcctgctcccacgctcgcgcccttctctgcgttcacagcggcggccacggtgatttccttaaagctgaggcacgcaggtccgtgctgtgcgcagaaaccttcggctcttctccagctcacgcagacgaaaagccggagttctcccagggcctaccaggttccgacactgactccctcccctgcgtgcgtctccgatttcaagtcctaatgcccttcctgttgccctttgccgcatcaacaccgcctcctggacgatctctcatcgtgctcatggtgctagcagggcctttgcacttgctgttgctcagttcactcttcccctagatcgccaccttactcattggtcttgtctttaccgtattttaaatttcagcccctccttccaatttattctccttccctttgtaattgtttccatagggcttattaccttctaatatattatgtaatgtattgtgtgctttctttatttttttttattgttttttttttttttttttttttttttttttgagacggagtcccgctctgtcgcccaggctggagtgcagtggcgcgatctcggctcactgcaagctctgcctcccgggttcacgccactctcctgcctcagcctcccaattagctgggactacaggcgtccgccaccacccctggctgatttttttgtatttttagtagagatggggtttcaccgtgtgttagccaggacggtctcctgacctcgtgatctgcccgcctcggcctcccaaagtgctgggattacaggcgtgagccaccgcgcccgacctttttttttttttttttttttttttttttttttttttttttgagacagagtctcgctctgtttcccaggctggagtgcaatggcgtaatctcggctcactgcaacctctgcctcccgggttcaagcaattcttctgcctcggcttcccgagtagctggaattacaggcgcctgccaccatccccggctaatttttgtatttttagtaaagacggggtttcaccgcgctggccaggctggtctcgaactcccaacctcaggtgatccgcttgccttggcctcccaaagtgctgggattataggcgtgagccaccacgcctggccagaatacctttactttttagcagttagaatatgttggtgctacgtcagtcttaatgtttgcatgctactccagtttgtactgtgttgtgggagtttggagtttgaaactacgggaagagtgaactctttgtttttttttttttttgagatggagtcttgctccgtagcccaggctggagtgcagtggtgtgatctcggctcactgcaagctccgcctcccaggttcacaccattctcctgcctcagcctcctgagtagctgggactacaggcgcccgccaacacgccgggctaattttttgtatttttagtagagacagggtttcaccgtgttagc

SEQ ID NO: 1243374 - DNA, 4001 bp, Homo sapiens
tacatgaaatcatttctggtaaatcagtatttttccaaatattcacaagctgatttataagaaagtgaaaatccattgtgccaagttggacttctggcctctcggtttgacgattggtccttcttcaccagcagcccccagcccttcccttctgtccttcctctgccaggaataccctcctgactcatccctgcctgcctatgtccatcacttcttggagacctggctcaagattcagcttcgggaaaaagtcctccctggctaattccatctccactaactattttctaactttgcattcctttggcatttaagtatagtttcacgacgtaatcaccaacttcattcctttcctccctataagttgttttgcatttttctatcatttctccaactagagaccaagtagggacagcatcttcttttatattcttttcaacacagctagccataatcaccagtgaaagaaagctgaccgctcaaaaatttctgaagaaagcagctgacttttcgtttataatttacaatactctatcacctccaacatgcatgagtccttagaggagaggaattttatttttgccttagttcaaattcatcatgaaagatccaacttacagatcacatacatataacttaacgtaaagaataatcctggttattgaaacctatcttgtgatttgccatttcaagtttcttacaaaaaccccaagagtcttgaagcagcgcgcctgtgagtggtaggaagctggcagcagacttgcaaaaggggcaaaactctagttggcagtaaatgttcaaacacgtgagcctccactgttaaacaaggttcgttaaccacacagacttgctgtttcagctttctggcttcaatgaaatgctatgatctcctttggttattgttgagagccaatgatgggttaaattcccataaattaaccagcgctttggtggtttgcccgagcataccgctggcatcggtgaagatggacttttttttttttttaatagacccgcccgccccgaggagccagaggtgagtgagttaagcgccaacccggcacttctcagcgggcaaacggagacagacccactcgagccgttcgctctccctcaagttcttagtgtcagcttatcgggccgaggtggggcttcataggcagctgctttttactcaatctcagccgagtcttccctaggggctgcaagccacacttcggcggctgcccaacttttcctgcaagaagcatccgtttttccacactgaaagctccagaaacccgggtttggagagagacggggagagaaccggctcgccccgccggcggggcaggaacaaagtgagctcccgcgagcccaggccgccgcggcctgcccaccctcccgcccggccccgctcaccctccagcagcacctccttgcccgcgcgcttcagcgcctgcacggcctggtcgtgggtggcctggcgcaggtcggtgccgttcaccgacaggatggcgtcgcccagccgcagcgcccggctctggtcggcagccagcccggggaagatcttggagatgaggatcggcatccggttctcgcggccgcccttgatgctgatgcccaggccgcccgcctcttgcttcaccacccgcacccggcgcacgggcggcgacgcgcccgcctcacccgcggggccccgaggcggcgccggcgggctcgggggccccaggccgcggcttgggctcccgggcagcgagtcgcccgcgccgccgccgtttgggaggccgttgaaggcggcggccgcgggtcccagagcgggctccagctcggccgcggcggcgtcgcccgtcaggctcaggctctccccgctcagctcggccaccactcggacccagcgctccctcaggagcagctccaccagccccgctttggtggcccgcgtccacaccgccatggccggccccgctccagccgccgcagtcgccgcagctaccctcattccagtcaggcagcctcggcgcttccctcttcccgcccggaggggcgggcccggcccctcccccgcacgattcattattcatgaggccacgcctgcctctggaggggcggggccggcgcagccgcttccgggaggtgcagaagttgtccgatcactcgcctctcgccggacgtgggcaacccgaatgcggtgggactgcatttctcctcatccttccattggctccccacggaccccccagaaactcctgacctctaccgtgcaattcacgggagctgcccgggcacggaaagcaaaatcagcttggagaaacacttctcaagcctgcaagacccggtggcacgttcattcttgcattgattggttcgtaccctgtgtactgagcgcttagccctgtactccggctccttttgaggccctgtacttaagctcaatagtaccaacaacagctgagagtttgcggtctagtggggaaggaaaatgcagaaccaaccaactaggtgtgatactatgtggttaagtgacatgcagaagacgtccccagaacagcataaaaggaacatttggttaggcctggggtcagcttcacagaggtaacaacggacggtgaacagctcaagcaaaggtccaacagcatgatccaagcctttgtcaatgttttgtaatctcgtttacttgcctgtaattcaagagggaaccatgtcttcttaaaccctgaagccacaattggcaggcctcaaggatatttgcagaatgatggtgtcttagggttcttcagagaaaccaaccaataggatatatagagatatataaatttattattattacaagggactggccacgagattatggatgctgagaagtcccacgatctgccatctgcaaactgcaggcccaggaaagttggtggtgcacttccaatccaagcccaaaggcctgagacccagaatcagtggtataaacctgagattgaaagtctgggccgggcgcggtggctcaagcctttaatcccagcactttgagaggctgaggtgggcggatcacctgaggtcacgagtttgagacaagcctgaccaacatggagaaaccccatctctactaaaaatacaaaaaattagccgggcgtggtggcacatgcctgtaatcccagctacttgggaggctgaggcaggagaattgcttgaacctgggaggcagagattgcggtgagctgagatggcaccattgcactccagcctgggcaacaagagcaaaactctgcctcaaaaaaaaaaaaaaaaaaagaaagaaagaaagaaagaaaaagaaagtctgggccgggtgcagtggcttacacctgtaatcccagcactttgggaggccaaggcggtggatcacctggggtcaagagttatagaccagtctggccaacatggtgaaaccccgtctctactaaaaatacaaaaaattagccaggtgtggtggcaggcgcctgcaatcccagctactcaggaggctgaggcaggagaatcgcttgaatccgggaggcagaggttgcagtgagccaagattgcaccactgcactccagcctgggcaacaagagcaaaactccatctccaaaaaaaaaaaaaaagtctgagccacacgcggtgactcacgcttgtaatcccagcactttgggagaccgaggcaggcagatcacttgaggtcaggagttcgagtccagcctggccaatgtggtgaaacccccgtctctactaagaatacaaacattagccaggcatggtggtgggcccttataattccagctactcgggaggctgaggcagaattgcttgaacccaggaggtggaggttgcagtgagctgagatcgcaccagtgtactccagcccgggtgacaaagcaagaccctgtctcaaaacagaaagtctgagaagggggtgagggtgggagttggggtggggggacaatgatgtaagtcaccatcccactgccaaggcccgagagccaggttcaccaaagtctgagggcaggagaag

SEQ ID NO: 1243375 - DNA, 4001 bp, Homo sapiens
ggtcagctggggcctggagcctgcacttcagggggaagtgcttgctgtgtcgggtgaaaggaaccctggggccttctccgtttggctctgcacagccatccagtgggcggccctcagggaccctcgatccaacctcaccttttacagatgggcaaacagaggcacggagcaggggcctggctggcccagggctgcacgttcttgagcatgccgtcacgggcacctctcgcttgtctcttgtgcctgtcagggagtcaggagacatcgccttccatcctgaccaaccgtgtgtccttaagcaagtgctttaatatctctaggcttcagtttccctacctgataaatgtggctacaagccccgtcctgttgataagatgatggatgactaggggtgggttccctacattctgactggtgcctaagtgagacagtggatggtttacgtgattcttggtggctgggattcttgggggcccagggcactcctatgctcagcacttctgtaaaatgggtgatggcgagtggccttggcctcaggggccccagcctttgcagatctgctttcatgaccaggcagctggctccaggtcagaagcagggcactattggcccagagaccctgtaagaccctagaaatgatgcctcggcttgacactccagtaaagactgagaaagctgattataaaaccaggccttagaataaaatcaaattcagcagccacagtcagctcccttatggttgtctcttacaggtttcattgggagtcacccatttaaagaggagggggaaggaaagagttgtgcactggtgtatccatggggccttgggtagcttcccatccctctccaggcctcagtttcctcatctgtgaaatgggaaagcaatcctgtcactctaaaagctctctggggatagccacatagacggttccatggccctttccttccctctcctcaccctctgtagcaaagatttcttgactttataacaaaatactaaaagtgttgttgctgttggcctgggggcctgtagttggcccaggggacagagcagcttcccagcctcctctgccttccagccgtgtgtgcacagacagtcattctcctcctcctgtccccaggtgtcctaaccaccccctctccaagagctgactgccaagtccagtccttcttctgctgggcacacagaggccacactatctttctgagggcctgcggaggacttttcatgggggatgagcctctagggggtgaaataaagcacatggcccacgctgggagacagagatcccaggatgttggatgtgtggctgcctctcttggggaaagggtgggtaccctccaacaactggacgctcacctgagaagccttgccaaagccaggggctcccaacccagtgtgtgtaagaatcccctggtggggtgggggtgggatcccaggggcttgtccaagagcaggtttcctggctgctaacataggaaggtgccattgaacaggcctggattctgcattttccatgagtcctctaaggctgtgctgaggcaggggttccctgacactgttcttttgagaaacacaggtgtggtgacttattctccaggcccaagatgggttgtacaagcgcctagcatttcaaaaggaatggaggtgatggaaggtccaggagctgtcccttcctctgcctcagtgtgctaaggagagctccagacacagtggctgtcactaactcttccccctcccaccctgcccccagcaggtgccaggcagggccccaggagaaggggactcaggccacagcaggcagaggacagctgagcttgggatcaaatactgacctccagtctccagggctgtgtgtgtccaggggtccgggaggagtgtcatatggccccttcgagctcttggttctcagctccggcgacaagccgaggggctgccactttctaagttccccgtttgaaaacaggaaacaggctgtgtgacctgcttctgatcgccccagcccattggctggtgaaacatggtatattgaactcaactgccagcctgccagctgtacccacctcttcttccgggtagcgcagggaagggcaaggcggtgtggggccagccctgtgggatttagctcagcctcactttccctgccgccttgcagaggtctggctgtccttcgagtccccgttgatctctggaattcaggcattagctcccagagccctttaacattcattattctactctatgagctaggcatgatgggggccgtcatgccccttgaacagatgggaaaaccgaggcttggatcacagagctggtgggacacagagccagtgactgacatagaagagcagtggggtagaattacagttccatctggtgccttttctctgagcaaagctgtatccatcaccaccaacagaaagtcccagggaagcgaaaccccagggcagtgtggtgtgattcatgcccacccatctttgtggccttgaaggcaagaaacagaaatcagacaaaaaaaaaaaaaatagaactttgctggctcgcccagaagtttgccatgtgtttttttttgagccatgattcccttcctccctattagaggcagtcacagtcctgattcagatgggggttacttcttggcttttccttagaaatttaccacctatgagatccccaaacaattcagtttcattttactcatctgtgaatcttatataaattgaaccatgcatactgtgtgtattctccagtgccttgcttctttcatgcaacatttatgggtataagattcactgatgcatttctgtgtagatactttttttcatttccattgttgtgttgctacattattattattatttattttactttaagttctgggataccagtgtagaacctgcaggtttgttacataggtatatatgtgccgtggtggtttgctgtacctatcaacccatcatctaggttttaagccctgcatgcattaggtatttgtcttaatgctctccttccccctggcccccacccctgacaggccccagcgtgtgatgttcccctccctgtgtccatgtgttctcactgttcaactcccacttatgagtgagaacatgctgtgtttggttttctgttgcttcattatttaaatacatcaccatttgtcattttttgttttgtcttttgatgcacacttgggttgttcctagggtggccatcatgatcaatgccactgatgatattcttacacatttatccaagtccatgtacttatctgaggtgaaattgctgggtctcagagtatagatagcttcaactgtgctagattacgccaaatattttccacagtggctgtgccattttgtattcccaccagcagtatatgagaattccaggtgctccaccttcttacctgcacttgatatggtcattattataattattttaaagatggggtcttgctctatcacccaggctggagtgcaatggtaccatcatagctgactgcaacctagaactcctgggctcaaatgatcctcccacctcagcctcctgagtggctaagactacagttacgtcaccatgcttggctaataaattttttttgtttctggagggatagaccatcatggccactatgttgcccaggctggtcttgaactcctggccccaagcaatcctcctgccttgggctcccaaagtactgagattaccaatgtgagccactgtgtctggtttggtcagtgtttttcagtgtaccactgcattaatgtgcagtggtctctcatcaaggttttaagttgcatttccctaaggactaatgatgttgagcatcttttcatgggcttatttgccatccttataccttctccaatgaagtgtctgttcaaggtcattgctcattattgacttgattatttttaatggtttgtaggtgttctttatgtattcatttgggtttatgtgcttctcaatatccttttccatcctgcagtttgcattttgt

SEQ ID NO: 1243376 - DNA, 4001 bp, Homo sapiens
ttatcaatttcattgtctcttgtgctaaaggtaaaacgaaaagggtccagaactgtgagcttgtggcaaagactccttggtcatagtaaaaggaaaagattttcagacagtgcctagtcccagccctcctctcataactaggcaaaaacaaccccactcctaccccacatgagctcttgcagaaacaacagcaggcagctctgagattctgacaatgcacctcgtgatattcacagtaccagtcactttaactgatgaatgttatttagtcattacaagcctaggagataggtactactaggtatcctcattttgctgggactcccagaatggtcgagaacttactcttaaataacacaggtttatgtggcagggccaagatttgaacccaggatgtctggcctcagggcctgcacttacaccaacctacctcagctcctgggggaagccagctcataacatctttactgaggtattactaacattcacgaatcagaaaccatacttaggcttaaaatcatttgatttgcaaccaaaggtggattatctcccaggaaactccccctcaccagccccctcattattaggactgtccatttcacaaatcttgcccttgaataacaaaaacaaaaggcacatcacttgtttaaacaaccaaccaacaaaaaaggtccacagagataactttaaaagttaaaattgaagacagcagtatcccttggccttgccccccgctcaacctccagaaatgcctgagtggaagacaacggccaggacggctggatgcagggatcctcagaaacaattccacagtgaggggaaaacaggcactaggaggataggcggggcttcctaaataaatccagatcccagagtggctggacagtcaggggagagctgagaggcttccctgagtcactcccatctccacatacaacacccaggaatgacttagcaccaaaacaccaataagactcctcagaggaaaggagggtagagtcaagggactaaacttcagaaaacattgaggacgagctgcccacacccacctccctctcacttccagcatccccatcaacaccaccccctcgatggtgagaggaagaagtttggactgggaagaagaaggacgaagtgacggtccccagatgggctgggcacgggacaagaagggaagggctgcaggacaaggcaagagagatcttaaatgataatgatgagccaggataagacatggacaaggatggaatatgcaaggatcatcgaaatgtaaaagccaggaccggagagggaagccgagtgggtaactgggaagaactggtgatgggaagagcaaagcactgggaacaggggtgggagggatgagagggatggggaagacaaacgggttgcagaattgagctcctctggggaccagaagctcctgggacacgggggtactggggtcagcaaactaactgtccagaaagactatgcctgtgtggaaactgcagggactggagaccaggggcctgggtagcggggatgactggggatgggggacctggaactggagctgggacgcagcgggtctaggagttaggagagactgagacctgggaggtctcagaactgggggtctggacactaggcaaggggatcgcaggactggaacaactggggacaggggtttaggagctggtttttatggatggacaggagtcaggagaccaggagtgccccgccacgggagatcagagacccgcaggtgagcaggggccacgagccgggagtcctgggggccaggggtctggaaaagggagcgactgggagggggtctgcgagggagcggggcgcgaggacgcaggggccggagtgtgcagctggagcggcgggagccggggcggccggggcaggtgacagcggcggggccgccactcaccgctcatggtgcctctccccgggccggtgcctgcgccgcgccgccgccgctgccgcttctgcggctgccgagctccagacaggccgggagacaggagccccgccccggccgccccgccccggaagtagagcctggccgccgacgaggccccgcccgccgacccggaacgtaaaccgcggcgcagatccaagtcgccggacccggtgtggagagcggtgctgaggctacgcgggctggagactcagggtaaacccgagaccccgcgaggaggcgtcgctgtccccaagtgcccaagacgcctcccctgccttcctgaggttcccacgagtgatggggcgacttcgtcccagagagggatgcgagcgggaaaggaaataaaaatagaggaacgggacaaagcgtgggcacaggcggatgggcaatcccggagggcctctctaaggaggcgacttctgagcccagacctggatgatgagaggaacccagtccgggaagatccccagggaaagtgttccataaggaggggcaattgcaaggcccctgcctggaggggttgacaggagcgaggggatgagtgagaaaataggcctggtgcggtggctcacgcctgtaatcccaacactttgggaggccgaggcgagcggatcacctgaggtcaggagttcgagagggtgagtgagaaaaggagattgaggaggtggagggagggccttgcaggccagaggaaggagtttgggcttttctgcctaattctaggaaggtcccagcacttgggagggcggaggcaggcggatcgcttgaggccagcagttcaagagcagcctgggcaacgtagcgagacgccgttctctaccaaagaaaaaaaggactcaagcagaggagtgatacgatctgaattaggttttaagatatggctcctaggccggacgcggtgactcatgcctgtaatcccaaggcatgattgggaggccaaggtgggtgaatcacctgaggtcagaagttcgattccagcctggccaacatagtgaaaccccatctctactaaaaatacaaaaattagccaggcatggtggcgtgcgcctgtagtcccagctactggggaggctgaaacaggagaattgcttgaacccgggaggcagaggtttcagtgagccgagatcccaccactgcactccagcctgggtgacagagtgagactccctctcaacaacaacaacaacaaaaatggctcttcctgggatgagaatgaattataatgggggcagggtggagaaagagcaggtggttaaggagttattgcagttgtccaggcaagacatggtgcctgtctacagtggtggcagtggagatagaaaaggtgatggattggccgggcgcggtggctcacgcctgtaatcccagcactttgggaggccgaggcgggcggatcacgaggtcaggagatcgagaccatcccggctaaaacggtgaaaccccgtctctactaaaaatacaaaaaattagccgggcgtagtggcgggcgcctgtagtcccagctacttgggaggctgaggcaggagaatggcgtgaacccgggaggcggagcttgcagtgagccgagatcccgccactgcactccagcctgggcgacagagcgagactccgtctcaaaaaaaaaaaaaaaaaaaaaaaaggtgatggattgagtgtgaacacaagtgtgacacattcacaacgttcttttgttttgttttgtttttgagacggcatctcgctctgtcgcccaggctggagtgcagtggcgcgatcttggctcactgcaacctccacctcccgggttcaagtgattctcctgcctcagcctgccaagtagctgggactacaggctcctgccaccatacccggctaattttttgtatttttttagtagagacggggtttcaacgtgttagccaggatggtctccatctcctgacctcgtgattcacccacctcggcctcccaaaatgctgggattacaggcgtgagccaccgcgccctgcacattgttatgaagtccagggtttcgtcccattttacacatcggggaaaagggactgaa

SEQ ID NO: 1243377 - DNA, 4001 bp, Homo sapiens
caaagtgctcaaacgcgagctgctgtcttaccggacacacgccaaaactagaccaaccgtttctctccctggagagttgtgggtggaaccgtgagggatgcccagccacagggcaggccccgtacaccacctgcagcccagcaggtcagccttaggaccctctcccctggacctgttcagaaccaagttaaacttttggccaaagcacactcgctagaaaacttatttttttttaaaaaaaaaactttcataataaagtttattacctaaactgactttaaaaaatataaaataggattctgcacagcagaaaaataaagccagagaccctcccccaacccctggtttgtgcaaagatactgggtatatgtaaacatgaagaggtaggaggtgcgagttcaggtcctggctccagatacagttaagctgctacaacaaccagggggacccagagggagcaccaggagggggaggaccccctcaagaggtgagaaggggtctgcggcctcgtctccagccgagggcgggaggcgcctcgcccctacacccatccgctccctccaacccaggccggggagggtacccacatggttccaggcaagtaataacaaaataacacggcatcccagttaatgctgcgtgcacggcgggcgctgccggtcaaatctggaaggggaaggagctcaggtagtcgcggaggacggggttgagggggatgcgagccaggttctcgcggcccacggtggccacgatgcgctggcggcacagctcctgcagcggccgcacgcggcgctggcgcagcggggcccccagcatgcggcgcggcgccgccacgtagtgctccagcagctcgaagaggcagtcgaagctctcgcggctgccatccaggtgaaagcggccggcctgaaagtgcacgcggatgctcgtgggtcccgaggccatcttcacgctaagggcgaaaaagcagttccgctggcggctgtcgcgcaccaggaaggtgcccacgggctcggcgcgcagccgctcgtgcgccccgtgcacgctcaggggcccccagtagaatccgcaggcgtccaggagcgcgctggcgcgcgtgatgcgccggtaatcggcgtgcgaacggaatgtgcggaagtgcgtgtcgccgggggccggggccgggaccgcggggcacggccgcgggcgcgcgggggccgcgggcgaggaggaggaagaggaggaaggttctggccgccgtcggggctctgctgctgtggagactgcattgtcggctgccacctggttgtgtgctaccatcctacagaaggggccagccggaggggtgggccatagcgtccgggggtgcgctgcgggagagacaaagaggtgagctggggcgctgcggggccgggcaggtgtgcgccggccggacaactccggagggcggcgctcccggcggacccggccctagggggcgagcacggagcaccaagtccgcgcggatccgttcagcctcagtggacacagctagaaaatgggctctgtactccgcggagctcttcccggcgggtgggggctcggtggaggcggagtccggcctccgggcagcaccgagaggggggcgtggagagcagccggttctggctccagccgtccggccccggctcgccgccccgcgcccgccgcctgctggccaggctgggatccgcgcctggtctgggcgatttgggctagggccggagaaaggctgtgctgcgggagccccgcgcgcggggggcggcctgggtggggccggcgagggtcaggggcatcgcggccgcgaccccattctgcagcccccgaggctcgcccgactcctggctgccctggactcccctccctcctccctcccgcctcctcgcccagggcccggctcacctggcggcggggcgcgggacgccgcgggcgggacggcggggggctccggggcgctccggggcggctctcgcgcatgctccggggccaggagccgtgcagctgccacggccgcagctcgctctgttcggcgcccgcccctgcgccagtcttttaaaccggctcggaggcggggctggcgacggcgggaggccccgccccctgccggccccgcccccagctccacttttggtttctctttccgcggtggcgtccggcgaggaccgcttcggccctgtttccctctcttctggaccctcccgcggggccctctgcccgcctgttcgcacctgccccagcacccgcctctcgaggggctctggccccgaccctgcgccttccggccacttctcggacccctccttcggacttggcgaccccgattttgccccgctacctcgggttccactttctgccgccaggccctcttgggacgcgccctgacacaccctcctccgccccagctgtctccacacccgccgggggcagagccctgtcctctcctcccctgcagccagatccccctaggaggccacagaaggtgtccccaaccctgagcctgaccccacccgtagaccccctcctagcccctgctccacccgccgtcgacgccctcagtcgcccgccctgctgtcccgaagccccggccggccgcggtctctggtcttggctcgggcttcccgggaagcggcggcctgaccacaggcttcagaggaacccctggcggcgcgggcgcctccaccccggcccagttcctcggaaactgggcggggccgggcaaggtccctggtggcctcgactgccctccctgcgctcccactacccggctgcggaagaaactgaggctggggaggggctgggatttgcaatggcttgcagattgggagctctggacctggatctcgccttccccgtcttcattttggggagaggtgcagctggacgacatcaaattggagcccagtgaaaaaatggtgcattctcagacgtgatgaatccccaaacctggtttcctagccctcctctcccccgaccccttcctcatagatttccccctcctactgctccgtcaggcatctgcccttcaaagactgccttcccaccacacacacggccggggcttgggatggtgggcggtcggtggtcggggctgtaatttgcacacgtgtttgtgatttagtgattccgattgtcgtgcgaggccatggagtaggtgcctggctgctccgtgtatttttgaatgaaggcatgtgaggagccccagcatcacaaggggccacataaaaacctggctaggctgggcacttggttactggcctcacactgggacacactgccctctacagacagctctcagacggcttctctcctggaagccctggtgcccagtcccttcccgcctccctggccccacgatacctctttccccaggcagagcctaggtccttattaacctcctgaacacagggagtggcccagaatcagcccagcttagcaccccatcagtgccctgaatctgcatgtggccagggctggtggtggtcattggtgtagcctcctaggttgtgcgtgtgtgtgcgtgcgcgtgcgtgagggggtgagagaagatgcagaaccttgcctgcaccagaggtcaggtgtgtgatcattcgagagatgtccactgaacatctgctggaggccacactctgtggagggtgatggaatacaaggagacccagttccaaatctgcacctttctattcttgtgaccttgagcatgtaattaacctctctgccatggtttctttatctgtgaaatggggataataatagtacctctagcagggcgcagtagctcatgcctataatcccagcacttggaaggccaagacaggaggattgcttgagcccaggagtttgagaacagcctgggcaacaaagtgagaccccctctctacaaaaaaaaaaaaaaaaaaaaaaaaatagtacaaaaatcagccagtcgtagtggattgcacctgcagtcccagctacttgggaggctgaagcaggaggattgcctgagcccaggaggtcaaggctgcagt

SEQ ID NO: 1243378 - DNA, 4001 bp, Homo sapiens
tcggggtggtccttcttgtgctgcacgcgaaggcgctctgcctcctccacgaagggccgcttctcgctctcgctcagcaagctgcagcacagggcagaggcagggatggccagggcgcccactgtgccctcggcgcaggcacacaccacagggggaaccggcagcagaggccggggccaggaggctctgaccagggaaacccgcctgccgtgcgctccggagcctcccgtggcaccaggcagtacactcctctgggagaaccggccggcgcctgtttgggaaggttggtatgcttacgacagccaaagaagaacaagccccacgcctcccatcttcctccttctatttccccctattccgggcctgctgttccctccctctggggctttctaagggaggcgggggaggcgggcaggacccagccggcggtggacaaaagcgaggcttcccgggaacggtgccggccttcggcgggcagctgggctgctgtccctccattcccagacacccagaagccctggcagggcccaggcgcccgtcctcactgagccacaggacacactccttgggactcttcccgaggctcacctccaaccgcctgtgcggcaggacttgggggagcaggggcctgccgtccacagcgccccgtggctgcgccctagatccagacagaaggcaggaggtgcaaatacgcaagctccaagctcccttcttccaggtgaggagcaggatacgggaaccagagccccaaaccaagagaaccatttgaaacccaaccagaggacactcggtgggggcggcctgtcctgagcaacaagttcttcactctgcagtcctaatttctggaaaactgaccggccccaccacgccaaggcgtgcacacggcgcaccccgtcatctccactcctgccctccctgcttcggaccgagggtgtccaggagagggagaaactgcggggagggtactcgcaggcaaacctgctgcccacccatccgcctgccgcactccctccccatgggtggtccaggagctagaggagctgagccctttctaaggagggagcacctccagagagccgcatgcaacttgctgtcgtgccgggcgtgcctcccggggctggggccactcgcaacggctggagggcacgtcggggtgccagccatggccctccgcagggtgttccccgccaggagaactggctccagagcgcacccgccacgagggtgcacaccccaggcgctgccctccgcggatcccgactcccatagctggcgccggaccccggctggccagaggatgtttttccactgggacccgccctgacacccgcccggggtgcagagcccggagcctgcgtgtggccaccacctccgcgagctctgcgccctccaggcccccgctcgcagtccgagaccaggggcggccaaggtcccgaaccccgcccccggggcgccggcactcaccgccacagcttgcccagcgtcttgctgagctcggcgttgtgcaggtgcgggtactggtcggccagcttgcggcgcgccgcctgcgcccacaccatgaatgcgttcatgggccgcttcacatgcggcttggctttgagcgcgccgccgccgccgccgcgcaccggcatgggcaccagactccagtcgtagcccttgagcacctgcgacacggcgtcgcggatgcaggccgggaagcgctcgtccgccgcctccgccgggtcgccccgggcgccccccaccgcgacccccgcgcggcccaggccctcggagccggcgggagacggcggcgcgtccgagtccgagtcctccacgtgcgacatggagctggcggtgccggacgggctgcagggcggctgggagcgggcctcgctcatgtccagcatcggggccgcgcgcggaggggcgcgcacaggagacgcgcaccggggccggcgcccggggctgccctgcggtcgctccgggacccgaggtcgccgcgcggtggccccgaccctcgcccctgccgccgccgccgccgccgccgaggctcgggtcccgctgcgggacccgcaacaagtttctttaagcggcggccccgcggccccgccccgcgcccggctacccattggcggagcgcgccccgatcccccggaggcggagcccggccgcccccgcccccccacccataaagaaagctccgcggctctcgccgcgcccccgcctgccccgcccggcgccgcaccacgtgggccaggcgccccacgcctggagctcccctctctggagccccgggaaaggaagcggggcagggaggccgggtgggagcaggggggtctccggcgcttcctctcctctgcgggcgccgcgcggctcctgagagtccgccccccgtcctgacgctcagctaggaagcgggtcctcgggcccctcccccgacacacacacacacacacacacacacacacacacacacacacactctctctctctctctctctctctctctctctctctctctctctcacacacacacacacacacacagcccgtctcgcgcctgaggtctcgcccgcaggccggtggcgcggggtcagctgctgcctgcggtccaggacagggtcggttccgccgcgcagcgcccaggcccagctcgtccagagtctgcggacagcgcacgtccaggtaacgcgcttcaaggggccgcggctcggagctgggggaccccgggccgccctgcccatacgagtgcgagcgtggagagcgcgggcgggggcgcggtcccgggggccggccagctggagggggcgggagcgctgggcggggcctgcgctgaccccggcgctgagtccctggggccgccgggcggatggcgtggccggacgcgggggccccgggccttccgggcgtgacctagggctcgggggcggggaggcccctccggcggggcggccctgggtggtccggcagaggcggaggccgctccgagcctgtgagccctgggcgcctgcggaggcggggagagggcggggtgtgccgccctggtggggaccgcggggtcggagaggggacattgccccccccgaggcgaacgtccaaccgcgggtccgggtccccgcccaaggccgccccgcgaggtggcctcggcccggccgtccccgagggtggctcggatcctttcaaccagcgcgctggaggcgaaggggctgcgccattccgggtcaggcagccaacgcgggacacgcgcgtctccgagcttgcggcccgcgaaacccgggtgacctaccgcgccggtgccctcaaagcccccacgcccgggccggtggccgctgcagccactgagccacgcggtctccccggcccggtcggcagaaggagctggtccgttactagaaaagtccagatgcaaagtcgggggtcgtgctgccgcttcctgccagcgcaccgcacccacctggggccgccaccgaccgcacaggacgcgcctcctaccccctgttctggcccggccgagagctggtgcccccagcggccgcccgcccccgtccgcagaccccggggcccttgctgctttgcattgggaacaaccggagccaggcccggagctgagggggccagggcctttggaggaagcattggcctccaggctgaagagcaagggccgtgtcacctgcccggagggcggtctcatctctgcagccaggtcagaggaagcagcggtggggagacggagtgcgcgagttgggaggctccacgcatcgtaggtggagagctggctgccagcctggcctgccctctcttccccgtcccaccatctcgcttggctccggcacctgcctgggaagacccacacctccgtctgcagtgcctcttccccctggaggccctgccctccgctcggggtccccgcatccttccgtggccctcagagcatcgcctggggcgcccgcggaactcatctgttaggcctgggatgcaggcaggcagaagtgggggtttaagtggaagcagtgagggtgggg

SEQ ID NO: 1243379 - DNA, 4001 bp, Homo sapiens
ctcatttttgtattttttaatagagacggggtttcaccatgttggttaggctggtgtcaatctcctgacctcgtgatctgcccacctcggcctcccaaagagctgggattacaggcgtgagccaccgcgcccggcctggctgagtgctttctagcctacacttaggtgaagaactaaaggagctcaggacaatcactgcgagcgtctcctgactctcaaattccctaactccgggactcctagcatctaatgcctggacacggcccacgtgtggagcgcccagtgcctgcagcactgagctcggggctttgattcattcctctggccccatgaactggactgttcccgtgtcgctgtctcaggaggaaaggggctgacagagattagctaatttggccaagtcctcgcggccaggaagcagcagaactaagtccaaaccagggctgtccggcactgaagccggttattcccccgccccgccccctgggaggcctcaagggcgggcctgtccgtcctctctcatgaatgaaagtcctggcgcctccgaccagcaggtgtccccggggagccgcggagagactgccgctgccatggcaaccggcggaggcgtagctcgcccacgtgcccagtgacgtcatcggcttcctactcttccgaattagctcagagctcccggcggccctgccccctcctgccgccaggagctcacctggagaggccaggccagccctgggcacagcctcccgccccaggccgtggagttcactaggtctgagcccagccctgagacttcacagggatgcacccatctgcagtcctcccagcctcggcggcctcctctgcaaatgggattggcccataacctggaggaattaggatgaccatgggaactcaagtcccttctgtgcccccgtcctaagatttccatggcaactggggccgcgaggcctcttagggaagacactgacgcaagctctcagggcaggaccccgtaggcagcacccaagcctgccctcgcccaccccatgttctcagccctaggagtgggtgcccccacacgcccacgacccctcagcgctcggagccttgaggagcccaccaggcactgaggacacttgaagcccctctctctcgaaaggcgtggtcccccatggtcggcggccccgcgacccgcaggccaggacgaggggcgcgctcctcctggcctggcgcctaccttgatggtggtgaactccttcctccagggcagcaggtacaggtgcaccgcggcgagctccagaagctcgaaggcgcgagccaggccgcgtagcgcgggcgccaggtcggcgcggccccacagcccgtcggtgagcagagccagcgcgtcgtcctgcagcgccccgtgcaggtcgaagtcctccaccaggatctgccagagcaccgcgcgcagcgaggggtccccgcacacgcccgcgcggccccgtcgcagctcgcgctccaggcactggcggtagtcctcggacagcgagctgctgcccatcctgcggcggacgggggtcgggggggtcagggacctaaggccgcgcccagcccgccgcgctctccccgaaccctcacccagcgtccccaggacccctcgagcctggagaccccgcccccagcggctgggcgcccccggtatcttcggcaccccctacgctggagacctcggccccatcagctgcccgcccacccagcgatccaggcccctccagttgagcgcccccgcacctccagcccctccctccagcctgggtacctcggccttccaggggcgcccccggttatcgaccgcacccttctctagagacgcgcttccgcccgctgagccctctcccgaccagagccccttcgcccggcagatggagctgcggatcccgcgggtgacggcgctacctgtctgtccccagcggtctccggccgccgcggatcagttcgggcctccccgcgcgccgcgcgcttccgccgggagtcggctccgcccggggtccgcggccgtgacgctgggggcggggcggggcttggcgcaggccccgcctccgaataatttaggaggggcggggcctggtgaaaggggaggaggaggtgtcagcccggccgagcccctgcgcgaggcaccccgagagcctcctgtcaccgcgtcgcccgtctcctcgcgggaccggtatcgttcacgacgccgctgggccgagggctgcgggctcatggcaggcgctcagggaacgttgtgcctgggccgctcctccccacgagacagggacccagccccaggcgacccggccgcggggaagcaggtgcgcgggctcgtcccctggggggtggggccaccggcattacctggcggggattggctggatcctgggaagagcctttcctgcggggcggggccacctgcattacctggcggggattggccggatccgggggcgggcctcccctgtggggcggggccatccccttgagggaggggcccgcggcacggaaggtgggcggaaggacaagcctttcagcctcgtctgaaacagcagcctcaggtggatgcggggacctcagattctgtttatgctggctccgcttcccggcctcctgcacttgccatctgcagcccttgagagcatcgtctgggcgggtctctgaggcagggcgaagccgcccccctctctaggctaaaagctgacctgggctgcggatccacccaggctaaatctgggccacgacttcccggggacgttttcttcgctcgggttcctctgttctgtgctacagccactttctcgcattgcccagaagtagaggaggatgagggagacccttggaggtcccagccgaaacccacccctaccccacacccccgctttgggcaggctttgctacttcacgtctgtgtccctcatctctccaggccaccaaaaccaaggcccaagtttgttgaaactttccctgggcctgggcggcgaggtcccccctttttcttagattttttacctggaagttccctgctggcatcttagaaatagtgatcatgaccgggtgcggtggctcacgcctgtaatcccagcactttgagaggccgaggcgggcggatcacctgaagtcaggagttcaagaccagcctggccaacatggtgaaaccccgtctctattaaaaatacgaaagttagccgggcgtggtggcacatgtctgtaagcccagctacttgggaggctgaggcaggagaattacttgaacctgggaggcagaggttgcggttgcagtgagctaagatcgtgccactgcactccagcctgggtgacagagcgagaatgtctggaaaaaaaaatcgtgatgcagtcggtggatctccctgagttatctaggtggccacctctggacagggagctcttttacttactgtttactgaactcactcttggtgcccagtgccaccatgggtccacaccagtcctcaggacagctaacttcgtaagtctcatctttattcttcttctgatgcggaggagggtggaggtaactgttctgcctttgtcctcactgaatttggcaacaccagtccatccatccagcagtgggcctagctctcctcccataggcctgggtgggtttttgcacctgcctcaacccatggaatagaactgatgtggaatgaattccaaggctaaatcataaacatgccataccctggccttgtcttgagatccttggcctctgacatggtttggttctgtatccacacccaaaatctcatcttgaattgtaatcccacaggtctggagcaggaccaggtggagataattaaatcttgggggcagcttcctccatgctgttctcgtgatagtgaattccacgagatccgatggttttataaggggttctcccctttgttcagtgctcattctcgctcctgtcgccctgtgaggagacgccttctgccatgattgtgagtttgctgaggccttccccagccatgcggaactgtgagtca

SEQ ID NO: 1243380 - DNA, 4001 bp, Homo sapiens
agcgtgtcagtgtgaagcagtccaggcccagctcctctgcctagcaggccagtcatccccctgacattctttcttgtctgacccgagtggttctctccttattatttttttttttttctgagacagagtctcactctgtagcccaggctggagtgcagtggtgcgatctcgctcaccactacttctgcctcccgggtcccggttcaaggttcgagcaattctcctgcctcagcctcctgagtagctgggattacaggcacatgccaccacgcccagctaatttttgtatttttagtagagacagggtttcaccacgttggccaggctggtcttgaactcctgaccttaagtgatccacacgcctcggcctcccaaagtgctgggattacaggcgtgagccactgcgcccagccgagtggttcattcttgtgatgaaacttaaaacacctcctcctggcacaggcccccaatctcctcggacggcaggctctgcgggttctccctgcctgacccttctgcaattcctactgcaaggccttgctggctcccactgggccacagcaatgggtctctgaccgggccacctcccctgcgaactggcttcccctgttggtaggcacagacctcatcatgccgcccttgttttttatttttaaatatttattttttgtagagacagggtctcactatgttgcccaagctggtcttgaactcctgggctcaaaagatcctcctgcctcggccaaataactgggaggacaggtgtgaactaccgccccaggcagcacctccgttgtttaaaatatttaacgcttccagctccacgtggtaaaactgatggaaaactttgtattctagcttcttcctacttttggggcctcatcttccccacacacacccaaaggtctggccacactaggctgttataaaagacacctttgtcgcacccaggttctactcctcggtcaccctccgcaatgtacttatccccacagccctcggagagctacagtccagcctgggacggcctcccaatgctctgttccagtgtgcggaggctcagggattctcagtggcaccaagatacccagccctcgaggagaacctcaggtgagacacacgcacactgccccagcccctcgaccacctggtacgcacttatcactcgggaactgacctacattttcattaaacttatgttttcaactaagatttctggatatttacctcctacataaagttcccaaaacaaaccagtttcatctttacggcgcgtgcctgctactagtgtccatccggtagggtcttacagtaggctcctcaccccagccccagatcctccaagccactgacctcgcttcgctccctcccgccgtctcctaccttccagcgaagctgccggcggcgggtgcttggctgtcccggcccccgggtggaggctgtccacaggcttctccgactccctgtctgcctgcctggcttcctgggaatgcttctccatcaacttctccttagattttggaactgaataggtggatcccttcttttgctcctcacctgaaatatatggatcatccgttagacccgggacttaccgaatgcagggcagtgggtcccatcgtcttcagtcgcctgcgtgggtccagaataagctggcttcaagtctcgagtctccgcgtttccgtaaccgcctcaggcgggaaacgcgccgtccgtggcggactcggcggcaggaacggttcgcaccgggccgagcctggcgcctgcgctcacaccgccccgcccagcccagccccgccctgggcccgcgcccaggggcggagacgcggggagcccagcgcctgcgcctcctttacctttcctgggtttctctttgcttttggaaaggcccatgggtgagcccaccgccccctccgacgcaagcccgggtccccacacctccgcggccgcggagccgggagcgactcacaaaaggtcctcgcgccagcggcgtgcgtcaccatggcgaccgcgcgccgcgcagccgcgccccgcccctctggcgggaccggccaccatcctctcgcgagagcatcccgtgcgaccggaagtggggcggcgaccccggaagtccccgccgggtgcagcttggtcggttcgatcgccgccgggacctgacaccgcccggagttggcgtcccttctccctctccgagtgctgctcctgtcattgtggccatggacggtaagaggtcgcggccgtcctccggggactcgcgcgcggggcggggccgcttctcccactggcgtgggctccgcccacctggggccgcgggcaggactcaggagagctcgggcctcgaccgtcgatcccccgggaccccatccccagggcctcgaccaccgacctgggaccccttttcccggtcgtcgtcccccgatccccgacccggaccccatccccagggcctcgaccaccgacctgggaccccttttcccgagcctcgtcccccgatacccgacccggaaccccttccccagggcctagaccaccaacccgggaccccttttcccgggcctcgaccctcgatccccgacccggaaccccttccccagggcctctaccaccgacccgggaccccttctcccgggcctcgacccccgaccaccgaccgggacccttcccaggcccccgacccccaacccgagatcctttaccccgggcctcgaccctcgacccgggacccctccccccaggcctcgatccccgacccccgattcgggaccccttccccggggcctccatccccaaatctcaacccggtatgccttccccggggcctcgacctctgacccccaaccatggacccgggacctagactcccgacccaggaccccttgcccagggcctggacccccgaccaccgacccaggaccctttcccccgcccctggcactcctcagcgtcaggcgccctttcccgccagctcggtaggggggactgtgcgatgcctgttcggcctttcgggacttggaatgtcgggtcagagggcaccagaaaaagtgacagttgcaccccctgccccaaacagcatcactgcaaatcagaaggactcagacagaaagcgctccctgagtgccaggccctggtcacagcagctctttgcgtccattctccatgtggggaagcagaggtttgagcaggagccagcacaagcgtttctgtgctcaatgggtcgccctaattcttaccttctacatctggggctagccggctgtgtgctcagggataccaaagaacaggaagaatctggcaaaatgaagtcctatgtttgctgaaacatcgttgggctggtgtgatgggcaggcttttaaaaatactttttgaagggctgggcgcggtggctcacgcctgtaatcccagcactttgggaggccgaggccggcggatcgcaaggtcaggagatcgagaccatcctggctaacacagtgaaaccccatctctactagaaatacaaaaatattagccaggcgtggtggcgggtgcctgtagtcccagctactcgggaggctgaggcaggagaatggcgtgaacccgggaggcggagcttgcagtgagccgagatcgcgccacttcactccagcctgggcgacagagcgagactccgtctcaaaaaaaattcttttagttagaagtgtgaaaagctatagtaccaccgtgtcatcatcatgaaggaaatgtgtagagattttctgccctgagagaagatgaaagataacatctacctcccgccacaaaaaatatgctggccaggccgggtgtggtggctcaggcctgtaaccccagcactctgggaggccgggcgcggtggctcacggctgtaattccagcactttgggaggccggatgtggtggctcacgcctgtaaccccaacactttgggaggccgaggttggttgatcacctgaggtcaggagtttgagaccagcctggccaacatggtgaaaccccgtctcttctaa

SEQ ID NO: 1243381 - DNA, 4001 bp, Homo sapiens
tgcgtttagtgagcttttctgtaactttcagctaaaagcaccgtgacagacaggtagcattttccaaactgccacccaagggtgatgctattcctgcagggttccatcctccggtggggggttgcgccctcctgtgaggggttccaccctccagtgggaggttccaaagttgggaattcaaatccaagtctttcttccaagtccaaggcccagagcctcctactttcagcccttgatcctacaagcgtgtcagtgtgaagcagtccaggcccagctcctctgcctagcaggccagtcatccccctgacattctttcttgtctgacccgagtggttctctccttattatttttttttttttctgagacagagtctcactctgtagcccaggctggagtgcagtggtgcgatctcgctcaccactacttctgcctcccgggtcccggttcaaggttcgagcaattctcctgcctcagcctcctgagtagctgggattacaggcacatgccaccacgcccagctaatttttgtatttttagtagagacagggtttcaccacgttggccaggctggtcttgaactcctgaccttaagtgatccacacgcctcggcctcccaaagtgctgggattacaggcgtgagccactgcgcccagccgagtggttcattcttgtgatgaaacttaaaacacctcctcctggcacaggcccccaatctcctcggacggcaggctctgcgggttctccctgcctgacccttctgcaattcctactgcaaggccttgctggctcccactgggccacagcaatgggtctctgaccgggccacctcccctgcgaactggcttcccctgttggtaggcacagacctcatcatgccgcccttgttttttatttttaaatatttattttttgtagagacagggtctcactatgttgcccaagctggtcttgaactcctgggctcaaaagatcctcctgcctcggccaaataactgggaggacaggtgtgaactaccgccccaggcagcacctccgttgtttaaaatatttaacgcttccagctccacgtggtaaaactgatggaaaactttgtattctagcttcttcctacttttggggcctcatcttccccacacacacccaaaggtctggccacactaggctgttataaaagacacctttgtcgcacccaggttctactcctcggtcaccctccgcaatgtacttatccccacagccctcggagagctacagtccagcctgggacggcctcccaatgctctgttccagtgtgcggaggctcagggattctcagtggcaccaagatacccagccctcgaggagaacctcaggtgagacacacgcacactgccccagcccctcgaccacctggtacgcacttatcactcgggaactgacctacattttcattaaacttatgttttcaactaagatttctggatatttacctcctacataaagttcccaaaacaaaccagtttcatctttacggcgcgtgcctgctactagtgtccatccggtagggtcttacagtaggctcctcaccccagccccagatcctccaagccactgacctcgcttcgctccctcccgccgtctcctaccttccagcgaagctgccggcggcgggtgcttggctgtcccggcccccgggtggaggctgtccacaggcttctccgactccctgtctgcctgcctggcttcctgggaatgcttctccatcaacttctccttagattttggaactgaataggtggatcccttcttttgctcctcacctgaaatatatggatcatccgttagacccgggacttaccgaatgcagggcagtgggtcccatcgtcttcagtcgcctgcgtgggtccagaataagctggcttcaagtctcgagtctccgcgtttccgtaaccgcctcaggcgggaaacgcgccgtccgtggcggactcggcggcaggaacggttcgcaccgggccgagcctggcgcctgcgctcacaccgccccgcccagcccagccccgccctgggcccgcgcccaggggcggagacgcggggagcccagcgcctgcgcctcctttacctttcctgggtttctctttgcttttggaaaggcccatgggtgagcccaccgccccctccgacgcaagcccgggtccccacacctccgcggccgcggagccgggagcgactcacaaaaggtcctcgcgccagcggcgtgcgtcaccatggcgaccgcgcgccgcgcagccgcgccccgcccctctggcgggaccggccaccatcctctcgcgagagcatcccgtgcgaccggaagtggggcggcgaccccggaagtccccgccgggtgcagcttggtcggttcgatcgccgccgggacctgacaccgcccggagttggcgtcccttctccctctccgagtgctgctcctgtcattgtggccatggacggtaagaggtcgcggccgtcctccggggactcgcgcgcggggcggggccgcttctcccactggcgtgggctccgcccacctggggccgcgggcaggactcaggagagctcgggcctcgaccgtcgatcccccgggaccccatccccagggcctcgaccaccgacctgggaccccttttcccggtcgtcgtcccccgatccccgacccggaccccatccccagggcctcgaccaccgacctgggaccccttttcccgagcctcgtcccccgatacccgacccggaaccccttccccagggcctagaccaccaacccgggaccccttttcccgggcctcgaccctcgatccccgacccggaaccccttccccagggcctctaccaccgacccgggaccccttctcccgggcctcgacccccgaccaccgaccgggacccttcccaggcccccgacccccaacccgagatcctttaccccgggcctcgaccctcgacccgggacccctccccccaggcctcgatccccgacccccgattcgggaccccttccccggggcctccatccccaaatctcaacccggtatgccttccccggggcctcgacctctgacccccaaccatggacccgggacctagactcccgacccaggaccccttgcccagggcctggacccccgaccaccgacccaggaccctttcccccgcccctggcactcctcagcgtcaggcgccctttcccgccagctcggtaggggggactgtgcgatgcctgttcggcctttcgggacttggaatgtcgggtcagagggcaccagaaaaagtgacagttgcaccccctgccccaaacagcatcactgcaaatcagaaggactcagacagaaagcgctccctgagtgccaggccctggtcacagcagctctttgcgtccattctccatgtggggaagcagaggtttgagcaggagccagcacaagcgtttctgtgctcaatgggtcgccctaattcttaccttctacatctggggctagccggctgtgtgctcagggataccaaagaacaggaagaatctggcaaaatgaagtcctatgtttgctgaaacatcgttgggctggtgtgatgggcaggcttttaaaaatactttttgaagggctgggcgcggtggctcacgcctgtaatcccagcactttgggaggccgaggccggcggatcgcaaggtcaggagatcgagaccatcctggctaacacagtgaaaccccatctctactagaaatacaaaaatattagccaggcgtggtggcgggtgcctgtagtcccagctactcgggaggctgaggcaggagaatggcgtgaacccgggaggcggagcttgcagtgagccgagatcgcgccacttcactccagcctgggcgacagagcgagactccgtctcaaaaaaaattcttttagttagaagtgtgaaaagctatagtaccaccgtgtcatcatcatgaaggaaatgtgtagagattttctgccctgagagaagatgaaagataac

SEQ ID NO: 1243382 - DNA, 4001 bp, Homo sapiens
ctgacattctttcttgtctgacccgagtggttctctccttattatttttttttttttctgagacagagtctcactctgtagcccaggctggagtgcagtggtgcgatctcgctcaccactacttctgcctcccgggtcccggttcaaggttcgagcaattctcctgcctcagcctcctgagtagctgggattacaggcacatgccaccacgcccagctaatttttgtatttttagtagagacagggtttcaccacgttggccaggctggtcttgaactcctgaccttaagtgatccacacgcctcggcctcccaaagtgctgggattacaggcgtgagccactgcgcccagccgagtggttcattcttgtgatgaaacttaaaacacctcctcctggcacaggcccccaatctcctcggacggcaggctctgcgggttctccctgcctgacccttctgcaattcctactgcaaggccttgctggctcccactgggccacagcaatgggtctctgaccgggccacctcccctgcgaactggcttcccctgttggtaggcacagacctcatcatgccgcccttgttttttatttttaaatatttattttttgtagagacagggtctcactatgttgcccaagctggtcttgaactcctgggctcaaaagatcctcctgcctcggccaaataactgggaggacaggtgtgaactaccgccccaggcagcacctccgttgtttaaaatatttaacgcttccagctccacgtggtaaaactgatggaaaactttgtattctagcttcttcctacttttggggcctcatcttccccacacacacccaaaggtctggccacactaggctgttataaaagacacctttgtcgcacccaggttctactcctcggtcaccctccgcaatgtacttatccccacagccctcggagagctacagtccagcctgggacggcctcccaatgctctgttccagtgtgcggaggctcagggattctcagtggcaccaagatacccagccctcgaggagaacctcaggtgagacacacgcacactgccccagcccctcgaccacctggtacgcacttatcactcgggaactgacctacattttcattaaacttatgttttcaactaagatttctggatatttacctcctacataaagttcccaaaacaaaccagtttcatctttacggcgcgtgcctgctactagtgtccatccggtagggtcttacagtaggctcctcaccccagccccagatcctccaagccactgacctcgcttcgctccctcccgccgtctcctaccttccagcgaagctgccggcggcgggtgcttggctgtcccggcccccgggtggaggctgtccacaggcttctccgactccctgtctgcctgcctggcttcctgggaatgcttctccatcaacttctccttagattttggaactgaataggtggatcccttcttttgctcctcacctgaaatatatggatcatccgttagacccgggacttaccgaatgcagggcagtgggtcccatcgtcttcagtcgcctgcgtgggtccagaataagctggcttcaagtctcgagtctccgcgtttccgtaaccgcctcaggcgggaaacgcgccgtccgtggcggactcggcggcaggaacggttcgcaccgggccgagcctggcgcctgcgctcacaccgccccgcccagcccagccccgccctgggcccgcgcccaggggcggagacgcggggagcccagcgcctgcgcctcctttacctttcctgggtttctctttgcttttggaaaggcccatgggtgagcccaccgccccctccgacgcaagcccgggtccccacacctccgcggccgcggagccgggagcgactcacaaaaggtcctcgcgccagcggcgtgcgtcaccatggcgaccgcgcgccgcgcagccgcgccccgcccctctggcgggaccggccaccatcctctcgcgagagcatcccgtgcgaccggaagtggggcggcgaccccggaagtccccgccgggtgcagcttggtcggttcgatcgccgccgggacctgacaccgcccggagttggcgtcccttctccctctccgagtgctgctcctgtcattgtggccatggacggtaagaggtcgcggccgtcctccggggactcgcgcgcggggcggggccgcttctcccactggcgtgggctccgcccacctggggccgcgggcaggactcaggagagctcgggcctcgaccgtcgatcccccgggaccccatccccagggcctcgaccaccgacctgggaccccttttcccggtcgtcgtcccccgatccccgacccggaccccatccccagggcctcgaccaccgacctgggaccccttttcccgagcctcgtcccccgatacccgacccggaaccccttccccagggcctagaccaccaacccgggaccccttttcccgggcctcgaccctcgatccccgacccggaaccccttccccagggcctctaccaccgacccgggaccccttctcccgggcctcgacccccgaccaccgaccgggacccttcccaggcccccgacccccaacccgagatcctttaccccgggcctcgaccctcgacccgggacccctccccccaggcctcgatccccgacccccgattcgggaccccttccccggggcctccatccccaaatctcaacccggtatgccttccccggggcctcgacctctgacccccaaccatggacccgggacctagactcccgacccaggaccccttgcccagggcctggacccccgaccaccgacccaggaccctttcccccgcccctggcactcctcagcgtcaggcgccctttcccgccagctcggtaggggggactgtgcgatgcctgttcggcctttcgggacttggaatgtcgggtcagagggcaccagaaaaagtgacagttgcaccccctgccccaaacagcatcactgcaaatcagaaggactcagacagaaagcgctccctgagtgccaggccctggtcacagcagctctttgcgtccattctccatgtggggaagcagaggtttgagcaggagccagcacaagcgtttctgtgctcaatgggtcgccctaattcttaccttctacatctggggctagccggctgtgtgctcagggataccaaagaacaggaagaatctggcaaaatgaagtcctatgtttgctgaaacatcgttgggctggtgtgatgggcaggcttttaaaaatactttttgaagggctgggcgcggtggctcacgcctgtaatcccagcactttgggaggccgaggccggcggatcgcaaggtcaggagatcgagaccatcctggctaacacagtgaaaccccatctctactagaaatacaaaaatattagccaggcgtggtggcgggtgcctgtagtcccagctactcgggaggctgaggcaggagaatggcgtgaacccgggaggcggagcttgcagtgagccgagatcgcgccacttcactccagcctgggcgacagagcgagactccgtctcaaaaaaaattcttttagttagaagtgtgaaaagctatagtaccaccgtgtcatcatcatgaaggaaatgtgtagagattttctgccctgagagaagatgaaagataacatctacctcccgccacaaaaaatatgctggccaggccgggtgtggtggctcaggcctgtaaccccagcactctgggaggccgggcgcggtggctcacggctgtaattccagcactttgggaggccggatgtggtggctcacgcctgtaaccccaacactttgggaggccgaggttggttgatcacctgaggtcaggagtttgagaccagcctggccaacatggtgaaaccccgtctcttctaaaaatacaaaaattagctgggcctggtggcgtgcacgtgtaattctaactacttgggaggc

SEQ ID NO: 1243383 - DNA, 4001 bp, Homo sapiens
atttgtaatatctacattgccctgaaatataaagtaatagtctgagcaataggtcaaagctttaggtaacatcaaaatgtcaaaagcaagtaaacaggttaaaacacagtaattggccaggcgtggtggctcacggctgtaatcccaacactttgggaggctgaggcgggtggatcacatgaagtcaggagtttgagaccagcctggccaacatggtgaaacctcatctctactaaaaatacaaaaattagccgggcgtggtggtgcacacctgtaatctcagctactcaggaagctgaggcaggagaatcgcttgaacccgggaggcagaggttgcagtaagccgagatagcaccactgcactccaggctgggcaacaaagggaaactccatctcaaaaaacaaacaaataaacaaacaaaaaatcacgatagtggccaggcacggtggctcatgtctgtaatcccagcactttgggaggctgaggtgggaggattgcttgggcccaggaggcagaggcttcagggagccatgatcaggccactgcactccagcctgggcgacacagcgagattgtcacaaaaaaaaaaaaaaaaaaaaaagaagaaaacaaaacacagaagtacattggctgctatcccatggcctgaagcttctgcaggagaaagggagcagcccagctctccaaaggccacagtggctgcccagacacggggctcctgctgtcaccagagagtggctccttgtagaacatttccaggtaccaaaccagttaacaagtatatactttcagagttctcctttcaagataaacattttcccatttaaatatgttttatggccgggcgcggtggctcacgccctgtaatcccagcactttgggaggccgaggcaggcggatcacaaggtcaagagatggagaccatcctggccaacatggtgaaaccccgtctctactaaaaatacaaaaattagctgggtgtggtggcgcgcacccgtaatcccagctactcaggaggctgaggcaggagaatcgcttgaacccgggaggcggaggttgcagtgagccaagaccattgcactccagcctgggcgacagagcgagatctctgtctcaaaaataaccgaaaaaacaacaacctaaaaggtgtgggctaagctcctaggcgagggctaggagaaaaaaacatcagcccaaaagctgaaggacacaaggtctggttttcgggaggagatgctatcctatccttagcagaacctgaaacaaggccgcactacagggggtgctcaatgactgtatcaataacgtgccgagctacatgacaacagcaaaatgcagctacagggtattttgcggacacagaaacgttctgggccccctactcggcaataaccaccctaactggaaggcgctggaattcctggtgacggaatcgatccacaggcgtggactgtaaattagtgctacgccggaaaccgttactggattccactttaaaaggcgaggaagacgggcggagaacatccacacacaacagacgggttgggaaagtccacgccgaggactgcgcggatcccagccctgcctcttcccggcccgcccagcgcccacgatccagggccccaacagtcgctccgcgccgaggtccacagctgggggatccgcgggcccacaggcgcaggctcccccgccgcaggggccaggcggcctccgacccgccccgccgggctgggccttacagagcagagccgggcgggaggtggggcccggactccgcggggatttacctgcagagctcggcctccagcctcggcgaggtcccccggaggcctgctggccatgtacggccgccccctcccgggcctggcggggaaccctggactccaggccgggcctgggccccacagcggccgaggacccgggcctggaccccggcggagggcacggagcagcagcagcagcacggccatgttggcctgaaagccgcgcctgcgtgatccgcggggcgctacacggcgcctgcgcggcggggtgggcggggtctgacgtggcgcctgcgcggtccccacagctgcgccccgccgcgcccgggtgccgcttgccgcacccccgagcctgagcccgtctacctcgtggctgcctgaggcccgggtatgggggcgcgcgtctgcgaggaggtcgcgggtgccctggtttttttgaagccggccttgtattcccagggcctggcgggtgaataaccggccgggtcgtggctgcgtggtcgtgctccgcccgcgccgaggggcctcacgcccgggcagcctgcgtcacccgcagggttcggtcacaggcgagggcggatggtgcgggccggaatcccgcctgcgagtagaggcccgcgctcaggagggcggcgccggaggcctcgggtcgggagggccccttcgggtgtgaggagcgcaggaagggggcggttttcctgcgtcttgagccgcccgaggacgaggactgaagttgcagccgccgcagggagggcagccccggaggaggagggtcgtgagggagggagcgcgcagtgcggcgcggcctggcaggcgtctgcagagctcgtcccgcacacctctgacttcggagcgctccgtcctgtgccttcggactggctcacctcggaggcgcttcgagcctcggtcctgccccggccgctgcgcgagcccatcgtaggaagcggggaggcgccgtctggaagcttaggaagaggctctgttctcttcagggtccgccctccgggcccgggcagggtccctcgtgggctcccaggcgcgcggggtcctccgccaccccgaccccttcctccgtccgccttaggtctagagctgacgccaagagctggaaagcttgttgagtaggaaaagcaaagactagatggtctgtcacagaggtaggatgagggtgacctatttatttttatgcttttctgtactccgcaaattcgtaacagtgaatgccagtgacgacagccaacatcaccgagtgcctagctccgtgtcgaacacccatgtaatattcacaaccctgtgcagcgaatacaatacctctattttacatgtaaagaaagattcagaagtattaaaagtaacctgcctaggattacagctctgaagttagggcagaatttcaaggccggtctggtttgtttctggacctgcactcactccaccactacagacgaggttgcaaagccagtgggctgcgtgtaatcctccctcttcctcagccccgagacgctcaggaaagtgttttcagttatcgtggttatccgccctcagccctccagtgggccgggtgcctcggcagaggtgctcggggctggggaggtgttctgttggtttgtggagaggaccttcccctacacccagggctgacactgattttcacaactgaaccgcttttccttttgcttcttattgtacagtcagccttcgcagtgaatccaaccttgccgtttcctcctccactattttttctttccctgattgaaagacaccaggtgggccgggcgcggtgccctccccctccctctccctgcccttcatcccagcactttgggaggccaaggcgggcggaccacgaggtcaggagatcgagaccatcctggctaacacggcgaaaccccgtctctactaaaaatacgaaaaattagccgggcgctgtggcgggcgcctgtagtcccagctactcgggaggctgaggcaggagaatggcgtgaacccgggaggcggagcttgcagtgagccgagatcccgccactgcactccagcctgggcgacagagcgagactccatctcaaaaaaaaaaaaaaaggtcacaaatcctctgaacgcacaggcataaagggttgtggggctcggtcacttcctagaacacaaaaaaccctttcggaagtttggttgggttggtcacgggacaaggctggagagagggtgagggcacacatttggatgtgtttgggaggagttta

SEQ ID NO: 1243384 - DNA, 4001 bp, Homo sapiens
ctgatgtctcagctgactcagaagcaccacaaggatggcacagaaagttcagggtaatagatttttcttaaaccttcaagagagagcaagtcataaaactcattcgccttcatgagacagggttatgaacagaaaacaaagatcgttatcaaataaaaaatgaactggaccacaggtgggtaccaccccctaaggtcaacacagtgccctacctgaactttgaaccccagccaggaactgctgccggggctgtgaggaccaggaaggggccacaccacccagggatggaggtggagagaatcagatcactgctctgaggacgccttgcacagcaccaacaggaagcaggcggctgggctcccgcacagctaggacaaatgaggagctctggattctaaccacccggcaaaccacttaccactgtgtgcctcggtttccccatctttacagtcagagggtcagacgaaccaggctgcctacagcctcctcctgctctgcacttatctccaggaatggggtgaagtccaggcaccctttcacagaggctctgtgagcatgcagcctcctgggccccatgcacctgccgtctcaccccaccctctgggcggcagtgggcacagccctgagggacgccacagtgaatctgaacgctgccactgtctgagtgccagcgcaagcctgcgcctcaggtttctccagagggagtaaaacctcagggcctgctcttgctgtcacctgtgtgggatactgcaaatggcaggagtgtggaggcagctgaggggggggctccaggatgagcaggacctggtgaaggaacaagggcccttgggtggggcacaacggcccccacccctcgtggctctgtagcttgcttctgtctggccttgccctggcccttcctggtcctccacataggcctgctcatgcaaacccacagctctcaggcctggagagagtgcggcaaacacacagcctgcctctgccccccggcagggtaccagcttttggggtcatatcacatgctccaagccagcactccagctctccagggaagaaatcactttcggtttttttcgtaaagggtaaataatcacttaagctcaccattctcactaacttcaagtatctttctagggcttaattgttggttctggttgatggttaagaatagaaacaccaagcaggttgtccccccaactttacacaccccttcctctcccagttaaacccaggaatttagtgtcagttcagacgccaagtgaggcgcagccccccaccttccacccaggagaaaatgccccaaggggacgcttctgtctcctttcctgctgaaggcaggggaggagtcgccccagcaaaggccagctccgtgctccctgagccaccggcccaagtccctctcccggaggaagccaggccactggggagcagcccgctccgcgctgggagaggcgtcaggtgggggggtccgggaggggaacgtccagggccggggagggagaggaaggagggagagaaggagggaggaaagagagagggaaagagggacggagagtgggagggagggagctccgggtcccgcagagaaggggatctcccgctccagaaccggtcgcagcctctccgccgggaccacccccacccagggggcgggacggacgccccagaccgcggtccccgccggctgccccgcccccggcctcacccgcggcctcgggctcccgcgccccgaccgagccgtccccgcgcagcaggaggtccccggtatcccgcaggcgccggcccggcgagccccgcagcccgcggcagccctggaagcacacggcccacgcctgctcctcgttgagcggctgctcgtaggccttcagcacctcctccagggacagctcccagggctccggccgccctgcgcccgccgcggcgccgccgcagctgcccgcccgggccatggcggggccgtcatcgcctcccgcgcgccggacccgcgtccatgcagccgcgccttccgccgcgcagggtcagcctggccgccccgccccgcgcgagcgcctcaggttgggggcggggcggcgacgggggcggggcgcggagggcgcggggggcggggcgcggagggggagggacgcggggcggggcggggagtggagggcgcgcggggagaggcccggagggggacgggtgaggggcagggcggggcgcgggtaggtgcggaggggctggggctcagggctggggacgcgggggcgcggggccgaggccggggtgcgaacccctccggggtgctgggcaggaccggggggagggttgggggctgcagacatgggccagggcccgcgcgctcggacacgcggtgacacccccggcgctcccccgcagacccagacggccgatgcccacaaaagcccgggccggcatccagcccgggacactgcggtgaccgcggggggcctgggaggtttgccgctgggaacgcgggagggagccgggaggagctgagcagacaaagcccgcagtggcctccccgagccccgggcaaggtgacctccaggggttgtcgcagggtggctggggtgagggcgactccccgcatccggccttcgggtatgaagcccttaataaatgcctctgcctagcagggaatgtgcctgcagtgacgtctccagggtgtccgtgaaaaataaacacacacggttggccagtgatggcgtgcatcgcatttggggcgtgtttgtgtcttcaggccgggtcactcctggacactgggtgtttgcctgagggacgcaaggggaactcggctggggctcatcccgaggcctcttcatagttgtgccagatctgaataagtgggcaagaaaatgcagttggggcataaacggtcccaagcctgggtgctgccagtaccacccgggggcaagaaatgcagattcctgggctccagggctggagattctgatgcaggtccgaggtgaaacttggggcacttaaagttcgctggtctcccaggagttctggacctgcctggacaacacagtgagatcccatcccagaaaagaagttccacaatgatttttttttctttttttttttttagagacaaggtctcacccaggctgaagtgcaatggtacaatcgtagctcactataacctcaaattcctggggtcaagtgatcctcccacgtcagcttcctgagtagatgggactaaaggcatgaaccaccacgcccagctgattgtttttattttttgtggagatgggatctcaccatgttgcccaggctggtcttgaattcctgggctcaagcagtcaggccaccttggtctcccaaagtactgggattacaagcgtgagcaaccgcgcccagtccagctggacttttcttttctttccctttcttttttttttttttgagaaggagttttgctcttatcgcccaggctggagtgcagtggcgcaaccttggctcactgcaacctctacctcccagattcaagcgtttctcctgcctcagcctcaaagtagctggaactacaggcgcccaccaccacacccgggtaattttttgggtggtttcgccatgtcggccaggccggtctcgaaatcctgacctcaggtgatccccctgcctcagcctcccagggtgctggggttgcaggcatgagccatgtcgtcccgtccagctggacttttcatctgtaagcagaaaggaggctgatgatgacgaattgtgcctaaagtttgtttgtttgtttgttttgaggcagagtcgcgctctgttgcccaggctagagtgcagtgacgcgatctctgctcactgcaagctcccctcccaggtttacgccattctcctgcctcagcctcctgagtagctgagactacaggcgcctgccaccacgcccagctaattttttgtatttttttagtagagacggggtttcactgtattagctaggatggtctcaatctcctgacctcatgatccgcccgcctcggcctctcaaa

SEQ ID NO: 1243385 - DNA, 4001 bp, Homo sapiens
cctcactattcaccgacacttaaggggcagccccgtctcccccttcgggctcatcaggagctggggcgtccacagccccatcctcactggccaccagtggctcctcctcccctttgaggctggggcctgacccagacttcagctcctccatcgccagggagccctggcgagacttccgtctgccaaagaaagtggtgagcgtgggccgacggctagacccctccccatcggggaacccagagcccttgtcgcccccggaccctcccacggtcactgtcacggccccctcctcagggacctgggctggcccagcccaggcgtccaccaccccgttacgcttgccgcctctgctcagcacgagggccccagtccgccgcttctgccgccggcgccacagcaggagcagagccacgaggactatgaccgccagcagggccacaagcacagccactggcagcatgcctcgtgagttctcatctgggttccggaagggcacagtgcttgcgttggtggaggtcgttggagacatcattgtagatagttttacgctagagacctggggtccactggccccgctggagggctccagagagccagttgtcatggtaacagggggtccagtggtcccagtggaggtctccagagagtcagttgccatggtaacagggggtccagaggtgcctttggaagtctccagagagacagttgccatggtaagagggggtccagaggtgcctctggaggtctccagagagctagctgccgtggtaacaggggctccactggtcctactggaggtttctggagagttcgttgttatggttccacctgtcacggtgtgggatcctagagagtttgctgttatgggaacagcaggatgactggttgcatgaggggtttcctggggcactgatgacatcttgatggaaacttcctggtaggttgttggctcaggtaaaggggaaccagtgctggcaccaatggaagtccaaagaggggatccctcattgatggaagttgagggaggtagggctgaggtctggtccccagtgctgtcggccttagggtcacttgttattgaagtggtgtacatctttgagctcaggggctcgctagtagagaccaaaggctctccggaggtgggtgtctgcactgctgttgtgctccccagagcgtctgggcttaccaccagcaccccaaggagaaggagaagcgtggccatttccaggcaaacaggcaggagcaagagctgggacctgcaggtgggcagccggagaagcagaacacgcgggagttgccggaggacctggccgggcctcccctctgcccacttccctgccaacggccaggcccaacctgcggtttaacggttttttccatgctggcttttactgttatcagaaatgacagaggaacagatgctggcagctcccccatcagccccatcctgaggctccctccagcctcagcagcttagattccagcagtgaccagcccctcctggccttccctgaccctgtgcagcccaatggctcccaatctcttcccatcataacctgtcagagtcttttcaagccacaggcacattcccaggcccactgaggcccctaccccaccaagtctcaccctcttaccggctcggctgataaggacgcagcactggggccaggtcactccaccacctcccgaggctggggcaagactgggaaggacagggccccaaggggaaaggaagtgggccctggctccacccaccccacccacccctccatcctgccccacccgcctgctcccacagctgctgggcgaagacagcaccatcacctgctccttcaggggccagcggggtgcctgggggtctggggctcacctgagggaggcagggaagcgtgggatctggaatcaggattcctggctcttggctgaggaatgggatggaagtggtgatgctagggagggctgggctcagaggtgggtggtgggaatgtgagcctgagaactcaagggtgcagaggaggaggtgggaggggagggtggtttcctttgcatttgtggtccccaagctgttaggccaggagctgagtggcgccatttcctgccctcagagctcccaggaagtagcagggcaagaggaagcccccgagtctggctgggggccgtgaaaacctttgcaggctggtgagctcttgactctgtccggggagctgggggtcaccacagtggcccccagtcacagagacgtggctaaaccaaggtggttcctacacactgcatatgctaggatcttatttctgcaaactagtaaagatgtgggaatctttttttttttttttaaggcggagtttagtgcaatggcatgatcttggctcggctcagcacaatgtctgcctcctaggttcaagcaattctcctgcctcggcctcctgagtagctgggattacaggcttgcaccactgtgcccggctaattttgtatttttcgtagagacgaggtttctccatgttggtcaggctggtctcgaactcctgacctcaggtggtccatccgcctcagcctccccaagcgctaggattacaggtgtgagccaccgcgcctggccagatatgggaatctatatggaaaaccgtctggaaagatatctactaagggattcacctaattgtctttggataggtgagagtaggaggtgggggtattttcttctttgaatggttcccatttcctgactttcctctaattagcaagctttgactctcggtttgtgtatgtttttggtttttgttcttgaaaaacgaaaatcagtcccgggtgtggtgatacattatgctggcagtccaggccaaagtgggaggacctcctgagcccaagagtttgaaaccagcctgggcaacgtagcaaaactcctatcactaaaaaaataaataattttttaaaatcaaaactgatttgtatattttaagagcaacatgtgcacaatagaagattctaacaggcccgtgggactgtgccatttctacaagctgatgagtttgtctgacccaaagacatgagactcctgggtgagagccacaggaattaattgctcacaccaagcaacagcagcgtgatgtttgcatcagttccccttaccccaagtcccacgggggcaacatggaagggcccagactgacaccatgcacacagtgggcctgcaccgcagccatagagctctgagcttgagagattcccctcctctaggggccctggtaagcccaggttcccacagggagacgtgtcttcatccctcgggtgtgctcactgcaaacacagcactgaaaaatggcttgagtacaaagtattcagaggctgagcgtggtggttcacgcctgtaatcccaggactttgggaggctaaggcaggctgatcacttgaggtcaggagttcgagaccagcctggccaacatgctctcttttctgcgcacagtggctcagaaaggtaacggggtgcccattctgcaggggggatgagggacacaggagcaaaggagtatagactagagggctgcagaatcaggccctacagacttcctgtcctaccaccaccatcttccagctgcatgaccttgaacaagcacataacttctccaatgccctaggaccgccaccttcttcatgaagtgactgcaagaattaaatgagataatgttaagtgcacagaaaagcagctaccagcacgggactctgggttcctgtcctacctcttgcacttgggcaagtgccttaatctccttatccctctgttgctttgtataaatggcgataattatggtaataccacatagtttgttttgatgattaagagttaatacatataaacggctgggcacggtggcccatgcctgtaagcccagcactttggaaggccgaggcaggcagatcacctgaggtcaggagttcgagaccagcttggccaacatggtgaaaccccgtctctactaaaaacacaaaaaattagctgggca

SEQ ID NO: 1243386 - DNA, 4001 bp, Homo sapiens
agctgggcatggtggtgggtgcctgtaatctcagttactcgggaagctgaggcaggagaatcgcctgaacttaggaggcagaggttgcagtgaactgagatcgtgcattgcactccagcctgggcgacaaagcgaaactctgtctcaaaagaaaaaaaaaaaggagattcgggtgaggatcagggtgccgggtggaaacatgggagcgagggggcagtgggatggtgagagggaaggtgctggaggctggctgagattccggcctccagcctcactattcaccgacacttaaggggcagccccgtctcccccttcgggctcatcaggagctggggcgtccacagccccatcctcactggccaccagtggctcctcctcccctttgaggctggggcctgacccagacttcagctcctccatcgccagggagccctggcgagacttccgtctgccaaagaaagtggtgagcgtgggccgacggctagacccctccccatcggggaacccagagcccttgtcgcccccggaccctcccacggtcactgtcacggccccctcctcagggacctgggctggcccagcccaggcgtccaccaccccgttacgcttgccgcctctgctcagcacgagggccccagtccgccgcttctgccgccggcgccacagcaggagcagagccacgaggactatgaccgccagcagggccacaagcacagccactggcagcatgcctcgtgagttctcatctgggttccggaagggcacagtgcttgcgttggtggaggtcgttggagacatcattgtagatagttttacgctagagacctggggtccactggccccgctggagggctccagagagccagttgtcatggtaacagggggtccagtggtcccagtggaggtctccagagagtcagttgccatggtaacagggggtccagaggtgcctttggaagtctccagagagacagttgccatggtaagagggggtccagaggtgcctctggaggtctccagagagctagctgccgtggtaacaggggctccactggtcctactggaggtttctggagagttcgttgttatggttccacctgtcacggtgtgggatcctagagagtttgctgttatgggaacagcaggatgactggttgcatgaggggtttcctggggcactgatgacatcttgatggaaacttcctggtaggttgttggctcaggtaaaggggaaccagtgctggcaccaatggaagtccaaagaggggatccctcattgatggaagttgagggaggtagggctgaggtctggtccccagtgctgtcggccttagggtcacttgttattgaagtggtgtacatctttgagctcaggggctcgctagtagagaccaaaggctctccggaggtgggtgtctgcactgctgttgtgctccccagagcgtctgggcttaccaccagcaccccaaggagaaggagaagcgtggccatttccaggcaaacaggcaggagcaagagctgggacctgcaggtgggcagccggagaagcagaacacgcgggagttgccggaggacctggccgggcctcccctctgcccacttccctgccaacggccaggcccaacctgcggtttaacggttttttccatgctggcttttactgttatcagaaatgacagaggaacagatgctggcagctcccccatcagccccatcctgaggctccctccagcctcagcagcttagattccagcagtgaccagcccctcctggccttccctgaccctgtgcagcccaatggctcccaatctcttcccatcataacctgtcagagtcttttcaagccacaggcacattcccaggcccactgaggcccctaccccaccaagtctcaccctcttaccggctcggctgataaggacgcagcactggggccaggtcactccaccacctcccgaggctggggcaagactgggaaggacagggccccaaggggaaaggaagtgggccctggctccacccaccccacccacccctccatcctgccccacccgcctgctcccacagctgctgggcgaagacagcaccatcacctgctccttcaggggccagcggggtgcctgggggtctggggctcacctgagggaggcagggaagcgtgggatctggaatcaggattcctggctcttggctgaggaatgggatggaagtggtgatgctagggagggctgggctcagaggtgggtggtgggaatgtgagcctgagaactcaagggtgcagaggaggaggtgggaggggagggtggtttcctttgcatttgtggtccccaagctgttaggccaggagctgagtggcgccatttcctgccctcagagctcccaggaagtagcagggcaagaggaagcccccgagtctggctgggggccgtgaaaacctttgcaggctggtgagctcttgactctgtccggggagctgggggtcaccacagtggcccccagtcacagagacgtggctaaaccaaggtggttcctacacactgcatatgctaggatcttatttctgcaaactagtaaagatgtgggaatctttttttttttttttaaggcggagtttagtgcaatggcatgatcttggctcggctcagcacaatgtctgcctcctaggttcaagcaattctcctgcctcggcctcctgagtagctgggattacaggcttgcaccactgtgcccggctaattttgtatttttcgtagagacgaggtttctccatgttggtcaggctggtctcgaactcctgacctcaggtggtccatccgcctcagcctccccaagcgctaggattacaggtgtgagccaccgcgcctggccagatatgggaatctatatggaaaaccgtctggaaagatatctactaagggattcacctaattgtctttggataggtgagagtaggaggtgggggtattttcttctttgaatggttcccatttcctgactttcctctaattagcaagctttgactctcggtttgtgtatgtttttggtttttgttcttgaaaaacgaaaatcagtcccgggtgtggtgatacattatgctggcagtccaggccaaagtgggaggacctcctgagcccaagagtttgaaaccagcctgggcaacgtagcaaaactcctatcactaaaaaaataaataattttttaaaatcaaaactgatttgtatattttaagagcaacatgtgcacaatagaagattctaacaggcccgtgggactgtgccatttctacaagctgatgagtttgtctgacccaaagacatgagactcctgggtgagagccacaggaattaattgctcacaccaagcaacagcagcgtgatgtttgcatcagttccccttaccccaagtcccacgggggcaacatggaagggcccagactgacaccatgcacacagtgggcctgcaccgcagccatagagctctgagcttgagagattcccctcctctaggggccctggtaagcccaggttcccacagggagacgtgtcttcatccctcgggtgtgctcactgcaaacacagcactgaaaaatggcttgagtacaaagtattcagaggctgagcgtggtggttcacgcctgtaatcccaggactttgggaggctaaggcaggctgatcacttgaggtcaggagttcgagaccagcctggccaacatgctctcttttctgcgcacagtggctcagaaaggtaacggggtgcccattctgcaggggggatgagggacacaggagcaaaggagtatagactagagggctgcagaatcaggccctacagacttcctgtcctaccaccaccatcttccagctgcatgaccttgaacaagcacataacttctccaatgccctaggaccgccaccttcttcatgaagtgactgcaagaattaaatgagataatgttaagtgcacagaaaagcagctaccagcacgggactctgggttcctgt

SEQ ID NO: 1243387 - DNA, 4001 bp, Homo sapiens
gtttgaagaccttgccctatgatcccattctcattgctccagacttcacctcaaatacctccagttcctcattggcctggagtagagaaaagaacactgcaagacctggtttcaaattcctgttccgcctccaactggtggtgtgaccctgggcaagtcttaactcttctccaagcctcagtttctttataagctgtagatatcactacctacttcctctataaaataggaacagtaacacctatttttgactgatagaaggattagaagacaaggggcataaaagttcttcgcaaagtcctacaggtgtaatcatcacttcctccaggcctggcacacaatgagtactcagaaatggttgagaaatgaatgaaggatggaaggaagaaaaagggcttggctctagctttgcctctcccacaagtcccaaagttgtgaacaagtaaaacacacctctccccattccagacaccctctcctgcctttacttatttatttatttatgagatggagtctcgctctgtcacccaggctggagtgcagtggtgcgatctcggctcactgcaacctctgcctcccgggttcaagtaactctcatgcctcagcctcccaagtacctgggattacaggcgctcgctaccatgcctggctaatttttgtatttttagtacagatggggtttcgtcatgttgaccaggctggtcttgaactcctaacttcaagtgatccactcatcttggcctcccaaagtgctgggactacaggcgtgagtcaccacacccaaccctcctgccattatttactgggtgtctaccatgtgccaaacactgcactaggcccttcacagacaatcttttagttaatcttcacatcagtcctaagagatgattcgtgttattacttgttccatcttatagacaaggaaaatgaggcttagagaggttgagtgccttgcctaccatcacacaataagtggaagagctgagatttaaacccaggtctgtcttcacctgggtgaagttatacttagttatactaaactgactccctctttaaatgtggtgtcccgctgacccccgagcaacatcagggccatcacctcccctaactggccacaaaacctccattaatgagcccctagacaggccagcgcgtggccccacttgagacagaacagaaggaggagcggctgtgtgaccaggagtggtccccactcaccggtctggatgagcccagagctactgtccccgatgttgaagaactgctcgatgtcgggaaggacgcctgaggagaaaattcaggatggtccggcaaagcagcgccaccctcgggaccctggctcccctctcctagactatcttcctcccagaagtgagtccctaccagccacggtgaagcggtccatgtagttcaggagattgatgtagcacagcaccgccactatgagagccgaacggccgggagacaggccggtgatgcgctgcagcccctcctggtccgggacctcgggctcctcggacttcgggttccccgtggaccctggcaaccccggggtgccaggcactggcccgtcgtccgggtcatccgcctggctgaggaagggcgcggtgtcggacccggccatggtcccggggggccgcgcccgcccgcgctccggtcccaccgacgatcccacctgcgaggggaggaggctggagaaaggaggatggaccgaacacaggcgagggaagtgcgcccggagacggggagcttgccctgaagcacagagcaccactgagaagggacccgggccctgtcacgcctccccgtctcagtagacacacagcgcggaggggacgtgcggaatacacgtgatgtcggggacaggagcgggctgaagagggcacgatcccacgcggaggccacccctcacccggggtaggagcccgctgcacttgctgtcgctcagcccgggcgctgcaccacggcagccgccatgttgcttaaagccggtcatgtgacgcgggagccagggtggaaggggtccccgcgggcaagccttcgacacgtgacctgccacccgactacggaagcctcttgggcgttccgcccgggctcacatgtcatgtgacggccggccggtcgccggagtaaccaggaactttcccagaccctgcggtccctggagcgtcaaaaagagcgtccccgtgactaggtggagtcgcctgcccttccgaatctcagctgtcttatctggaacccccacgtggcagactccatcttcatcaaacgggataatggggtctcaaaaggttttggaagtagtagatacctctaaaagccaaggagcagccctagttctcgggaaccatcctgtcttcctcccagggtctggttggcggctttttactctcaataaaggatggatggatggatggataaatggatggatggagcttgagcagcgcgatggatggaggattggagggacggagggatggacggacggacggatggagcttgagcaacgccccgccctttgttgagattccccaaccctgctagccttgtaaactcctgagccttcaccgtggacacttaaatacctattaaaggaagcgtctccacccgccgctcctggagcatatttttcctcactccaatcgggattggagcccttgcgccctccggtgggcttttgtagggcaggcaggagctcctagcctaaggagactcccagctgcaggactagggtcaaagggataacttgggagtggttctttagtggcaccctataatctccaagctacatctaataaagcactctaagtaaaattagtatagttctgtgcaaatacagcttcaagacccatctttcaaccagcccttaaaggccctctactgaaatcctggaatctcgtggggagagcatcccccaaccccaaaacgccttgttagaaactatttcgagtccgaatacccataattggctttaaccccccccccccccccatattaggtgcctcgtgtttcagaaccttaagcttggtttcccctggcggacaggaacttcaggttgcaggcatttaattccctcaacaagatattattgaacatgtatgtgcctggcattttaccaggtttcagggaaaggcagacttactcccttccctcgtggagcttatctagagagtgatacgcattgtaaattgcacctctgaagtgaaaaggcaagccacaggttgaatgaaaatatttacaaagcatctatctgccaaaggacttgtatccatgtaaagaactctttttttttttctttctttctttttttggagacagacgcttgctctgtcacccaggctggagctggagtgtagtggcgggatctcggctcactgcaacctccacttccggggtccaagcgattcttgtgcctcagcctcccaagtagctgggataacaggcacgtgccaccacacccggctaattttttgtatttttggtagagatgggctttcagcaggttggccaggctggtcttgaactcctgacctcaagtgatctgcccgcctcagcctcccaccgtgctgggattacaggggtgagccaccatgcccagtgtcattttaatttttatatttgtagagatgagttatcgctatgttgtccaggctagtctggaactcctgaactcaagcaatcctcccacctcatcctcccaaaatgctaggactacaggtgtgagccactgcacccagctcttttgtccattttaaaaattgtgtttttggccaggcacagtggctcatgcctgtaatcctagccctttgggaagctgaggtgggaggatcacttcagcccaggagttcaagatcagcctgggcaacaaagcaagactcatctctacaaaaaaactaaataaataaaaattaaatatacacttcccatatgacccagcaattccactcctaggtaaccaccaatgagaaatgaaaacgtgtccaaacaaaaacctgtatatg

SEQ ID NO: 1243388 - DNA, 4001 bp, Homo sapiens
ggatcagggtttttctgtttgtttgttttttaacacacatatatgtgaacaaagagtatgcgtttgtactggcagaagaagcgtctggtaagacaaccagcaagttaacaatggtcacctccagaaatgggctgggtaaaccaaagaatttttttgtttttgttttttttgagtcagggtctagctctgtcacccaggctggaacgcactggtgtgatcacggctcactgcagccttgacctccctggctcaagcaatcctcccagctcagcctcctgagtcgttgggactacaggcacgtgccaccacgcctgacacattttttaaatttttgtagagacagtgtttcaccatgttgcccaggcaggtctcaaactcctgggctcaagtggtcctccagcttcagcctcccaaagtgctaggattataggtgtgagccacagtgcccagccccgtagtggagaatttctgttgaatgaaccaaaagcaactgccaacctctccatgcaccatgtgtttcagaggagaaagcacagtgaagaatgcagtgtgttctgaggtcctgtcacccctgaggctgtgtgtgtcctttgccaaattaaagagtcttactgaatgcggtgcatccaggagacaggcccaggtttggactggtcctctagcctcagaagcatctttttctccgactgattccgtgttcaggtaatgtctgcctgcctgcctagggcatctccacaccttaggccagccacgtccgcctcgcccgctggaacctacctgcccatcagagtcgtagccccagttagtggagcctgctagagccacggcccgggcatctgcgtctcggcgggctgcactcaggacgaagtgccaggccctgctgttccgggggcgtctggccatggtggaaagaatctagaagaaaacacaggctctgggcaaaggaagactcacagcactcccagccctgagcttccaggctgggccacggacccactcaaagtggggactgcaggggccgcaccggtgcccagccagggctccagaacgcttcaggagcccgtacctcactccaggatctgagcagctcaataaaacccaggtagatcctgtgaaacgccacccagacacccatgactccggaatgcgaatcccagcccctctctccggttccacctcacgaacctggctgccccgcccgcctgtcccgcaggcatctaaaacctccactcgctcctcctctgtcgtccggtttgacaaatggcatctccggcctcccagttcctcatgccagaagcaccgtgaccgctccccgacaccttcccctcacgcccggcccgaccgccgcacccgcctgcatcctcctcccgccaccgtctcctgggccgcgcagctcgccttcccctccgctcgctaccgccagggctcctcgtgaaacacaaatcttaaaacctgctcagcgctggccgctgttatggtataaaatgcaaaaggctgcgagggccaggtctgcgcttcccaggccacctgcctggcacctccctcgccagctccggggttcccgcctagccttccagggccgacccctgcgccgggctcgcggctggcaacgcccgctgggccccgggtggggttccagggaggccggggcggatcgcggcgcccggaccgccgaaccctgcccagccccaggcgagcgcgtgtgcagcgggagccgccctccccggcggcagcccggcctggctgttccctcccgcgggcgcgcgggttccggagtcggcggcaccggggaagcctctctcgggcgcggccctccggagaggaacaaaggcggcgccctggccgcgctgctaccgccgcgcccgcaaggtcagcgcgcccgcccagagcccgagacgtcggcccgtgccccgccactcacctgcagcccccgctgcgcgctccgccggcccggccctgacccactttccgccccggagcgagacgtaaacaatccccgccccctgcgcccattggctccggcggcgaggggcgggcacacctgtctcggagcttcgggagagggggcgggagtcgggtgacaaagctattgccgagaggtttcaggaactgtcagtcctaatccaacgttcctattggtcagttcccaagcggttggagacaaagctcgcgcgcacattggacccgggtgggaggtggtaccgcaggccgcgttgaccggaaagtaggtccgtgtcatcgtctgcgccggaacctgcgggaccggatcgagagctcctccggcaagctgattggctgggacagcaggattaggcctgtcaagaagagccacgggcgggcacgcactgcccattggttggaaggcccttcgctctagctgggaggctgacggcccgcgggcgtaagcggactgcagccgcgagctcctggaggcggcgggatggaggcggcggccggtgagtggcgggccagggtgcggagccgctccagggcctcgcttggggccccgccgcgtcccttcccggggcggcctcgctgcgtcgcgcgcctccggtgcgaccatcaccggccggcgtggctgggccgggccagaggccgcggcgcgggcattttctaaacagggtcgtttcccgcgtgctcctgcttcgatgtggaagctccgtgatctcggagggcctgagtcgtggagttgggggagcttttaaagttaactttgttgagcaccgcgttgtaggcgggcgcggtggcgcctgtgggccccgctatcctggaggtcgcggttgcaactgcaccgcagcccgggcaagagcgagaccctgtctctaaataaatcacacgcgcgcagtcatgaaagtaagacggacgccagaatctcacatgcttttaagttctttgtggaagtggcgctctcagtgttcagaaaagtgtaagttgcgcgggacagaattcacaccagtggggacgatccgttcgccagatcagcgccgtgggccctcctgagtagtgggagccgcatttatcttctaagagacctcgagtccgataccaaaaggaaaacattcctcggacagcaaggtcttgcagcacaactctgacagattagaaaccgagtgctggagtcttttgtttttgagacggagtctcgttctgtcgcccaggctggagtgcagtggcgcggtctcggctcactgccagctccgcctcccgggttcacgccattctcctgccgcagcctcccgagtagctgtgactacaggcgcccgccaccacgcccggctaattttttgtatttttagtagagacggggtttcaccgtgttagccaggatggtctcgatctcctgacctcgtgatccgcccgtctcagcctcccaaagtgctgggattacaggcgtgagccacggcgcctggcccagtgctggagtcttattccagaggagaagcctggaaaagcctgtccttattatcaggacggatttactacaaagtaaggatattactgagattgatagaagcttttttttttttttgagacagggtcttaactgtcgccaaggctgaagtgcagtggcacgatcataactcactgcagccttgacctcctgggctcaagcgaccctcccacctcagcctcctgagcacctgggaccacaggatgcaccaccccgcttggctacatttttaatgtgtagacatggggtctgaatacgttattgagagtggtgcggaactcctcctggaccgaaatgatccttccactttggcctctcagagtgctgggattactggcgtgagtcactgcacctagtccaagctttcgtttttttgttggggggagacggagactcgctccgttgcccaggctggagtgcagtggcacaatctcgatgacggctcactgcaatctccacctcccaagttcaagcagttctcctgcctcagcctcccaaatagctgggataacaggcacacgccaccacgcctggctaattttttttgtat

SEQ ID NO: 1243389 - DNA, 4001 bp, Homo sapiens
atggtgccacgacctccatttccagcctagcctaattcaacctttttcaggtaacgaggcgcttttacactcttggagataatattacactaatgttaaatggaatgtgagtatccaacagacctgatatactacagcccagcccccgagcaccaaagattctccaaaactctccacaaatattcccctgccacatttcttctgcctcacactcaacaatccacaaagcagaagcagagaaggaactcttcccactttcaaacctgtgtctgtaggactgggagctgagggtgagcaggggaggggctgctctgcatggtcccactcccaggctcccccttggatgcctgaagaatgactgggttgttatcaccagtactgctggccgaggggctggcgtccggctgcagggcatgctgggagctggcctcattctgggccaccggccaccgggacccgccttccagggcccggggcccaccagggcgtcccagcctccgctcaggtccaccagcctctggagcacctaaagtagggttaaaaaaaaaaaaaaagacagaaatgcagttaaaggggatgaaaaagtatttttaaaaaaccagaaataacactgaataaagagaaacacagaaattacaggttacatttcttgagcacttactatgtataagatacttttagtacctgtttgatgtgttctataatcctcacacctaccttaaaaaccaagtgcttttcacagcataacaaatattgacttcctcctacacacaacggatatagccatgcagaaaggattcccgacctaaatgtagcttacattctaatataatctgttttgtaagttacgaagttaagaccttatgatttgcggaaggttacacagtaaaaaagtgataggagggcttcaatccacagtctgatgccaaaaccaaggaaaacctgctactcttcctggtagagccaggttgaccacgttttcctcaacccacagcctcagttctgttgttgtactataatcaaaccctctacagaaaaatcacatgcaaacattcccatgcttctctagagtgaaaatccccaatacggacctataattgctttatctcaaacatttctcccattagcatcagcacacaaaatggtagcagatccctcacctgtgtgagctgagaccacaccccctgtgaaagtctgcacttccacggtgccgccgtactgaagggaatcacacctgaaacatccatcaaagcgtattatttactccagttttttgagacgtttaaatatacccaaatcagttaaaagactagaaacagaaaaactacagtagtaggaaaatctcacatttcagggaaatgcaaatcatgttttgtgaattccggagggacatacgatcctgcctgggggcaggagcaggaaaggagtgaagaaagaaagttcaaaaattttaagtgtaaaggctccaaccacagaatggaagacaaaaaaaaaatacagcaaaaaaaagctgtcacatccagaacctcagaaaggtgctacctgcctgcgggcctttccagtgagggctgaacgcagaagtgagagtggaactcccgggaagagtcaacaaacaggctggtcacaggaaaatccgcccaggattcagggcagggcgctgtatatcccatacctgcgccttgagacacttccccaaatacaagaaccacagcaaaaggagactcaggagcagtcaaaagcgagaggccgcactgccaagaaccacgcgccggaaacaggcagtgtgaacccgcaggaggcccggaaatgcttccccagtgtttaaggaaattcctaaaccacagtgccggctttgattcactccctactccgccacacgttcccaagacccgagctcaccagaagccaacaagccttaactcttgacttcaggtttcgtgaccatctccctagccctcccgacggactgacctcgcgtgacccctgacctctgcccaagttgccactagccctgagatagccccgccccctccagactcccaccccacccaacgtgcgcgccgggcgggggaggggcccgcgcgtgcgcggctggaggcggagcgagccggctgcgcgcacggcccaggggctcccgccagaacccgagcccacgcacacaagggtcgcggggctgggaagctcgtcatccaagcccgtcagggagcccccccatcacccgaccgcgaaaggctgagagaagggagggttcgtgccaccaggtcctggtcccccggctagatgtggtgggcgcgcgccccgactactcgtcccacgccccccttcctcttcccgcgcgcccctgaggggtgactgggttggtgggcgggcaggagcgcacctgggtccgtcctctcagggctcgctcgctcgctcgctcgctcaggcacgcgtgcgcagaagggcgggaagggagaggagacacgccggggcccagcgccggccggcctgaccccctcagtctgtctctatgggcgcgcgccgacagcctcgcgcaccggccccggggccccggctgagggtgcgcgcgcagcaccccgggaaggtgggggggaggcggtggcggaaagatgcgcgcgcagtcagccgtcatgggagggggaactgtggggcgttcgccatcttgtctccctctccttacctgcgtcctcgggggcgtgcgcaccaccccccctcccgcctaggaggggggagggccccctcttggccaccgccttcgcggcctttaaactcccctggagactgcggctactgccaccgccttgcctccactgcctcttcgcgcagcacacagatgcggacggtgggtgggaaaaagggcagacgctactcccagcgaaccgccgctgccgctcccgaggcctcaccaaaatggccgccgccgtctcggccgccaccaccaccactaccaccaccactcgctcggaatcgctatcgccggcgcggcccgtcttctcgcgagagacagtaactggagggtgggggaacggggaggctcgcgtgctagcgtagggtgcagcacggtgcgcaaggcagcctgggaggtgtagtctcccagaggctgcgcgctcgcccttcctcggagcgcctttaccgtttgcccctagatctacctggggctgcattgcggctgccagctcggaccaccgccacctccctttttatttacagatcacccagtaagctgcagcaagttagcagtggaacctgggcctcccgattcccatggcagcccacttctgtagcgctgcttcgttttacgcgaggatggtttcctgatagctttcaaacacctttgccatctcttcgcaaactttctagattaagaatccctttgagaatctgatacctttaccccagaatagaacaataaataacagctaccttctactgacactacttggtgccttgattatttcttttaatcctaactgctccattttacaaacgaattgaggctcaggcgttaaaacacagtgacagatcctgaagtcaagattcctagccaagcagtctaagccacaagaatgcactcgctgtcataaaattttaccacctaaagcccccgctaagaggccaggttaggaagccctgatgaagctccccttcctccattcagtttagctcttccctgcgaagaggattgttggtcccattttacagatgaagtttgggttgaaagaaaagtggatgatgcccatcttttctagaccctcctcccatcacccccagaagaggggatcccaggccagagcctgaattggacctagccttgtgccattaactccttgctatgtgaccttgagcaattaacttcacctttctgagcttcagtttcctctgtaaagtgaggatagaattgctgatgtaaaattgctttgaaagatctaaagggccaggtgcggtggctcacacctgtaaccccagcactttgggaggccaaggcaggaggatcacttgag

SEQ ID NO: 1243390 - DNA, 4001 bp, Homo sapiens
cgagcaacaaggaggagaagccggaggagaagctctgtggggtccctggcctaggaagcagatgggagtggtgagcgagaatatctgccgccacccagccaaggagcaagcatgatagggagggaagttagcacacagcggagagatgagggaaagaggtcaggagccaagatgtgacctttgggtggggtggtatttaccggggtggcacaattctgaaggggaaatcacccagtaggaaggactgtcatgatgggggcgtgaggaagccaccttgtgggttagaacctgccggtggatgcaggaggaggcctattctggggtatacagtccacagtggggcagagtcctgataaaatccaccacagtggatgaaacccacagcccaagtgctgagcaggagcagggacagagggaagctttacgccggaggttgggccaggggcagacgcacgctgtgggacccaggaaggaaagacagcagagagaagggacctttgcacaagcacctgcctgcgtcctttccccacgacaagagcccccagcgaggcctgcagaacattccagatgaccagttccctcggtgggaggaaagataaaggatgtccctaaaaggccaaaaattcctggggcccagtgtgtagcagcccagcagctggggctggggggcagcacaggagcggccacgaagggagagggtggcagcggcttggggctccggatccaattacgcggctgtttccatacttagccgcctgacagccgcctggaatactcagcactcaagccgctgcagccctgcagagcccaaattaactcaaggacagacaagggcagggcccagcagcacatgcagtggctggagccccccaccttacatcttgagtccccgagaaatagcttttgttcccacccactgcctgctctccctgcagggactgtgcccctgcaaccccctattcaacctcaaagacctgagaggctggactctgggcctctccagtcccaggtacggacctaggctcagagcccagcttgggggaagactgccgagtcatgaaaagactcggtgggcagtccggatcctagggggatccccggagcacctccctaaaagcattccctcggggaacctggcctcaggaaccttaggaacaagagaggtggcaaaacaatctggcatctcctccatagcctatagataacccccatgctgcaacccaagccaccacctctgctacccaaagtgctgagatgtcaaagggaagcctcagcacacagagccaagccccttttctgatggaagcccccaccccgagcagaggctctactccagaacgggccccgttcctcttctgaattgcatccaatgctgtttccagcccaaccgccaactctatttccgatcttatcccaaaccaattccaattctatctcactgctcccaaaacggtccccacctttgcccactgtatccccttctgtccacgcaaacccagttctcttacccgagtggggcctccgccttatatcccaccaggtgggagggtcacctcaacgacctccagctcccagactgtgctattttgtccgtctcagaggctcccccgtctcgactttgagggccctctttcccacatctactggccagactcctctctgaccctggctcacagctcagctctgtttgccgttcccacttcctctggccttcctgagggccccgcaactgtgctgctattctccagcacccagctctttctctgaggccccaggcccggggaaaagagaagggtaagaagacaccagccaagagccagggtttgccatcagccccgaccccctacccaacccatggtagacagaaaaccttggaggaagcgtgggggaccagtctgggctgggtcatgctgggaggggccctacctgcttgtcctgagaacaggagcgaggccaggaggcagccgagcaggaccagcgccctcatggtgactgccaagagagcccagctgctcctcgcctctatttatacggccggccgtggcagcaggcggtggaggggggagaggggtcacacagtcaccagggcaactaggagggtgtgatggggaagaagcccggaccccagaaggctgtgcagaggctcaggctgcgccactgctgtcccagctgccaggccccagaaggcagggccgtggctggattctcttcccccgaacccctgcagccctgggatcacatgacatgggtcacagggcgtgggtgacaggcataaaatggagcatcccttgggctcaggcggtggagctgggaagctgagtcttcccagaacttgcaataacttgacctgaagtctcggcaggttaaggaccttgacacgcctgcactggaaggaggaagttgtaaggccacgcaaaagaaatcctatttaacagccactgatccacatgctagagagtggtcagctacggcaaacccgcaacatgtgacctctgaggtccaaggctgcagccctggaacaaccttcccagcctctggaagagagagagcacagaccagagggagaggggcacactgagacacaagctgaggctacggtgtaaactggaggatggagcaacagatatccatttccaatggcccaggggttccagaacattcagtcacctctgcaaagtgcttttttgtttatttgtttttgatagaggatctcgctctgtcacccaggctggactgcagtggcacaatcatcactcactgcactcgacctcccaggctcaatcaatcctcccaactcagcctcccaagtagctaggacagtagtgccaccatgctgtactaattttttaaaattttttgtagatggcccagagagccagttgtaagaagccaagggaaagcagacacttgcttgtctggtcggggtacagtgtcactgtgtggggaagaggtagaagccagccttggaggaaaggaactaaatcagggccaggcacagtggctcacacctgtaatcccagcactttgggaggccgaggcgggtggatcacctgaggtcaggagattgagaccagcctggccaacatggtgaaaccccatctccactaaaaatacaaaaattactgggtgtggtggcgggtgcctataatcccagctcctcaggaggctgaggcaggagaatcacttgatcccaggaggcgaaggttgccatgagccaagattgcaccactgactctagcctgggcaacagagcgagactctgtctcaaaaaaaaaaaaaaaaaaaaaaagaattaggcatctggtaggcacttgactttttttttttttttaatcttttttaagagacagggtctctgtcaccctggctggagtagtgacacgatcatagctcactgcagccttgaactcctgggctcaagccaccctctcacctcaacctccgaggggctgggaatacaggtgtgcaccacatctggctaatttttttgttttttgcaaacatggtcttcctatgtcactcgggctggtctccaactcctgggctcaagcaatcttcctgtctcgacctcccaaagcactacgattacaggcatgagctactgctttttcaaagacaaggtcttgggacttttcctcttggaagtcccctctctctcactaaggagctgtttttctttctctttcttttgcctgttaaacctctgctcctaaactcctcatgtgtgtctgtgtcctaaattttcttggcgtgagacaatgaaccccaggtatttaccccaaacaatgtagctgcttcatgttggggacctcatccgggatcccaaggtacaacactcatcaaaacgagtcaagaaaacttattgtgaactatttatggcctttaataattgaataaggtatactcctgtgaagaaaatttggagcatgtttgtttctctctgcctggtttctctggaatctggaaactatctcaacatctggtggaggcaaaccagtgtt

SEQ ID NO: 1243391 - DNA, 4001 bp, Homo sapiens
agagctagactccgtctcggaaaaaaaaaaaaaagaaaaaccagtaggtgctaagcaaaggatattaggtcacaatgtttcggagaacttttagggaatgagccacctagtccaccccacaaaaaaagacgacgaccccacggcatctaaggggtgtgttaagacacagaaagtaggaagatcaacaccacacacaaatcaccaaaccaaacgatattacaaaactcttaaagtgggggccatagacagtggatatgcaaaagttacccaagttaaaagcagaaagtaaaaagtacaaaggaagacaaaaacacccttttctgttgggaaattatccgagtggtaagctaacaatgaagtagaaagatatatttgaattcaacagtaaaatatgcaaaaaagaaaacggtaccaaaaggggagaaaaaggggagacaagggttgtcgaaaaaaatggacatcagcaagcacagccagctcagcaccggggcgctccagagcggctgagtggacacaaagaacccagaaagctaaaatagtagctttagaagagccctaagcccacgcacttaggatgaaagacaacacaacactctgaaattctgatccagattcgtcctaactgaagccgagtggaaaccaagcttcagaagagctgtgtgccaaagaacgcctgaaaccaaccagaaaacttatatatgagtctggcgttttcttcccaacgaaggtctccaaaagcctccttagtttgaacacgaattctcgggagacgttgaaaaagtgtaaaaagggaacgcacggtctaccttacaaatgtaaactgaacacgttcactttcttcacagtttttaagatttggggtttctccccgccactaacaactcaaaggctgatagccgggaatcctaaaccatttaaatccggcccacgaagttcaaggccctccccgcagcgccgggggcctattttcggccttgcggaatgggggagggggctgcgcggcgtcccgcagtctgggaggcccccgacacgggcagcccaacgccgaagagaagcccgaggaaaggagatctggaaccgggggcaagggtccaggagcaagccccccgccgccgccccttccccgccacttaagggccgaaaacggcagctgcaggaaggccacctcggcggcacatgttggggggaggagtgaagccgaggcgcgcgccctcccccctcaccaagggcgctcgcgaacccgagtacaggcggctgcgaacgccgttgtcatgggggaggggcgggggggggtgaagcccgcgcgcgacaggaacggcgggaagggggaagggaggcgagggcgtccgcgccagcgaagggcgtcgagcgcgcgtgcgcgcggaggagctcggcggcctgggcagttctccgcgcgctttggcctcgcgccggggccgccgcccctcccccacccggctcgctggctccctcaccctctcacccgccgcctccgcccgccgcctccgagggggagaggtcttgccgccgccgctgctcgagctcccgagtccctcgggcctggggccgccgcctcgcctcgccggtccgcccgcctcagccgacgccgacgcctcctcgcttcctcaggggccgcaacgggctccaactgcgccactcgcaccccgcctgggccgcgctgcacgtcagcacgactaactgcgtgcgtcagcacgcaaacgcgcgtcgcggggcctgccgggaactggagtgcgccccgcggccttttgcgcaggcgccgaagccacaccgcgaagtaccgttttttcaggcacaaggaaggtttcaccccgttgccgaaagactaagcgtcccgttggccagtgcaacgaagaacggaggaagcgacgtaagacaccgcgtattcgtaggccttccgctgcggggaggagcacagggcctagcggcagcaaagcgacgcccgagcgcgtctcgtctcccgctgtcgatgcagagcattctgggagttgtggttcgggcgtgtcgcggagcccggatgtaatttcggctcggggcgtggcggccattttgtctccccatgttgggagacgatatcccagccgcggtggtgctgccgctttcgtgtgactttgggtttcccgagcgagcccgcagctgcacagcagtccgccttcccgtacccgagagaagccgcctcagaccccagccagcgggcacccccggaggccccgagcctggctgcaggccctagacctgcaccaggggcccaaccagttacccgtagcatgggccacgttctcccgctgtagaccgggctgaggcccgacggccacccctgggggaggagttttcttagcttccggtagggcagccaggccggggtcccaccagacccaggacgtgataccggtgaagcggcacatacaggaacaaggcaggaggaaaataataagcaccttaaagtttccacttttcggtaccgtacttcctgttaatgtttctaagcccgtgattctgggcctgataatcagccagccgtcctcacagcagagttgtaagacgctgggctgctcaagcacaagttcatatctagacccaccgctggcgagcagccctggacgtcccgcttagctgtcctaaccaactcaggtggccttgatccgcaacaggacgcggtaccacgtaatgaactgtccatttgagtgcaaggatttatatttgttattacgatttgggggtgtttttaagaggcagggttttgcccaggctgttctcgaatttggggctcaagcgatcctccgacctcagcctcccaagtagctgggactacccgtgcatgacaccctatctggcccttgttttttgttgttgttgttgttctttcttttttcacgtggtttcgcacttgtcacccaggctggagtgcaatggtgtgttgtcggctcactgcaacctgtctctcaggttgaagtgattctcgtgtctcagtcttccgagtagctgggattacaggcgtgtgccaccacgcctggctaatttttgtatttttagtaaagacggggcttcactatattggtcaggctggtctcgatttcctgacctcaggtgatctgcccacctcagcctcccaaagtgctgatattacaggcgtgagccaccacgcccggcccgtatccggctttaagatttgtttttcacttgcccgtgggaggatgtacttatctcagatgctagagccgggagaccctcccccccaccacccccatctcctgcaggagctctgatcgcagattggagtgtctgaactctgcatctatggacggtgcttctgtaagccggccgcaactctggagtggcatagtaaagtggcaaaggctttgcctttctggttaaagaccccagcacctccagtgagaccctttcctgtacccccactgatattctttatggaatgttttgtgcgtgagtcagcacatttaatgcccgtgaatagtgacaaaacatggtttgcagtaccctaatgactgatgatgctgagaatcttttgatgtgcttgttggccgtttgtacatctttggagaaatttctcttcgtgtcttttgtctattttatttttttgggacagagtctcactcctaaccccgggctggagtgcagtggcacgatctccacgcactacaattcttgtacctcagcctcccaagtagctgggattacaggcgcacgccaccacccagctcatttttttatttttagtagaggtggagttttttgtagagattgtgtctccctgtgttgcccaggctggtcttgaactcctgggctcaaactgtcctccccccttaacctcccaaagtgctgggattacaggtgtgagccatggcacccagccctagaatgattttttagtttccctttaaactttatttttttattcactgtagtgtggtggacggtggtgccccaaaacttcacaaccacctagacattcggaaggtgac

SEQ ID NO: 1243392 - DNA, 4001 bp, Homo sapiens
atctcagcacggcacagccatctgcacccccagcagcctggagggctgcagccttcaccccaacctcagcccccagctctcctctgcaccagccgcctccccacctcgcccctggctaggccagcgcccaagcccccacactcccctctctgagacagcaactgccgcccgcagcctcccatggggggtgtcgggcagcagggtggggcccccaggacaggcgtgaccctggctgaccaggggctgcccagccacactccccttacacctgcatccccagagtccacacagtgcagggcaagcgaggggctggggccctggccagggactccggggacctgagtcaagcgctttcgggtgtctttaacttagcagagcagccttggacggggacccggtggctcggagctgacatgcagctggtgggccgggcaggtcagctccgccgtcaggaagaccctctcgcctggccggccttctggaaaagtcgctccccagagggaaggccggcatgggctggggccagatggagggtgaggcggccctgagcacttgcacggcatggcggagccccccaccggtctggccacctcccctacctcccgggagcccccgctgtgtggcagacggttagaggggatggtcggtcacggtggggaacctactgccctgtgtctaccccagcctggcttcagccagctctgtcctcacaccaccgccggggagcatcctgactggcaggtcatgggtgggggtcaccgcagtgcaacctccgctcctgggggtgacacggggccgcccaccccccgcctgcactctcacagcttgctggtctgcataagcccgttggctgcggcgcggtgcgcgggtggcgtggcctcctgctgctgccggatcctgtctggacgcggctccgtggcgtcagcgtccttggcaccagagcccttgcggaggcacagaaccttctggaagctctggcggaagttgtcagagaggaagccgtagaggacggggttggcacagctgttggcgtaggagaggatgaccacgaagaagtagaggccggcggaggcgggctcctggggcagcgccacggccaggttgacgatgttgacggtgaagaagggcagccaacatcccgcaaacaccagcaccaccaccaacaccatgcgcgtcaccttccgctccgagcgccgccgcacgcagcccacgcgcacgcccgccgccctcaccttcaccacgatgagcaggtagcacaggcagatgaccagcagcggcgcgaagaagcccagcacggccgtgtagatgatgaagacggcgccccacagccccacgggctccggccagctggcgttgcaggtaccgccctcctgcacgtccgcgaacaccaggagcggcagcgacatgcacagagacaggacccaggccgcggcgctcgccagcttggccacacgcgggcggcgccagcgggccgagctcagcgggtgcaccactgccaggtagcggtccacgctcatgactgtcaggcagaagacactggtgaactggttgacgccgtccagcgtcatgaccaggcggcacaggacggggccgaagggccagaaggacgcggcgttctgcgtggccaggaaaggcagccccagcatgtacaggacgtcggccactgccaggttgagaatgtagatgttggtgacggtcttcatcttggcgaagcgcagcaccacgtagatgaccagcgtgttcccgcccagcccggccgcacacaccagcaggtacagcacgggcaccagcaccgcccgggcccctgccgagggcgccggccccaccagcgtcctgttgtcaccgcctccagaggcagcccccggggaggaggcgttccagctgggcgtggaggctgggaacaggggctccatggcggcagccctggggtgcgtcaggctctgcaagagaagaagggaggacgccagggtggtgagtccctgaaccagcacatgcaggcattccttcctcctgggccccagccccgcctgccaggaggcgcgggatcaccgggtaaacacgattagtcatgtttagcttggccgggaatcacgttaagcaaattgtttggaaaataagccaggagaggaaggagcggcgggcaggtggccccgggagcccagacggacggctgctgtcgatatggcgacagctgccctgtggccgcccctgcacccagatggcgcctggcctggccgcagcatcctggagtctgaggccagcacctgcgtctccctgaagcccctcagagcctgccctgcagtgctgctgccctcgtctaccaggtaaggagccgaggcccagcgggcggcccctcccgggacacacagggagaggtggcagtggagagagatggggccggtggtcggccccctgtccgcctgggatgaatggcacctggctaggacgacctgagaagtggctggacgtggtgtcgccaccgcagcctcgagggactttcaccggggtgcccgctgcccgttggccccgaacctctctccaggccagcgcagggaccgtcacccccacagcaatgacagacatctgtaaacccaggcgggggcacagcacagggccagagagacaccaccctccccacggggcggctgcagagaagcaaacacacaaaccacacagagtggtcacacggagccccaggagtcacacagggcgaaggaggggggactgcgggcgggggctgcacaccctgcagcccggaggagaagccgcggtggggggtgtgggcgggtcagaggcatagcgtatgggggctgcagccacctgacactgcccagtcccatcggagctttgagccccctcccaggccctggaaccccccactgtggcccagagagagaacaggggagacttgggggaggggagggaggggtgtccatggagaagggtgggctgggaatggtgacgtctgtgggtccaaggccatgggcacgtgtgtacctcgtatattgtttttgtatttttctgcatgtttgaaatcattcataaaaatgatactccggctgggtgcagtggctcaagcctgtcatcccagcactgtgggaggccgaggcgggtggatcacctgaggacaggagttcaagaccagcctgggcaacatggtgagacccccgtctctacaaaaaatacaaaaattagccaagtgtggtggcgggcgcctgtagtcccagccactgaggaggctgagtcaggaggatcatttgagcccaggaggttgaggctgcagtgagctgtgattacaccactgcacgccagcctgggtgactgagcaagaccctgtctcaaaaagaagatcaatgcctcccctgacgagtggggcggaggaagtccggatgtttgggttgaccctggagctgtgtgactctgggggtggccagcagagaatcaaagtgtcccctaggatccagaccagggacaagcccctccctgggggacctcggcctgagcaggggtggagccggctgtggtgacctcagcatgtgccgtctggagccctggggctgctcagctgaccggccctgaccctggaggcacctcagagcacaggacgaccccagcagctgccaggaaaggccacagtcctggctgggggctgtggggctgggccaaggccactgaaatctggtagacaaggaaaggagagctggggacgggggagcccagaacacaaggctgacagcacaaagagaaagccctctgtccccaacaaacctagaaatcaacatccccaagctcgcatggcccaaacacactaagaaatacgactcagaaaatcaacagggccagtggacccatggatccatctcagggagataaaaataacgagcaaacaggtacgcttaggctatgtttaaatatgtgcaggatccacagagacagcatggataaaatgttaggaaatacatttggcttctgtctaaggagtaaaatgaacaggcatctat

SEQ ID NO: 1243393 - DNA, 4001 bp, Homo sapiens
ctgcaggtgcccggtgtgccagggtcagcccagaagccacaggggacccagatggccccagtctgcccacagcaccgctcccggcctcacctccccacgacggggaccacagcggggctggcatacactgggcgctcaacgattgctcccacaagctgccctaagcagcccagcatttccccagcatccaggaggccgctgggctcctcggagaagggggcagtcttcacaggggcctgggaccagaggcggggcctcagcaccaagtcctccatgactgggtggaggtctagcctgcaccctgccaactccttccaggctaacccagcacgaggtcggggagtcggctccttcatggggggcagcgatgcggctgcagcttggaggggctgcggaacctgctgctcggggaggcagcggctcacacggccggggcccacgccgcaccctggagaggctgcagacccacccgggctcctccattgtgtgctgggcaggggcaaacgtcgggggacaccctagctaagactacaggccccagcccctccaaaggccccggagccaggcctgtgctcccaggacaagcgttctgacctgtttcctctgtcgtaagggtggcctggtggcaggccactgcccccttggggtccagctctgtgagtgcagccaatggcacccctgcctgtcccccacatacacgccacctgtccctgcggcagcctgtggccaggggcacataccctccccaggagagggaaactgaggcaggtgtgggccagcctggagcagcagcagcaggggtcccgcgtgctccgcgaacgcttctcggggcaccctccacaccaggcacctcctgacagcctcgctgggtcttgctctggaaatcaacgccaggcgcctgtccttggtgctgttgaccagtttctgcccaggaggctctggcagtccccacctacatagtccagaatcactgccttcagaaagggctcagcctcactggaaccatccccaacttctgtcaccatgcactccgctctcttgcccttgagggggccccaggcaggctggcaggctggggacagcgggtcgggcacgtgggtgggtctggggtgggggaggagggccaagggcacacaccccagtggcgtgttctctattctggagagggtgaagacgccaggaggattccaggtacacgcggtgccttggacaggagggggctctgttcgcagcgggcggggtggcaccccagcctccccagtcttgggtttcagggaacccatctgtgagtgccaggtcacagggcccctgggtgctggcctctgcctgctgccttccaggagctcaccgacccagctgcgcgcaggcaccagttgcctcccccggcacccaaattgcggatcctcccctcgctgggtgccacgggcaccctgggaccctccttccgtggcccagtggttccctgtggcctgagtgccacttccggcccccagccccaggctccgagccctccccagccttacccaccctcctccagctccaggagccagccccgctgtggcccccgtcgtggggaggagaggccgggagcggcgcggtgggcagagtggggccatctgggtcccctgtggcttctgggctgaccctggcacacggggtgcctgcagatggtgagttgtggggtgggggcaggagatgggagggatggagctgctgggagtggatggaacgggaggggagggacccccggcggcggcaggagagccccgcgggtgtgcggagggcgcgtgggggacagtgcgtgcagcgggctgggggcgcacggcgggaccccgggccggggctgcgcacacagggtgaaacccccagtggggataacagccgagggcagggggtgcccgcgcgggagggggacaggggcgggcggcactcacctgggcggcggcgccctctgaacgggggagccccgatgtccgcgcggcactggctccgggctcccgggcgccggctgggagggggcggggcggggcgggggcggggcagtgcctggtgggggcggggcagggccgcttcacctgctcgactcccgggtcccacgtctggcctccgggaaccctggcgcactcgcccacagccctggtcccactggcagtgaccccatgatcgcctgcgcccccaccctattttcttgctgtccgctctgtggtagaccccagcttggggtgggggtcctgccgccagcaggagtccagggggtccctcgtcgagagtctgaagagggtggagggtccttgttcaaggggagagggtcaggggctctgcagacgtctctgaggggtgggctggggttgtggagataagtgggtgtgtggaggctggtgggggcggcaggcagccccagcgaggggggtccgtggtcgtgggatttccaggacactccactcgggttttatccatgccttatttgtggatcctacacatatttaagcatagactacctgctaagttgttctttttatttcccctgaaatgaatccatgggtacaccttagtccctcacctaaggtggggttctcaggcaggcagcagagtcacctgggtcctcaaagcagattcctgggcctcgagctgggcccccgactccccaggcagtgagggcctgggaatctgcattcctgagaagctcccgggatgctgatccccgggcccgccgtgagcgccgctggttgtaagaagcgggaccgagcgcctcctcccgctgagcgcggaggctggggatcaccggacattttcccaccaggaggtcccccagccccctcccctgactctgtgccgacccagggagccccgccactggctgaatgaagtgaggcgcccccaggtgacagcagaactcggagggcccctctctgaggggacatgggagcagccgcctgccgtctgttcacaggtggggtcggctcctgttgaacaggcgccagcagctcccttgaaggccgggtaccgggaccatgttctctcctttaagcgtttcagtgtttccacatgttctgcaagcagcgcgtgttatgtttaccatcgagcaagagtgcttagaggaccatggcacctggccccaaggtcccctcccctcctccccagcctgcggccatggccaggccctcaggggaggctgcaggctggtcccaggtcccctgcccagaatccgccccataagcctttccatcctctctggaggtacctgggctgtatccctcccaccctcccacagcagtggcttcccaaggcagatcctctgagaaccccctttgtgacccctaacgcctcccccatctccatctgctgcccctcccctcagcctctgcccaccatcctcatggttctcgcctcagcccctggctgtgttcctccagctcccactgcctcgcacctgggcccccatctgtcatgttctggggctccctgagaagcctctggggtcccactgttctggaatcactgggtgccccaggggtgcagggtccggtgtgcgagtcacggcccagcgcccagtgggagctcagccctgcgggtgggtgggcgctggatctactcacatccccaacatcaagctgggacaccccccacctccaagcacctgggccctcctgggggcctgatggccagagaggggacctgtcggccccacagtgcccctccccacatcggccaccctgagttctgggcaggagtcccctggcctcagtcccacccaccccaggaggatcaaatgaggtcatgcccgcctgggacgctgcagaggtcaaacccagcaccgtgaggattaggggctgccagtagccatggcaaccgatggtggctggatggactccgcagggacggtcctcagacccctctccagggaccccaccctaactgtgacctgtcccacggcccgtgacaccccctctcctgaggctgaggacagcagctcccggacacaaagcccgtgcccctccccc

SEQ ID NO: 1243394 - DNA, 4001 bp, Homo sapiens
gtggctctcagaagcttggctttatctgggatttgcactccaaaagttcccaggagccatcagcgtgccacagcacatcacaacaatgcgctcccaggcagggtcactcccacaggcccctgccagacttgcaagcaagggtgcagaggcagacataaacacccacacagacagttggccccctggcctcccttcctccattctcaagttacaaggttaaaagcatccaattcacagccaagggggagggctgggaagggggttgctgaagcagtgaaccatctggttcagatcaagattgctccttcaggaacccacataactcctagagcctcctgtccctcctttcctccacccaacccactgggaaactggggattggggtagaatggatgactatccccctctgccccccccgcaaaaaaaaaaaaatctgaagaggacaaaacaaaaaacctgaataatacaggcaaatctgtgccacctctctgagccctcgttccctctaaatcctgagtcccacgactaaacttgagatcaccgcccacatactctgtgccttcctccacagagagatcagggcagccagcaggcatccctccctgaaagggcaacccctccaaagttagcagcagaagcaagatgaagcttaggggtgtggtctcccagactcctcttatgccaccatctctctaaaaaccagcgataccttccacctgagaagggcttcagagcccaccaggcaaggaaggggtggccaaccagcttccaaacatccgtcccaaagacgaggcgggagtgtgttactggccagaggtcccagagtgccctgtactcccccggaggctttgactgaaaagaggccccaggtccctgcctgcccccagcacctctctagcccctttctccaacaccacctttgactcaatcctccgctcctttacgcagctgtaaagcaagagggaagatgggagacgggagatggatgcagttggcaaaagataaatcgaaaggctaacttgagcaagcaagcaattggtgctgactcctctacaggcagagggaacccggagtgggttatgcgaaggagggaaggccaacaggagcggcaggaagctaaggggagactcaagtgagctcagcccagagctgtagcagggggtgggaagtttggtccagtcacaggggaatgactgggggtaagaaatgacttccattccaaggcagagaaggaacaggagagaggagagacgaggttcagaccagcctccacgggactggcgctttggccaagtttctggcttcagccgtgcctcagtttccccaaagtaggaaggtcgagccgtgagaactgggccactgaggatggttagggggcagtgccaggtaggggaaagatcacaggggagagaggaaagaggagctgatggggcagacaggctctggccaagagtggggccggggtctcccaggtggagcagaggccgggagacccagggttagcggtacgaactagggagtggactggaagtcgggaccagggcagagagctcttccgagggctggggctggggctggggttggggttgggggctgccggcaaaggagcggagcgggagccctgggaggctgggagcggctggacgtgcaaagcagaaggcggggatccggaatgaggccaacgcgcgcggacccccgcccacacgagggagcccggcgccccgacccgggggaagttgccgggctggaacgggccggtctgggccgctgggccgcgccagctgcccgcgcaggggaggtctgggcagccgggggcccggggcgctctgcatcccgcccgccctcatcccacccgcgcacctcagtcagcgcccggcgccgcgcgggccatgctcgccgctccggccgccgccgccgcccgcgcagaaagccgtcgccgccgccgccgccgccgccgccgtcgtccggacccgttagctcgcagctctctcgtccgcccgccgtgggctagtcccgcccttgcctggcccaaccctccccgagcgccgccgccgccgccgcctcagcccggcccctccccccacccctgcccggcttgaagggaagggtgggggacaggggcgactgcccccaccccattcacatcctccccgtctctccctccctccgccccccgcacgcgcgccggcatgctgggatatggagtccagcgggcgctgggtcgctaggggcgccccgcatccaggactacatctcccagaagacagcgcgcgcatcccagggattgtgggctttgtagtttcgctagggctcagggggtccgccgtgcaggaggggagacggagggggatgggaagtcttcattctcagaaggccgggctccagcggctggagcagacggccccgagccgggttggatacgtgggttcctagggaggtgcacactagccgaggacgcctctcagatgctgctgtggccagctgctgacgagcccggccggagggcactgttcccactcgcgctctcaaagagccgcgacctgaggccagcttggcttcacgcccgggctctgaaagcccgagctgcggtggggccgctgcgccctggcctgaggggagagagaccccatcagcggtgcgagcgggggtttggcctcgctggactttgtgttccccacctaggaaaagaggaaaagggggcagagtgtctattggttcctcatccaccggggcatctcccccttgcaggctctctcttagatgcccgtagcttcctgctgttgagggtaaagtgaatgcattttaaatatttgccatgtcttttattagcccatcctttccctaacttccgcacctatttcaaaacctttatgaaactccaggtagactgcagtttcgccctccaacaggctgaagtgaggctgaagtggttctgaatttttggtgtgtatgggatcctcttggccagcttgtttaaacgcagattgctgcccccaccctcagcttctggttcttttagctctagggcaggccccagaattggcattgctaccccgtctccaggtgttgctcatgctgccggttactaccttgataacctgataacctctgctgttggtgtttgctgctaacacaccggtatcctctttcaaggatggcccttgtgtgggataattaataatggccctgaagagccaaacccggaaaggcagggtcccagtctagtcccctttagcacaggaacgctctttgtttttgctcaaggtctcactgtcgcccaggctggagtgcagtgatgtcatcacgaccccagcactttgggaggctgaggcaggtggatcacatgaggccaggagttaagaccagcctgaccaacatggcaaaaccctgtctctaccaaaaatgcaaaaattagctgggtgtggtagtgcgtgcctgtaatcccagctacttgggaggctgaggcacgagaattgcttgaatctgggagttggaggttacagtgagctgagatcatgccattgcactccagcctgggcaacagagtgagactctgtcttaaacaaaaaagggccaggcgtggtggctcacacctgtaatcccagcactttgggaggctgaggcaggtggatcatgaggtcaggagttcaagaccagcctggccaagatggtgaaactccgtctctactaaaaatataaaaattagccgggcatggtggcaggcgcctgtaatcccagctactcaggaggctgaggcaggagaatcacttgaatccggggggatggaggtttcagtgagccaacgtcgcgccactgcactccagcctggccggcagagcaagactccgtctcaaaaacaaacaaacaaacaaacaaacaaacaaaacaccggcagactctcaacacaagtgattttacccaccctcctccctccacattaaaaggcttctacagaggcgggtcacagtggctcacgcctgtaatcgcagcactttaggagg

SEQ ID NO: 1243395 - DNA, 4001 bp, Homo sapiens
ctgccagccatcggcagcaagcgacacacactcaccttcctcttctcatccacctgagaaaaaagctcgtccatgtccgccatgtacttgtcctgtgaagagttgagtgctgtgcttgggggagacaccccacctccctcctccatggggcacagacccaacacaaggcggggatgctcccacgccacgtgcacacacacagacccacatgtgggtggggggcaccctcacgtgcttggcctcaatgcaggcctgctgggcccggacgtggctgtcgtcctcatcaccctcgtggtttcgctggcactcttccagctccctgggggttgaccaggagccggtcagagatggacctggccagatgtctgaccacaccccaatctcagagctaacatccacacttccccacatttcctgcttgccagtaaagccttcgataaacgcttgtgtcgggagtcggtgattcagaattatcccaagacagggcggcctggggtgagggtcccacctctcacgctccgcggcaatgagcctggagaggtaggagtgcagctcgctctcctggtggatgcgccgctcctcaatgctgttccagcgcttcttcttcgcgattcgaagagcgctggggatgtcgtccccgaagttcagccgctgctccttggccaggctgtaagctggggaacgggggcttcacgtcactctctggccagtccacccgcctggccccagaggccccacaaccgggcagcttgtcagccaacctcgctgcagattggcgatggcctcatcatagctctccatctccagctggcactgccccaggaagaagtgcgccttcacagactgcccgtccagctccagggcgcgccggcagtcggccagggcctgctcgtgctgctgcatcttcaggtagcacaaggcccggttggtgtaatacacggccaccagcgggttccgggtctagggaccaaggccgggccagccgcatgagggcgtaggctcagcgtgcccactctgacccacggcccgtcccagcttctgcgctctggctagaatcaagaaactaggtttctcagttgtcaaagcccctgggtccaaggatctgtgcacagtggagtactggctgagcctatccgcttgattccacttggttttgtaaagttttccaaatctttggagagtccgggcttaggacctggggtcctcaagggtcgagggcccctgccctccccccacccggccggcctccatccagcatcgcaccctcgttctccggcacccggcgctgggctcgagaaccacggctgggctttgggagccgaggacacgccccgaagaggagccagaccctcggtggggccggccgggcccgggcccggccctccccggtgccaccgccgccgccctccccgcgcgggcgcactcacgatcgcgcggccgtagcaggccgccgcctccgggtactttcggcccacgaacagacgattgccctgctccttgagctcctgcgcgctcgggctcttctcggggcttccgccgccagcgcccagccgtgcgccgccctccttctcctccttgcccttcatggcgccgcgcggcacggcctgggctccgctcccaagctccgcgcctcgcggcccagcgcccgcagccggagccccgcagcccgagcccgcgatccgctcgggcccggcccagctccgccgccggaacttccggccgggggcgggaccagcggggacgcacgcgtgggggcgagtggggccgcgcgtgcgcccaaccagcctggacggggacactgggcccgcgacgtcgggggctgggaggaacgctccagttccctgtccccgcgctcttaagggtgggcgttcgcgtaggccctggcctgccctgctgaggtctcttcggaacccgcctcggcggcggccgccacacacattcgactttcccagtgagatgcctcacttgcttcgctgagggcgcgctcccgcaacagcctgtcccgaccacctggggttccgcccctgtcccaacgcgcagagacccctcccccggcagccggccccatccagaggccccgcccccagcagccggccccatccgcagaggccccgcccccagcagccgcccaatccagaggccccgcccccagccgccggccccatcagcagaggccccgcccccagccccatccgcagaggccccgcccccagcaaccgcccaatccagaggccccgcccccagcacccggccccatcagcagaggccccgcccccagccgccgcctcccgcccctgcgcgtgaacgtagcggcttcccacgcgctgtggggtgtgaggaccccagtcgctgggctgccattctggagcgccacgagaggtgctacgggcgagcgcgagcccccgagggcggctggaagccccggactgttggtagagtggaaggggatagagatcggtggggcgagcgtcctccgtggccagtcctcccctcaccgcccttcctcaggtatcgggaagagttgccagcggccatcaggggcagagcagagaagcatgtgacagggagctggagcggctgctggcctggcagcttgactgtgaagggcggcccgccccgagggcagggcctccgtagcgcgggtcttcattggggcgtggcatcggcggggcgggtgtctccagtgggggcggggcctccctggtgggtccagcaccccaggcaccctgacctggcctcccacagaggggcgcttccggccacgtctgcagcagctggtggccaccaatccccctgagctggttgtgcactgttcgaccgccaccttctgcctcctgccagatgtgggggctgcagtcaccgagctgtgtgccctctgcggtgtgggcccaccacagcctcgggtgagttgggtgggcacgacttgggtacataggcgttcttgtctgtgaagcgggcagtctgggcccttgcgtgtcgctaggagcaggaaccatagggccctgggctgctgggagcagggtctcccagagcttgtcctgatggggtgtgtctggctgcttctcctcgctgttcacagcagtcctggcagctggagctccagagatggaggccttcatgtcagatgaggcggtggccacagtgcccggctggccggccccacagtacaccctcaggtactacctgctgtacctgggccaggttcaagagcgggccacagctctgagccaaggggaatgaactgtgtgtgggcaggttggggtggcccgtgcccctgggcctgagtccgtgtgcccctccctagccagtgcctcaggacagtggactccctacctagtggagacagcactgtggacctgggctgtggggcagaggctgtgcccagacctgctgcccaaccttggccccagcctggccacccacgaggatgctaggccagccaagaagcatggaacccaggccgagtaaacttggccatggcccaggcctgctcacctgccacagaacctcaggcctccgggtctcactggacggcagggaggctgaagaggaggctggccactacgggagctcaataaacacttcccaaactcacgcctgatcacacacccggcctgaccacacacctggcctgaccacacgcccggcccccagccatcccgcgtgcccccagctcccacagacacagcacctgtggcccaggaacaactcccacgcctgaccccaggtgcagagatgcacaaggagggaagtccaggcccccgtggtggggagggccgtcgcggtctgtgcagcaggtgtgggggccctgacgagtctccagagcccgggacagccccctggtgctgtgtaaaatatttattaattatccaaaaaggctcagaccgcaagtcctgggagtggggggtgggtggctgggacagggcctcctttgaggccacccacacccaaggggcacagcagccctgagacgtccgttcacaaagggcagacgtgaaggc

SEQ ID NO: 1243396 - DNA, 4001 bp, Homo sapiens
ggagtcatggaatagtcctggtagcaggggaactgggttcaagtccggatccctcacctgctagctgtgtgacctttggaaagttattcaaccactctgggcctcagtttccccaactctaaaatgaaagagcctccccgtccacttgccaggaggtcagtggggctctaatgacatcacggatgaaagcctgctctgcaaactgaggaggggaattgacagcaccgatgctgaagccggcctgcctgggtttgaatcctgcctttaccagctgtgtgactttggtctaattacttaacctctctgagcttagtgtccttatctataaaatgagataacatatatctatatatctaaaaagatatttatatatctatgaaatgagataaccagtctcataggattgctgtgaggatcaaaatgagtgaatatgcataaaacacttcaaacaatgtttattattactgtcactttcctcatgcctgagtgtatattcagtaaaaatgtaataaagaaacctttaaaattccctccctcagccaccagctcctccttgcttcccatttggcaacctgtctgtccccagagacagcggtcacttgcctccaaacaccttcttctcgtctgtctgtaacctgggtccccacccccaaatccaggggacagctcttcacccccagtgctgaaacttctgtttcaaaggccagaaaagcagagacctgtgtcaacctagcagacaggaaacccagattgcagtctgccccccacccacttgcttggtgaccttggacaagtcccttcccacgcctgaatctcagtttcctcatctgtcaagtggggtaataacccctggggtaacaacccaccagttccctgtaaaggctcagtgcattgggcagctcagccggggccggtacccttattaacataacaccaccagcccagcacagtgcggactgtcagtgctgcctcctcgggccccaggtcatttctccaaataccccagcgtcctccctgcccctgaaaccattctcatcgaaccccactccccagttcctccaggtagcagcctccactgcagtccttcccctgtccccccaaaaccagggactgcctggccagactcttggagccgggcctcttcaggcctgcagacctggggcctgcatcagcccttgactgcccggggtgccccagttcccccaagcagagcacggcccgtgttccatggccctctcctctgcatccccatctcccacctctgggtcaccctgtctcaggccctggccctctggctctctccggaggccacctcttccctccctgtctcggagagatgccccctccctatagggagtgacacacgcgtgtgcacacacacacacacttcattcactgccaggtgctggcatctcagtcccaacctgtgtccttccccgtagcatcccctgaatctgggtcctgctagactctcagcctggcccagtcaccgcccccatgcttctctttggcaaacctgcccaggggatgacagtctcctccggtttctcctgatatccactctctcccatccccagaccagaccccggggccctcctgggaatgcggggtgttcgaggcccctgagacctctcctgcccccttgtgtcttcatggcctccaaccccttccaggcactgtccccaaaatgcaggttcactggagagacatcaggcgcctgaagatactggggtgctccggctaccaacctccgatctcatccttcgcccccacgtcccagcacctcccccactccatccccacgcgctcccccaatattggggtcccgcccccccattctccccacccccaagctcacactccgcagctcttgagtccgatccttcatcctgcgacggctcctcctcctcctcctagtcctcctgcctctgctgctgctccgggtctcccgcctctgtgccggaggccggggtctgggggcgccggggggcgccgcggccgctgcggggggcctgcgggcgggggcggggccgggggcgactggccgagggccgggcaggggcaggggcctgggccgggctcggctctgccgggctgcggtggcgatgcggctgcggcacagggtaggatggagggatgcgggagccgagcgcgggggaggggggcggagggaggtgaggaggaagcgagggcggggggagcgggagcgcgcaaggagcagggggcatgcgcagcacccgggccgggggcgcctgggggttgtagtcacgggcttgggggacacccgaggagggggcgggagaggcctggaggcgggtgggggtgggcagagcccgaggagcagggagagatgcggagagccaagcggagatgctagggtggcccggggggtggggtggcccggcggaaagagggggtgacggaatgaattcagggaataacctgggagccaggatgtggatccctttccaggagacacagatcgcggctgtgttttgtgtctggtgtctgcgtgaggctgcgcgccgaccacctctgggtgcgagcccatgtgtgttcttgcaggaggctctttggacactataaatagaaagaccgaccctctgtgtggtttttacgatgcagggaaccagccaggtgcttgctgagaaggacacggggcttgtgttgcacagcctgggcctctcccgccgcggtgggtctcggagctctgcttgtctgcctccagggacagggtgctcactacctcccaggacctcttggcccatctgcagatggctctgactgttgaacatgaaatttgtccttagtgggaggggaaatcaggtgcccctgagggtctgagtgacctcctgttctgatgcccacctctcctctccccatccttacaccacaccagctcctcccaccccctgcaatggggcgccggtccccaatgggacaggtcttgactctcaatcgatcctcctgcctcagcctcccaaagtgctgggattccatgcctgggccaccgcacccggcattctcttgccaggtacccagtgacctccttggtgccaaatctgtgtctgataaaccctcatcccacaccgccagtcgggccttaccatccctgacctctcagcagcatgtgaccctgatgagcccctcttcctgaaaccctcctgtctgtggtgctccgcccacctaccccccaacctgatctgtgagtgttgtctcccagcctctttccaggtccttaccttttttcccacagcccttcaacctcagggttccctgggctccgtccattctctctttttttttttttttgagttagggtctcattctgttgcccaggctagagtacagtggtgcaatctcggctcactgcagcctcaacgtcccaggctcaagtgatcctcccacctcagcctcctgagtagctgggactacaggcacgcgccaccacacctggctaattttattttttgtagagacagggtctcactatgttgtccaggctggttttgaactcctagggtcaagcgatcctcctgcctcagcctcccaaagtgctgagattacaggcctgggccaccatgcctggcattctcttccttctttacctgcatctttctgcacctccgtgtctgcagtgcccacatctgtacctgcgagccagatcctccccctgtaagacagcccctactatatgcctaagctctgagctgggcaccaagaagacagagattgaagatgccaccagagccatgagtagatccatgactacagtgggcatggctagcgctgacgtggggacctcaaggaggtggctgtccccaaagtgttccttcctgtgttctccctcagagatggcgtcatctccatccacccagccactcaaagcacagaaagctgtccttgcctccccgccattataatgccagcacgttctgggcatccaacgtgttgcattcactatgctggtagctcccagaaacctcccaacctcacagtag

SEQ ID NO: 1243397 - DNA, 4001 bp, Homo sapiens
actttgggaggccgaggcaggagggtcacctgaggtcaggagttcgaaaccagcctggccaacatggtgaagcccagtctctactaaaactacaaaaattagctgggcatgggggtgtccgcctgtaatcccagctattcaggaggctgaggcaaaaaaagaaaagaaaacatgtgtcccacagccaagactaggtcttgtctggggtcacagtaacttcctattgaatggaagaaaataaagcagggtgttataaccggactgagcatcaggagacctggcttcctgaccttgagcaagttctttctctctctgagctcagtttccccatttggaaaagtcatccaattggactccatgatctctgcaggcccttccttcatacacctgtcatctaatacttcatgaaacatttgctgaaatgtcctcatttctgagaaaaaaaacccacctgggtttttctcattcttgtgttgacggagttatagttctcatcagcttcctccttctggggctctatggctgtgggaagacacaggggtattgggggtacttgtctccataggatttttagggaaatataatttatcataaaatgactaaggctgagcctctaagaggagaaagtaagtttatttttctttgcattacatcactgagttcccataggtatgcagaggccacctaacaaaactccatctccctgcccaaagaatgcccagtgggcagcgataactgtgtaagtaaatggtttcattgtaaataaaagaacctgagaggcggacttgtgctgtggagagtacaatggcctggaggccaggagacagatgctagacccaggcctgctgtgtgacctggatatatcactggcttctctgggccacacactccccagatataccaacaacagggcaggatcagagggaaggatctgtctgaggtcccaggagctcacccttcagctgcaggcggatctccctccccagctgtttgatctcatcgcgcaggttctgcagctcctgcttcatgcctgaataagagaaggccaagactcccaaacagcagcccccacctcaacaaaccactctggccaccacctgcgtggaactacaacccccacaatccctggggcggagcatgcgccctgcagccggggtttcactcactctcctcgggaaggggcgtggccaggatggtgacctgctgtttctccaactcctggactttattccccagtttgacaatagtctgccgaattgtccggacctggggagggtgaccgagagggctgaaagagatatggggtactccagaccacgctactcctcgggtcctcctacaccctcgcgaatccaggcggagaccccagccccttaccttgtggaagaactcctcgtccgggctccccagccgtgccgtgcccgggtgcaccaccagcgcgacccgctccttgtcctcttcgtccgagctgtcatccccctgccaggcccggagtcattggcaccaccgtttcgctgcggctcttaccccgcaggacccacaggcttccgggactttccttcctggccatcagccacccctccctatcccgaagaccagaagtcctgcgttccagttcgtccgcccgtccccatccccgctgccctggcgtctcacctgtctcagctcgtgggtcctgtcccgcatggcggcctgagctctccctccccggcgccagagccgggaggccctcaaatttggaattcccgtaccccgctcacactctgacactcccctccctccccctgcggaccccaacacccccacgagccgccagaggctccgtcccttgcaccgcccacagtcaatgggaaggcgccgaccccggggaccccccaaggttccacaggttggaattcccttttcttccccgctccagctcccgcagcctcagccccgcccctccgtgataaattcggggcatgcgcacatggtcgcgtctcttccttgcccgaggctgggaaggtggagtcggaagttgttgcgccccgagcggaagcggagatgcctggacgcgagaacttgctaccgtcaccggaaccgttgcatcttccaacggaaatctggttgccaaaaggggtaggaatacgtcatttgtacgtaatccgagacacccgcatctcacatcaccccatggtgcccccaccgcgtcacgtgaccagcccggtcccaaactcgtggaccgcagaatgtgaccctgtgactgtcacgtgtcccggctctgtcaccgccgtctctgggacgccgttctcatcacgacgtccccggcaccccaacgaccgagcgacgcccacacggcccccgcgaggtggggaggggcgcgccgaccacccccagaggcctttcgaggcagtgggtggtaggacccttgctgacctcgcctttattgctttcgggtccagggcgtgggcggactgacgacttagcatttggggctgtcagcatcatgggaccttgaaaatcgggaaataataggatccgagtcgtcagcgtcagaaaattgcagggttgtgtgggcagggaatctgggggtgggaagtgacctcagccaaggcagaaatctcttcttccgcatccttctggcgcagcctctgacaggtgggcggccagccggcgccctccttgaacactgcagcccggctgcactcaccaccttgtgagccgtcagaccatgtcagggcagctcaggctaagaaaagtgtttgtattgatcacgctgcctccctgccactcacaccccccagcccctgccttgcatctgaggccaggtaatgactttgttcttaactgaatctggggagttcctagcccagtaccaagaacattacgggccctctataaatacttgtggacagaatttcaggctttcatgtatctgaggataaagcccctggttccttggtcttctttaggcttcaggctttctgactgtgacacttctctaatcctggctatctagatattcactcattttttatttttaaaaatttttacgagatgcggtctcactatgttgtccaagctggtctctaactcctgggcttaagcaatccttctgcctcagcttcccaaagtgctgggattacaggcatgcaccaccatgcacagcaacattcagtcatttaatggatattttttgggcacatagtatgggccaaacactgttctagggctggagatacatcaaggactaatagacaaaaattcctgcactcgtggaacttatattctctagaaggagtccccaaggtcactcagcaagtctcagcatagccgggaatgaataacaggtctcctggaccccagggctctgtccaggaagcttctgtgaaggtacaagcaaggaaaggaatggaccctttctgctatgccctggtcaggaaacctagattcctgggactgagttgctatggacttctggaaatcgcttcctgtctctaagtgtggatctccctctgcacagtgggtaactgtagggggatggggagatcatctttatgggtatcggctgctctaaacttcagtgatgatgaggttggaaactgtcaagtgctgtgtgattctatgtgaggagttttggctcttctcctcttcctgttaaaacccagctcaggcagggtgtggtggctcatgcctgtaatcccagcactttgggaggctgaggcaggcagatcacctgaggccaggagttggagaccagcctggccaacatggcgaaaccctgtctctacaaacatacaaaaattagccaggcatgatggcaggtgcctgtaatcccagctacttgggaggctgagacaggaggattgcttgaacatgggaggtggaggttacagtgagctgagatcacgccattgcactccagcctaggtgacagagtaagactctgtctcaaaaacaaaacaaaacaaaaaaaaaaaacccagctagtaggagagtggtgccctgatgaacccacagag

SEQ ID NO: 1243398 - DNA, 4001 bp, Homo sapiens
aatacttcatgaaacatttgctgaaatgtcctcatttctgagaaaaaaaacccacctgggtttttctcattcttgtgttgacggagttatagttctcatcagcttcctccttctggggctctatggctgtgggaagacacaggggtattgggggtacttgtctccataggatttttagggaaatataatttatcataaaatgactaaggctgagcctctaagaggagaaagtaagtttatttttctttgcattacatcactgagttcccataggtatgcagaggccacctaacaaaactccatctccctgcccaaagaatgcccagtgggcagcgataactgtgtaagtaaatggtttcattgtaaataaaagaacctgagaggcggacttgtgctgtggagagtacaatggcctggaggccaggagacagatgctagacccaggcctgctgtgtgacctggatatatcactggcttctctgggccacacactccccagatataccaacaacagggcaggatcagagggaaggatctgtctgaggtcccaggagctcacccttcagctgcaggcggatctccctccccagctgtttgatctcatcgcgcaggttctgcagctcctgcttcatgcctgaataagagaaggccaagactcccaaacagcagcccccacctcaacaaaccactctggccaccacctgcgtggaactacaacccccacaatccctggggcggagcatgcgccctgcagccggggtttcactcactctcctcgggaaggggcgtggccaggatggtgacctgctgtttctccaactcctggactttattccccagtttgacaatagtctgccgaattgtccggacctggggagggtgaccgagagggctgaaagagatatggggtactccagaccacgctactcctcgggtcctcctacaccctcgcgaatccaggcggagaccccagccccttaccttgtggaagaactcctcgtccgggctccccagccgtgccgtgcccgggtgcaccaccagcgcgacccgctccttgtcctcttcgtccgagctgtcatccccctgccaggcccggagtcattggcaccaccgtttcgctgcggctcttaccccgcaggacccacaggcttccgggactttccttcctggccatcagccacccctccctatcccgaagaccagaagtcctgcgttccagttcgtccgcccgtccccatccccgctgccctggcgtctcacctgtctcagctcgtgggtcctgtcccgcatggcggcctgagctctccctccccggcgccagagccgggaggccctcaaatttggaattcccgtaccccgctcacactctgacactcccctccctccccctgcggaccccaacacccccacgagccgccagaggctccgtcccttgcaccgcccacagtcaatgggaaggcgccgaccccggggaccccccaaggttccacaggttggaattcccttttcttccccgctccagctcccgcagcctcagccccgcccctccgtgataaattcggggcatgcgcacatggtcgcgtctcttccttgcccgaggctgggaaggtggagtcggaagttgttgcgccccgagcggaagcggagatgcctggacgcgagaacttgctaccgtcaccggaaccgttgcatcttccaacggaaatctggttgccaaaaggggtaggaatacgtcatttgtacgtaatccgagacacccgcatctcacatcaccccatggtgcccccaccgcgtcacgtgaccagcccggtcccaaactcgtggaccgcagaatgtgaccctgtgactgtcacgtgtcccggctctgtcaccgccgtctctgggacgccgttctcatcacgacgtccccggcaccccaacgaccgagcgacgcccacacggcccccgcgaggtggggaggggcgcgccgaccacccccagaggcctttcgaggcagtgggtggtaggacccttgctgacctcgcctttattgctttcgggtccagggcgtgggcggactgacgacttagcatttggggctgtcagcatcatgggaccttgaaaatcgggaaataataggatccgagtcgtcagcgtcagaaaattgcagggttgtgtgggcagggaatctgggggtgggaagtgacctcagccaaggcagaaatctcttcttccgcatccttctggcgcagcctctgacaggtgggcggccagccggcgccctccttgaacactgcagcccggctgcactcaccaccttgtgagccgtcagaccatgtcagggcagctcaggctaagaaaagtgtttgtattgatcacgctgcctccctgccactcacaccccccagcccctgccttgcatctgaggccaggtaatgactttgttcttaactgaatctggggagttcctagcccagtaccaagaacattacgggccctctataaatacttgtggacagaatttcaggctttcatgtatctgaggataaagcccctggttccttggtcttctttaggcttcaggctttctgactgtgacacttctctaatcctggctatctagatattcactcattttttatttttaaaaatttttacgagatgcggtctcactatgttgtccaagctggtctctaactcctgggcttaagcaatccttctgcctcagcttcccaaagtgctgggattacaggcatgcaccaccatgcacagcaacattcagtcatttaatggatattttttgggcacatagtatgggccaaacactgttctagggctggagatacatcaaggactaatagacaaaaattcctgcactcgtggaacttatattctctagaaggagtccccaaggtcactcagcaagtctcagcatagccgggaatgaataacaggtctcctggaccccagggctctgtccaggaagcttctgtgaaggtacaagcaaggaaaggaatggaccctttctgctatgccctggtcaggaaacctagattcctgggactgagttgctatggacttctggaaatcgcttcctgtctctaagtgtggatctccctctgcacagtgggtaactgtagggggatggggagatcatctttatgggtatcggctgctctaaacttcagtgatgatgaggttggaaactgtcaagtgctgtgtgattctatgtgaggagttttggctcttctcctcttcctgttaaaacccagctcaggcagggtgtggtggctcatgcctgtaatcccagcactttgggaggctgaggcaggcagatcacctgaggccaggagttggagaccagcctggccaacatggcgaaaccctgtctctacaaacatacaaaaattagccaggcatgatggcaggtgcctgtaatcccagctacttgggaggctgagacaggaggattgcttgaacatgggaggtggaggttacagtgagctgagatcacgccattgcactccagcctaggtgacagagtaagactctgtctcaaaaacaaaacaaaacaaaaaaaaaaaacccagctagtaggagagtggtgccctgatgaacccacagagggaatgcagggtttttccggaggccaagccctgcccagtggtgtcccctggagatgataaggaaagattctctgctcctgggtctttcatgtcagcctctgcctcttcagtcactgctgcttgcctcctgcatcttttgtcccctgccacccgacccccttccccctcctactctgtgtctctgagtggcacacggtggaagggctcttggacccctgactcatagtcctgcatgggatcttaaataatgcattacttctctctgggactcaatttccccatttggcggcttggtcctataatttctgccttgcctaaggtaggacttgaacactatcaagtgaggttaggaaggatgtggaaggggctggaaaactgttgagggtaccctcccct

SEQ ID NO: 1243399 - DNA, 4001 bp, Homo sapiens
ggtgggatctctggctcaccacaacctccttctcccgggttcaagtgattctcctgtctcaggcttcggagtagctgggattacaggcacccgccaccacacccggctaattttgtatttttagtagagacaaggttcttctatgttgctcagggtgctctcaaactcccaacctcaggtgatctgcctgcctcagcctcccaaagtgctgggattatggatgtgaaacactgtgccctgcctcaccttgaccttctgatccaacagagtctgggggagcagagccaggggcaggtgtgtcttcaggagtcgtggggccggtgtgtctttcagagtctccatccctgagcagtgggtcagggaaggtctggtgagctgaagccccagccctgtcttcctccactccccttgcacccaggacacactcacacacctgagggaatccctggggctttgaactcaaggaagggcacccgcatgaagatgggagctcggtgacacttctccaggtcaccaccctggtagatcatgtccagaatctggcttacccaggtagtgcctggagagggagggagatgggaggtgagcaggctgagggcacgacctcgctggccaaggtggggactgccacctgggagagggtgggtggccctcctcacttaccggacttggggtaggtgctgatgagcaggtcatcaggccgggcctggaagctctgcaggggccccagtgcctctgcaaagtacttgatgagcgggacccccttcacgtactccagtggcgggcgggaggtgtcctggatcagctccatgttcctgcgtcaggggccagagccaggcccgttcccttaccaccatcacaacagcaagaaagtggaattcttgctttcagggaagtcactgaggcctagggaggctgagtgacttgcccgcactcacaaagccactcagtggcggggctggggctgaaaaccaggtcgggctctaatgcggtggttccccagcctggcctcacctttcattcacctgcggagctgttcaaaatcccagggcctgggccatggtgcagaccagtgaaagcaccctcgtcgggcaaggcccagatgtcagggtgtgtgaaggtctccaggagagtccagctgcactgaggaagctctaggaccttcctgtgctgtctccctgccagccagcgccctttgtctcaccacttcctgctgggacccccagcctccacccagtggagatgctcccctccttgagcccctcagcccctcacatgtggaaaccgcccaggccagccaggcctgtgatccacttgcctggccacagtccatctgggctccaggacaaacacggcccattgaggaactgagctgctactaggggccagagctgctgtgggaatgaacaaaactctgatgactcagcaaaagcacaggcctaggcagggtggctcccacctataatcccagaccctagggaggctgaggccaggagttggagaccaacctggtgcagcattgcaagaccccatctctaaaaatctttaaaaaaattcttaaacattaaccaggcaggatgatgagggcctgtagtcctagctactccagaggctgaggcaagagaatcacttgagcccaggaattcaaggctgcagtggccaggatcccacagcactccagcctgggtgacagcaagacctggcctccccggggaaaaaaacaaacaaacaagggaagggagggggattcacgcaggccagggttgtctgaaatgggatatccatggggaaagggcagggatgccagaggcctcagcttctggaatgttagagccacaagctgagcagggtgagggcgccctgggccgttccactgtgtcactcacctgagctcttgggaacctggcctcgtgccctcctcgcccgcagtggctgattgtgggtgttgtgtggggaatgcagggttgttctctgagctgagggtttcctaggtccactgtgggagggatctggagccggggctggacttagatttgcttccggaaggaaggggtggggttgggggtgggggagcttctccattaccctccttagtgtgccagctggagacaagcttaaagtgatctccaaagccacgactgagtttgctgtgtagaaaacagaagaatgaaaggggaaaggcccaatggtgggtttgtttttgtaggttttttttttctgttttttttttttttttttttttttttccgagctgtcactgggctcctgacctgcccctgaactccaccctgccaggcagccaacagacaagctctctctaattgacccaggcaagagaggggagggattggaggagaaagctgggataggcaggccctggaaaggtcacctacctgctggctccaggccagtcttgaaggtgccaggggttctggcccagtgcagcccacaggcccccagcagcccatgcactccaggctctgaccacaaggccagtctagagggatgtgtgtgggcagagtgaaggggcaggggtggagcagagcatggatgcatagaacaagaaagaacaaggacactgcagtcccattgccctgggagtcagccccagcttcatggctcctggggacctcagagaacattgatagaagatcctagaagaaccacaacccgtggcaggtggttttatttccctgggtttgaaggaggctccacagacaagagaccagaggaggccgaggtttggaagccacagggccccgtggaaggggggcatccccccatcctcctcgttctttatcctcactttaaagtccaaggtcaagctgtgcacgagacaggtaaacaaccatctgagtaaaggtgaatctcccaagacttccaagaaatgcgtgagttcagaggcaagcggacaggtgggagtgtgggggaagctgaggcatgggaattccaggcagaggagaggcttctcatatgctagggccatggacccctcctccctcctctgtgcccatgaggaatccccgtgactggcaggtcctcaggctactagctccacccctgccctcagcaaccctcaggaggttcccttgactaagactttgtattgcactctagtaacaacctgtcggacccacacggggtgacacagaaaagaggcgagaatgtgagattaatagagtggtagcaagtgaatacaaaatcccaggcagcagtttcacatgaggagaagaaggaaacttgaaatagctgcatgcgctaagggccaataagtccctgaaaaataggatgaggaccaagctggctacgaccaaccagacacaacatggcgctgtatttgatgtaggtttcacctaggatctcattgtatgatcagtaacatatgaaaccgtacacccaccagtgccaagacggctccaggaacacctgtatttgggtgtaaattgtggcaccacggtcttgagaaatctttaccttttcctggactcttcatgaatatacccctctttagttgaagaagcccataaaggtcagccccacaccttgtagggcatgagacactctcttgaggacccccacgttcctcttcttcagtgagtccctttactctgcaggaaatctgcctacattcatgacttttgcacttgtccttaaattgtttctggctaaggtgccaagagcctggagaaggcctggcacggtggctcactcctgtaatcccagcactttgggaggccgaggcaggcagaccacctgaagtcgggagtttgagaccagcctgaccaacatggagaaaccttgtctctactaaaaatagaaaattagtcaagcctggtggcacacgcctgtaatcccagctacttgggaggctgaggcaggagaatcgcttgaacccgggaggcggaggttgcggtgagccaagatcacgccattgcactccagcctgggcaacaagagtgaaactcggtctcaaaaaaacaaaacaaaacaaaaaaaagcgt

SEQ ID NO: 1243400 - DNA, 4001 bp, Homo sapiens
catgctccaccagccgtgatcccaccgccaccaaattttgtgggcctgtgaggacccaccctctagctttcttaggtctacactgaagagtcttacgttcttggtcatcagagcaagaggcagacagtccccgccgcagaagatgagacaaggctggaggaagtgaggcgactttcccagaagaacaggaccaaagctgggctgagccagggcctccttccctggattcacatgccccacacctggacctttgctttttctttttattgtgggatttattttattttattttattttatttatttatttttgagacagagagtctcaaaaaaaaaaaaaaaaaaaaaaggaccgtggtctttctttttttctgtcgcccaagttggagtgcactggagtgataataactcactgcaaccttgaccttccaggctcaagcaatcctccaacctcagactttccagtagctggaactacagcgctatgccaccatgccctgctgatattttgcatttttatagagatggagactccccatgtttcccgggctggtctgtaactcctgagctcaagtgatccacccaatttggcctcccaaagtgctggcattacagcagtgagccaccacaggtgccacagttttatttttatttatatatttatttatttatttatttttgtgagttttgctcttgttgctcaggctggaatgcaatggtgggatctctggctcaccacaacctccttctcccgggttcaagtgattctcctgtctcaggcttcggagtagctgggattacaggcacccgccaccacacccggctaattttgtatttttagtagagacaaggttcttctatgttgctcagggtgctctcaaactcccaacctcaggtgatctgcctgcctcagcctcccaaagtgctgggattatggatgtgaaacactgtgccctgcctcaccttgaccttctgatccaacagagtctgggggagcagagccaggggcaggtgtgtcttcaggagtcgtggggccggtgtgtctttcagagtctccatccctgagcagtgggtcagggaaggtctggtgagctgaagccccagccctgtcttcctccactccccttgcacccaggacacactcacacacctgagggaatccctggggctttgaactcaaggaagggcacccgcatgaagatgggagctcggtgacacttctccaggtcaccaccctggtagatcatgtccagaatctggcttacccaggtagtgcctggagagggagggagatgggaggtgagcaggctgagggcacgacctcgctggccaaggtggggactgccacctgggagagggtgggtggccctcctcacttaccggacttggggtaggtgctgatgagcaggtcatcaggccgggcctggaagctctgcaggggccccagtgcctctgcaaagtacttgatgagcgggacccccttcacgtactccagtggcgggcgggaggtgtcctggatcagctccatgttcctgcgtcaggggccagagccaggcccgttcccttaccaccatcacaacagcaagaaagtggaattcttgctttcagggaagtcactgaggcctagggaggctgagtgacttgcccgcactcacaaagccactcagtggcggggctggggctgaaaaccaggtcgggctctaatgcggtggttccccagcctggcctcacctttcattcacctgcggagctgttcaaaatcccagggcctgggccatggtgcagaccagtgaaagcaccctcgtcgggcaaggcccagatgtcagggtgtgtgaaggtctccaggagagtccagctgcactgaggaagctctaggaccttcctgtgctgtctccctgccagccagcgccctttgtctcaccacttcctgctgggacccccagcctccacccagtggagatgctcccctccttgagcccctcagcccctcacatgtggaaaccgcccaggccagccaggcctgtgatccacttgcctggccacagtccatctgggctccaggacaaacacggcccattgaggaactgagctgctactaggggccagagctgctgtgggaatgaacaaaactctgatgactcagcaaaagcacaggcctaggcagggtggctcccacctataatcccagaccctagggaggctgaggccaggagttggagaccaacctggtgcagcattgcaagaccccatctctaaaaatctttaaaaaaattcttaaacattaaccaggcaggatgatgagggcctgtagtcctagctactccagaggctgaggcaagagaatcacttgagcccaggaattcaaggctgcagtggccaggatcccacagcactccagcctgggtgacagcaagacctggcctccccggggaaaaaaacaaacaaacaagggaagggagggggattcacgcaggccagggttgtctgaaatgggatatccatggggaaagggcagggatgccagaggcctcagcttctggaatgttagagccacaagctgagcagggtgagggcgccctgggccgttccactgtgtcactcacctgagctcttgggaacctggcctcgtgccctcctcgcccgcagtggctgattgtgggtgttgtgtggggaatgcagggttgttctctgagctgagggtttcctaggtccactgtgggagggatctggagccggggctggacttagatttgcttccggaaggaaggggtggggttgggggtgggggagcttctccattaccctccttagtgtgccagctggagacaagcttaaagtgatctccaaagccacgactgagtttgctgtgtagaaaacagaagaatgaaaggggaaaggcccaatggtgggtttgtttttgtaggttttttttttctgttttttttttttttttttttttttttccgagctgtcactgggctcctgacctgcccctgaactccaccctgccaggcagccaacagacaagctctctctaattgacccaggcaagagaggggagggattggaggagaaagctgggataggcaggccctggaaaggtcacctacctgctggctccaggccagtcttgaaggtgccaggggttctggcccagtgcagcccacaggcccccagcagcccatgcactccaggctctgaccacaaggccagtctagagggatgtgtgtgggcagagtgaaggggcaggggtggagcagagcatggatgcatagaacaagaaagaacaaggacactgcagtcccattgccctgggagtcagccccagcttcatggctcctggggacctcagagaacattgatagaagatcctagaagaaccacaacccgtggcaggtggttttatttccctgggtttgaaggaggctccacagacaagagaccagaggaggccgaggtttggaagccacagggccccgtggaaggggggcatccccccatcctcctcgttctttatcctcactttaaagtccaaggtcaagctgtgcacgagacaggtaaacaaccatctgagtaaaggtgaatctcccaagacttccaagaaatgcgtgagttcagaggcaagcggacaggtgggagtgtgggggaagctgaggcatgggaattccaggcagaggagaggcttctcatatgctagggccatggacccctcctccctcctctgtgcccatgaggaatccccgtgactggcaggtcctcaggctactagctccacccctgccctcagcaaccctcaggaggttcccttgactaagactttgtattgcactctagtaacaacctgtcggacccacacggggtgacacagaaaagaggcgagaatgtgagattaatagagtggtagcaagtgaatacaaaatcccaggcagcagtttcacatgaggagaagaaggaaacttgaaatagctgcatgcgctaagggccaataagtccctgaaaaat
